United States Patent Application Publication US 2018/0126003 A1 - sequence listing, part 141

SEQ ID NO: 247164 - DNA, 5448 bp, Artificial Sequence
  derived and/or modified sequence
ttcaaattctcccaagctggaggtagtggagcaaacaagatcagcaacaatgagggagcagctgcaccactttgtgttactctctgatggccagcacagggctgcaagtagtggctgcaaaaaccagacaaatagatggaaatccaggaactagaggaaattcaggcctgccaggggctctgggaagtgtttgttactctctcagaaagagccagggattatctgcacaaaactggaaggtttattgtgattggcgggattgtctcccctgtccacgactcctatggaaaacagggcctcgtgtcaagccggcaccgtctcatcatgtgtcagctggccgtccagaattctgattggatcagggtggacccttgggagtgctaccaggacacctggcagacgacctgcagcgtgttggaacaccaccgggacctcatgaagagggtgactggctgcatcctctccaatgtcaacacaccttccatgacacctgtgatcggacagccacaaaacgagaccccccagcccatttaccagaacagcaacgtggccaccaagcccactgcagccaagatcttggggaaggtgggagaaagcctcagccggatctgctgtgtccgcccgccggtggagcgtttcacctttgtagatgagaatgccaatctgggcacggtgatgcggtatgaagagattgagctacggatcctgctgctgtgtggtagtgacctgctggagtccttctgcatcccagggctctggaacgaggcagatatggaggtgattgttggtgactttgggattgtggtggtgccccgggatgcagccgacacagaccgaatcatgaatcactcctcaatactccgcaaatacaaaaacaacatcatggtggtgaaggatgacatcaaccatcccatgtctgttgtcagctcaaccaagagcaggctggccctgcagcatggggacggccatgttgtggattacctgtcccagccggtcatcgactacatcctcaaaagccagctgtacatcaatgcctccggctagcagcccctcgtcctccggcaacacaatggcccctccatctttgtcagccccctgtttctctcctgcctctctgtttctccatctcctcgtcttgactgttttccctacttgctgacttaaccccccatagtgtgggggacctgcagagaaccatggcattccctattccacagtcatctttggacagactttcctctagtctccgggttgggggtgggtgagggaatggggtgggagtcgggggaagtgcagtccttggagatgtactggtgtccgtctcccagcatgctctagagaggcggctctggtgcccatcctcccagcacgctctggggaggcggctctggtgcccatcctcccagcatgctctagagaggcggctctggtgcccctcctcccagcatgctctggggaggcggctctggctcttgccttcccagcatgccctttactacaaagggctatttttcttttctttcttttgtttatttatttttctttgttcactccctgtagaacttggatgaaatcagtgtccatggttctttatgtttgtagtcttgatgtgctcctgtggtattacttcccctctgataggacattgtagccagcctcagcactcagtgagttcatcagggccacacccagtagagaaggccaagcaacctccacttcttcagcaccacacacacgcacacacacacacacgcacacatgcgtgtgcacccgcgcacgcacatacacacacacatatagcagtagcagcagcagcagcagcagcagcaacctttgatcaggagtgagattttcgggttctgaaacctgggacacgagtctgtgaatagtcggttttctcagaataatttgaatctgttttcttagtttcaaatgaccatttccctgatgctctgagcttatgatcacacagagccagtccatcctcatttcctggtggcatctgttcatttacctttgtggactgtagctgatggcacagtgcgggttccctaccagccaggggtttccaagggacctttggaggccatgcttagacacattcctgtacctgagaacaaccacataggcaggaccagatccacatcgtgcagtcgtgtcataaaaaaacaaaacaaaacaaaaaaacactaggagtccactcaaccctggaggtctttgctaattggaattatgtattgtctgttgggctgggaaatgtctctttcatattgtaagtccaggatgaactaggagaaagcaatttgttgccctgatgataactgatgattttcaccctctctagctgaggtaactcagacagtgcatgaggtcagtttcttcttgagaagcagtgccttggtcttgtttctgtggttggttctagcccctgcagagcctgggagctgcaggaactgtctgagaaaatctccctaataggggagtgggttcccagaagggagatctgggaggggtcaggagccactaagttgcttcactccttttttctctaattttctaccttcctctctgttcctgcagacagttttgccagctttgcttctggttactagggtctcatgcgtgtcctgcttggagagccataaggaaattgctgtcttgtgctttgtgtctctcatccagtctctggctcttgggattctggtctttgagaaatagtccctgagtattaggatacttttatcaaaatctagtaccagctacggccagaaagggccaggtgggacctgaaagcaaagacaatgttctttaccacacgtttcacatctgcaacatccttcaattgcgggaaaaggaacttgatttaacagaagaacatggtagagcagcatccagaaagtctgttattcctcttggattttttgaaataatcttcagaggaaggaaggaaaatcctattttggggtatcagtgtttgactagggatcatgaaataataaactgaaaaaaactttagagttcagttgatccaacactttcctttaaaagttgagggagcagaggcccatgggattaaatggctggtccaggtcagccagcaggtgtagggcctgacaagaacatattgtttccctgacccctaggccgtcacaccacaccctccatttcctcatgttgctgaccaggtgcccatatgatttctacacttcccaagccttaccctggcatctttcttttaaattatatctgtcccaggtgctctccacacataggatggtaatgccagtcccaggggagggtgtgatagtaaggaaggccactgttaggtttcctttagaaataaagagatctcagcagcttggaagaaatcccagaagcggactccatcaatccaagaaagagttgctttgtggaaggtgaaggaagacccacagagtgctcaggatgatgctattgctggagagcgaaagatggaacagccttgtccaggcagaacagtcataagccaggaaatgaaacaaaggaaaacaggtgcctgaatttcctggggaaacatggcttgtttaaggacttggagttatggatggaatttatgggacccacgtgagcagacctgaggaaggctcgatttcttttgtttcttggtccactctgtcactctgctctggtcaagccccatttggtctacagcccatgagaaggaatgaggctggttctgcactctcagcatgcagtccgaaagcatgtgggagtggggagggaaagtgagatgaattaagacaaagaacaggtgccatagaagtagatttctaggaatgaagtggggcagatcttatctttgtggattacaggcactgtactaaaaacaggtttcctatttaatataaaaagaaagtgaatcttcttttggatagaatcatccattcccatcgccgcaccccctaccccccaaacacacacacacacacacacacacacacacacacacacacacacacacacgccctactcttcatttgctaggggaaggtcacagcacaactaaatccaggacaggacattgtgaccatgacccagccacagtcaataccagaaagatgattcagagtctgaagtggtgccccaggtgccaacaggataacctctaccccccgactttgtctctggggtcctgttccttcctgcaaagcccaatccaagactggcatggctcagaggttgtgagaaaggcatggactggaacaatcatgtccagaggggtctggagctttgtttcctgttcaccagcaaaaaatgtctctcccatttttctgaaagtggctgatgtaagaacaggcagaaggaaaaccctttttgtcaataactctgtccttaaggaatggtcctctgggagggctgtgctgctagtgggtacctcagtcacacacccccaaccccaggcagcctctagagccttcttgctttcattttccttgaatgtacataggaacaagggggaaagtctcttactgaagtgcctgaaacccaaagctagagcttctagagacgccgttcttcctgtctcagcttggccagcctttcaacaatgttctctagtttcaagctccagcttctcagaaagaattaaagaacttgctgttcaaattaagtagaaagtgagactcaataataactgaactacagcaaaaggcagagaattacagggagaaaaaacttgtacttaccagcccaattctactctcctcaaactgacacacacacacacacacacacacacacacacacacacacactcttttaggggactaagagagagaagcatgttattacattttactcatccaaacagtaatgcaaaaataaaacggtagaatatgaaaagctcaggatctctcccaaggctacctactgcaggagggccaacaggtgagatgggaagaatggaaacagggaccgattttgtagctcatacaattaggacaccttaggaatagcattgtagtaatggtgatgaatatgctctgccaaattcatccagtctgcaccatcttatagctgcccagcacactcgactgttcatgtggtctctttgtagtgtgagtttggagtgtcctattagcctgttctggttaggaatgagttaacggctctttccctcaaccttagtctagtcccagggctgaggattcagctggatccacatggtcttgagggttggcatgaggagggggaagcttttttgaatcgctttttgatcacataatctgccattttaagagtaagatttgctttatggaaatcaattcattaataaaaaatgatattcaagttgcaataccatttcacagtgaaatattttgagtacaattttgttgctagaatagtcatgggcaagagttttatgcaaaatgtttcaattatgttaataaataagacaatgctacaaga

SEQ ID NO: 247165 - DNA, 909 bp, Artificial Sequence
  derived and/or modified sequence
atggagatccaggagctggaggagatccaggcctgccagggcctgtgggaggtgttcgtgaccctgagcgagagagccagagactacctgcacaagaccggcagattcatcgtgatcggcggcatcgtgagccccgtgcacgacagctacggcaagcagggcctggtgagcagcagacacagactgatcatgtgccagctggccgtgcagaacagcgactggatcagagtggacccctgggagtgctaccaggacacctggcagaccacctgcagcgtgctggagcaccacagagacctgatgaagagagtgaccggctgcatcctgagcaacgtgaacacccccagcatgacccccgtgatcggccagccccagaacgagaccccccagcccatctaccagaacagcaacgtggccaccaagcccaccgccgccaagatcctgggcaaggtgggcgagagcctgagcagaatctgctgcgtgagaccccccgtggagagattcaccttcgtggacgagaacgccaacctgggcaccgtgatgagatacgaggagatcgagctgagaatcctgctgctgtgcggcagcgacctgctggagagcttctgcatccccggcctgtggaacgaggccgacatggaggtgatcgtgggcgacttcggcatcgtggtggtgcccagagacgccgccgacaccgacagaatcatgaaccacagcagcatcctgagaaagtacaagaacaacatcatggtggtgaaggacgacatcaaccaccccatgagcgtggtgagcagcaccaagagcagactggccctgcagcacggcgacggccacgtggtggactacctgagccagcccgtgatcgactacatcctgaagagccagctgtacatcaacgccagcggctag

SEQ ID NO: 247166 - protein, 664 aa, Artificial Sequence
  derived and/or modified sequence
METPSQRRATRSGAQASSTPLSPTRITRLQEKEDLQELNDRLAVYIDRVRSLETENAGLRLRITESEEVVSREVSGIKAAYEAELGDARKTLDSVAKERARLQLELSKVREEFKELKARNTKKEGDLIAAQARLKDLEALLNSKEAALSTALSEKRTLEGELHDLRGQVAKLEAALGEAKKQLQDEMLRRVDAENRLQTMKEELDFQKNIYSEELRETKRRHETRLVEIDNGKQREFESRLADALQELRAQHEDQVEQYKKELEKTYSAKLDNARQSAERNSNLVGAAHEELQQSRIRIDSLSAQLSQLQKQLAAKEAKLRDLEDSLARERDTSRRLLAEKEREMAEMRARMQQQLDEYQELLDIKLALDMEIHAYRKLLEGEEERLRLSPSPTSQRSRGRASSHSSQTQGGGSVTKKRKLESTESRSSFSQHARTSGRVAVEEVDEEGKFVRLRNKSNEDQSMGNWQIKRQNGDDPLLTYRFPPKFTLKAGQVVTIWAAGAGATHSPPTDLVWKAQNTWGCGNSLRTALINSTGEEVAMRKLVRSVTVVEDDEDEDGDDLLHHHHGSHCSSSGDPAEYNLRSRTVLCGTCGQPADKASASGSGAQVGGPISSGSSASSVTVTRSYRSVGGSGGGSFGDNLVTRSYLLGNSSPRTQSPQNCSIM

SEQ ID NO: 247167 - DNA, 3243 bp, Artificial Sequence
  derived and/or modified sequence
aggaggacctattagagcctttgccccggcgtcggtgactcagtgttcgcgggagcgccgcacctacaccagccaacccagatcccgaggtccgacagcgcccggcccagatccccacgcctgccaggagcaagccgagagccagccggccggcgcactccgactccgagcagtctctgtccttcgacccgagccccgcgccctttccgggacccctgccccgcgggcagcgctgccaacctgccggccatggagaccccgtcccagcggcgcgccacccgcagcggggcgcaggccagctccactccgctgtcgcccacccgcatcacccggctgcaggagaaggaggacctgcaggagctcaatgatcgcttggcggtctacatcgaccgtgtgcgctcgctggaaacggagaacgcagggctgcgccttcgcatcaccgagtctgaagaggtggtcagccgcgaggtgtccggcatcaaggccgcctacgaggccgagctcggggatgcccgcaagacccttgactcagtagccaaggagcgcgcccgcctgcagctggagctgagcaaagtgcgtgaggagtttaaggagctgaaagcgcgcaataccaagaaggagggtgacctgatagctgctcaggctcggctgaaggacctggaggctctgctgaactccaaggaggccgcactgagcactgctctcagtgagaagcgcacgctggagggcgagctgcatgatctgcggggccaggtggccaagcttgaggcagccctaggtgaggccaagaagcaacttcaggatgagatgctgcggcgggtggatgctgagaacaggctgcagaccatgaaggaggaactggacttccagaagaacatctacagtgaggagctgcgtgagaccaagcgccgtcatgagacccgactggtggagattgacaatgggaagcagcgtgagtttgagagccggctggcggatgcgctgcaggaactgcgggcccagcatgaggaccaggtggagcagtataagaaggagctggagaagacttattctgccaagctggacaatgccaggcagtctgctgagaggaacagcaacctggtgggggctgcccacgaggagctgcagcagtcgcgcatccgcatcgacagcctctctgcccagctcagccagctccagaagcagctggcagccaaggaggcgaagcttcgagacctggaggactcactggcccgtgagcgggacaccagccggcggctgctggcggaaaaggagcgggagatggccgagatgcgggcaaggatgcagcagcagctggacgagtaccaggagcttctggacatcaagctggccctggacatggagatccacgcctaccgcaagctcttggagggcgaggaggagaggctacgcctgtcccccagccctacctcgcagcgcagccgtggccgtgcttcctctcactcatcccagacacagggtgggggcagcgtcaccaaaaagcgcaaactggagtccactgagagccgcagcagcttctcacagcacgcacgcactagcgggcgcgtggccgtggaggaggtggatgaggagggcaagtttgtccggctgcgcaacaagtccaatgaggaccagtccatgggcaattggcagatcaagcgccagaatggagatgatcccttgctgacttaccggttcccaccaaagttcaccctgaaggctgggcaggtggtgacgatctgggctgcaggagctggggccacccacagcccccctaccgacctggtgtggaaggcacagaacacctggggctgcgggaacagcctgcgtacggctctcatcaactccactggggaagaagtggccatgcgcaagctggtgcgctcagtgactgtggttgaggacgacgaggatgaggatggagatgacctgctccatcaccaccacggctcccactgcagcagctcgggggaccccgctgagtacaacctgcgctcgcgcaccgtgctgtgcgggacctgcgggcagcctgccgacaaggcatctgccagcggctcaggagcccaggtgggcggacccatctcctctggctcttctgcctccagtgtcacggtcactcgcagctaccgcagtgtggggggcagtgggggtggcagcttcggggacaatctggtcacccgctcctacctcctgggcaactccagcccccgaacccagagcccccagaactgcagcatcatgtaatctgggacctgccaggcaggggtgggggtggaggcttcctgcgtcctcctcacctcatgcccaccccctgccctgcacgtcatgggagggggcttgaagccaaagaaaaataaccctttggtttttttcttctgtatttttttttctaagagaagttattttctacagtggttttatactgaaggaaaaacacaagcaaaaaaaaaaaaaagcatctatctcatctatctcaatcctaatttctcctcccttccttttccctgcttccaggaaactccacatctgccttaaaaccaaagagggcttcctctagaagccaagggaaaggggtgcttttatagaggctagcttctgcttttctgccctggctgctgcccccaccccggggaccctgtgacatggtgcctgagaggcaggcatagaggcttctccgccagcctcctctggacggcaggctcactgccaggccagcctccgagagggagagagagagagagaggacagcttgagccgggcccctgggcttggcctgctgtgattccactacacctggctgaggttcctctgcctgccccgcccccagtccccacccctgcccccagccccggggtgagtccattctcccaggtaccagctgcgcttgcttttctgtattttatttagacaagagatgggaatgaggtgggaggtggaagaagggagaagaaaggtgagtttgagctgccttccctagctttagaccctgggtgggctctgtgcagtcactggaggttgaagccaagtggggtgctgggaggagggagagggaggtcactggaaaggggagagcctgctggcacccaccgtggaggaggaaggcaagagggggtggaggggtgtggcagtggttttggcaaacgctaaagagcccttgcctccccatttcccatctgcaccccttctctcctccccaaatcaatacactagttgtttctacccctgaaaaaaaaaaaaaaaaaa

SEQ ID NO: 247168 - DNA, 1995 bp, Artificial Sequence
  derived and/or modified sequence
atggagaccccaagccagcggagggctacaagatccggtgctcaagcctcctctactccactctcgcccacgagaatcacccggctccaagagaaagaagatctgcaggaactgaacgataggctagctgtctatattgaccgggtccggtcattggagacggagaatgccgggttgaggctaaggatcacagagagcgaagaagtagtcagtagagaagtttccggcatcaaagctgcttacgaagccgagcttggcgacgcacgcaagacccttgattcggtagcaaaagaacgggccaggctgcagcttgaactgagcaaagtgcgggaagagtttaaagaactcaaagcaagaaataccaagaaggagggggaccttatcgccgcccaggcccgactcaaggacctcgaagcgctacttaatagtaaagaagcagccctttctactgcactgagcgaaaagaggacactggagggggagctccatgacctcagaggccaggttgccaaactggaggccgcccttggggaagccaagaaacaactgcaagatgagatgttacggagggtggatgccgagaatcggctgcagaccatgaaggaagagttggactttcagaaaaatatatactctgaagaactgcgtgaaacaaagaggcgacatgaaaccagactggtggagatcgataacggaaagcaacgcgagtttgagtccaggctagccgatgcactccaggagttacgggcccagcatgaggatcaggttgaacagtacaagaaggaactggaaaagacgtacagtgcgaagctggataacgctcgccaatcagccgaacgtaactcaaacttggtcggggccgctcacgaggaactgcagcaaagtaggataaggatcgactcactcagcgctcagctctctcagttgcagaagcagcttgcagctaaagaggctaagctgagagacctcgaggactcgctggcacgagaaagagatacaagtagaagattgctagctgagaaagaacgggaaatggcggagatgcgagcccgcatgcagcaacagctggatgagtaccaagaactgttagacatcaaactcgcgcttgacatggaaattcacgcctacaggaagctcctggagggagaggaggaaagactgcgcctgagcccatcccccaccagccagcgctcgagagggagggcctcatcccatagttctcaaacccagggaggcggcagtgtcaccaaaaaaaggaaactagagtcaacagaatcacgctcaagtttttcccagcatgcgcggacttctgggcgggtcgctgtcgaggaggtcgatgaagagggaaagttcgtaaggctgagaaacaagtctaatgaggaccagagcatgggaaactggcagatcaagcggcaaaacggcgacgatccactactgacgtaccgattccctccaaaattcactctgaaggctggccaggtggtcacgatttgggctgccggcgccggtgcaacccactcaccgcccacagatctcgtttggaaggcccagaacacttggggttgcggcaattccctgcgaacagcactcataaactccacaggggaagaggtggccatgcgaaagctggttagaagtgtgaccgttgtcgaggacgatgaagacgaagatggagatgatctgttacaccaccatcacggtagtcactgttcatcttccggagacccagccgaatacaatctaagaagtaggacagttttatgtggaacctgcggccagccagctgacaaggcctcggctagtggatcaggtgcgcaggttggagggcctattagttcaggctcaagtgccagttcagtcaccgtgacacgatcatatagatctgtaggcggcagtggcggggggtcattcggcgataacctggttacgcgcagctacttgctcgggaactcatcccccagaacacaatccccccagaattgctcaatcatgtag

SEQ ID NO: 247169 - DNA, 3190 bp, Artificial Sequence
  derived and/or modified sequence
actcagtgttcgcgggagcgccgcacctacaccagccaacccagatcccgaggtccgacagcgcccggcccagatccccacgcctgccaggagcaagccgagagccagccggccggcgcactccgactccgagcagtctctgtccttcgacccgagccccgcgccctttccgggacccctgccccgcgggcagcgctgccaacctgccggccatggagaccccgtcccagcggcgcgccacccgcagcggggcgcaggccagctccactccgctgtcgcccacccgcatcacccggctgcaggagaaggaggacctgcaggagctcaatgatcgcttggcggtctacatcgaccgtgtgcgctcgctggaaacggagaacgcagggctgcgccttcgcatcaccgagtctgaagaggtggtcagccgcgaggtgtccggcatcaaggccgcctacgaggccgagctcggggatgcccgcaagacccttgactcagtagccaaggagcgcgcccgcctgcagctggagctgagcaaagtgcgtgaggagtttaaggagctgaaagcgcgcaataccaagaaggagggtgacctgatagctgctcaggctcggctgaaggacctggaggctctgctgaactccaaggaggccgcactgagcactgctctcagtgagaagcgcacgctggagggcgagctgcatgatctgcggggccaggtggccaagcttgaggcagccctaggtgaggccaagaagcaacttcaggatgagatgctgcggcgggtggatgctgagaacaggctgcagaccatgaaggaggaactggacttccagaagaacatctacagtgaggagctgcgtgagaccaagcgccgtcatgagacccgactggtggagattgacaatgggaagcagcgtgagtttgagagccggctggcggatgcgctgcaggaactgcgggcccagcatgaggaccaggtggagcagtataagaaggagctggagaagacttattctgccaagctggacaatgccaggcagtctgctgagaggaacagcaacctggtgggggctgcccacgaggagctgcagcagtcgcgcatccgcatcgacagcctctctgcccagctcagccagctccagaagcagctggcagccaaggaggcgaagcttcgagacctggaggactcactggcccgtgagcgggacaccagccggcggctgctggcggaaaaggagcgggagatggccgagatgcgggcaaggatgcagcagcagctggacgagtaccaggagcttctggacatcaagctggccctggacatggagatccacgcctaccgcaagctcttggagggcgaggaggagaggctacgcctgtcccccagccctacctcgcagcgcagccgtggccgtgcttcctctcactcatcccagacacagggtgggggcagcgtcaccaaaaagcgcaaactggagtccactgagagccgcagcagcttctcacagcacgcacgcactagcgggcgcgtggccgtggaggaggtggatgaggagggcaagtttgtccggctgcgcaacaagtccaatgaggaccagtccatgggcaattggcagatcaagcgccagaatggagatgatcccttgctgacttaccggttcccaccaaagttcaccctgaaggctgggcaggtggtgacgatctgggctgcaggagctggggccacccacagcccccctaccgacctggtgtggaaggcacagaacacctggggctgcgggaacagcctgcgtacggctctcatcaactccactggggaagaagtggccatgcgcaagctggtgcgctcagtgactgtggttgaggacgacgaggatgaggatggagatgacctgctccatcaccaccacggctcccactgcagcagctcgggggaccccgctgagtacaacctgcgctcgcgcaccgtgctgtgcgggacctgcgggcagcctgccgacaaggcatctgccagcggctcaggagcccaggtgggcggacccatctcctctggctcttctgcctccagtgtcacggtcactcgcagctaccgcagtgtggggggcagtgggggtggcagcttcggggacaatctggtcacccgctcctacctcctgggcaactccagcccccgaacccagagcccccagaactgcagcatcatgtaatctgggacctgccaggcaggggtgggggtggaggcttcctgcgtcctcctcacctcatgcccaccccctgccctgcacgtcatgggagggggcttgaagccaaagaaaaataaccctttggtttttttcttctgtatttttttttctaagagaagttattttctacagtggttttatactgaaggaaaaacacaagcaaaaaaaaaaaaaagcatctatctcatctatctcaatcctaatttctcctcccttccttttccctgcttccaggaaactccacatctgccttaaaaccaaagagggcttcctctagaagccaagggaaaggggtgcttttatagaggctagcttctgcttttctgccctggctgctgcccccaccccggggaccctgtgacatggtgcctgagaggcaggcatagaggcttctccgccagcctcctctggacggcaggctcactgccaggccagcctccgagagggagagagagagagagaggacagcttgagccgggcccctgggcttggcctgctgtgattccactacacctggctgaggttcctctgcctgccccgcccccagtccccacccctgcccccagccccggggtgagtccattctcccaggtaccagctgcgcttgcttttctgtattttatttagacaagagatgggaatgaggtgggaggtggaagaagggagaagaaaggtgagtttgagctgccttccctagctttagaccctgggtgggctctgtgcagtcactggaggttgaagccaagtggggtgctgggaggagggagagggaggtcactggaaaggggagagcctgctggcacccaccgtggaggaggaaggcaagagggggtggaggggtgtggcagtggttttggcaaacgctaaagagcccttgcctccccatttcccatctgcaccccttctctcctccccaaatcaatacactagttgtttctacccctggc

SEQ ID NO: 247170 - DNA, 1995 bp, Artificial Sequence
  derived and/or modified sequence
atggagacccccagccagaggcgggccaccaggtctggggcccaggccagcagcacccccctgagccccacccgcatcacccggctgcaggagaaggaggacctgcaggagctgaatgaccggctggccgtgtacatcgacagagtgcgcagcctggagacagaaaatgccggcctgcggctgcgcatcacagagagcgaggaggtggtgtcccgggaggtgtctggcatcaaggccgcctatgaagctgagctgggagatgccaggaagaccctggacagcgtggccaaggagcgggcccggctgcagctggagctgagcaaggtgcgggaggagttcaaggagctgaaggccaggaacaccaagaaggagggggacctgattgctgcccaggcccggctgaaggacctggaggccctgctgaacagcaaggaggccgccctgagcacagccctgtctgagaagaggaccctggagggggagctgcatgacctgcggggccaggtggccaagctggaggccgccctgggggaggccaagaagcagctgcaggatgagatgctgcggcgggtggatgctgagaaccggctgcagaccatgaaggaggagctggacttccagaagaacatctacagcgaggagctgcgggagaccaagagaagacatgagacccggctggtggagattgacaatggcaagcagcgggagtttgagagccggctggctgatgccctgcaggagctgcgggcccagcacgaggaccaggtggagcagtacaagaaggagctggagaagacctacagcgccaagctggacaatgcccggcagagcgctgagaggaacagcaacctggtgggcgccgcccacgaggagctgcagcagagccgcatcagaattgacagcctgagcgcccagctgagccagctgcagaagcagctggccgccaaggaggccaagctgcgggacctggaggacagcctggcccgggagcgggacaccagccggcggctgctggccgagaaggagcgggagatggccgagatgagggccaggatgcagcagcagctggatgagtaccaggagctgctggacatcaagctggccctggacatggagatccacgcctacaggaagctgctggagggggaggaggagcggctgcggctgagccccagccccaccagccagaggagccggggccgggccagcagccacagcagccagacccagggcggcggctctgtgaccaagaagaggaagctggagagcacagagagccgcagcagcttcagccagcacgcccggaccagcggccgggtggccgtggaggaggtggatgaggagggcaagtttgtgcggctgaggaacaagagcaatgaagaccagagcatgggcaactggcagatcaagaggcagaatggagatgaccccctgctgacctaccgcttcccccccaagttcaccctgaaggccggccaggtggtgaccatctgggccgccggggccggggccacccacagccccccaacagacctggtgtggaaggcccagaacacctggggctgcggcaacagcctgaggacagccctgatcaacagcactggagaggaggtggccatgaggaagctggtgcgctctgtgacagtggtggaggatgatgaagatgaagatggagatgacctgctgcaccaccaccacggcagccactgcagcagcagcggggaccctgctgagtacaacctgcggagcaggacagtgctgtgtggcacctgtggccagcctgctgacaaggccagcgccagcggcagcggggcccaggtgggcggccccatcagcagcggcagcagcgccagctctgtgacagtgaccaggagctacagatctgtgggcggcagcggcggcggcagctttggagacaacctggtgaccaggagctacctgctgggcaacagcagccccaggacccagagcccccagaactgcagcatcatgtag

SEQ ID NO: 247171 - DNA, 1995 bp, Artificial Sequence
  derived and/or modified sequence
atggagacccccagccagcggcgggccacccggagcggcgcccaggcttcaagtacccccctctcacccactcgcataacccgcctacaagaaaaagaagatctgcaggaactgaatgatcggctggcagtctacattgatagagtaagatcactggagactgaaaatgctggactccgtttacggattactgagtcagaagaggtcgtgtcacgggaggtatccggcatcaaggcagcctatgaggcagagcttggcgacgctcggaaaacattggattctgtggccaaggagagggccagattgcagcttgaactgagcaaggttcgagaagagttcaaagagctaaaagctcggaacaccaagaaagagggggatcttatagccgctcaagctcggctgaaagatctggaagctctgctgaattccaaggaagcggccttatccaccgccttgagcgaaaagagaacactggaaggagagctgcatgacctccgggggcaggtagcaaagctcgaggctgcgctgggagaggccaagaagcagcttcaggacgaaatgctgagaagggtggacgcggagaaccgattacagaccatgaaggaagaactcgacttccagaagaatatttacagcgaagagctccgagaaaccaaaagaagacacgagacacgtcttgtggaaatcgataacggcaaacagcgggagttcgaatctcggctcgccgacgcgctccaggagctgagggctcagcacgaggaccaagttgagcaatataaaaaagagttggagaaaacctactccgcaaagttggacaatgccagacagtccgccgagagaaatagtaatctggttggcgcggcccatgaggaattgcagcaaagccgtatccggatcgacagcctgagcgcacagctttcgcaactgcagaagcagctcgccgccaaggaagctaagctcagagatcttgaagatagcttggcccgtgagcgagatacctcaagacgcctgttagcagagaaggaacgggaaatggccgaaatgcgggctaggatgcagcagcaactagacgagtaccaggagctgctcgacattaagctggctttagacatggagatacacgcctatagaaagttgctggagggggaggaggagagactgagactgagcccctcacccacctcccagcgctcacgaggaagagctagctctcacagctcacagacccagggcggagggtctgtgacaaagaagcggaaactagagtctactgagtccaggtcctcatttagccagcacgccagaaccagcggtagggtcgcagtggaggaggttgacgaggagggaaagttcgtgcgactccgcaataaatctaacgaggaccaaagcatggggaactggcagatcaagcgccagaatggtgatgaccctctcctaacgtacagatttcccccaaaattcacactcaaggccggccaagtggtgaccatctgggctgctggcgccggggccacccattcaccccctacagatctggtatggaaagcccaaaacacctgggggtgtggaaatagcctgcgcacagctctgatcaatagcacgggggaagaggtggcgatgagaaagctagtgcgcagcgtaacagtggttgaagatgacgaggacgaggatggagacgacttgctgcatcaccaccacggctcccactgcagcagttcgggcgatcctgcagaatataatctccggtcccgtaccgtcctctgcggtacatgcggacaacctgctgataaagcatcagcttccggaagtggtgcacaggtgggcgggcccatcagtagtggttcctccgcatctagcgtgacagtcaccagatcctatcggagcgtcggggggtctgggggaggatcctttggagacaatttagttacacggagctatttactgggaaactccagcccgcgcacacagagcccacagaattgcagcattatgtag

SEQ ID NO: 247172 - DNA, 1995 bp, Artificial Sequence
  derived and/or modified sequence
atggagacaccatctcagcgcagggccacccgatcaggcgcacaggcgtccagtacccctctcagcccaacgcgaatcactaggctgcaagaaaaggaggaccttcaggaactgaatgacagacttgcagtgtatattgacagggtccgtagtctcgaaactgagaacgccggacttcggttgcggattaccgagtctgaggaagtggttagcagggaggtttcaggcataaaagccgcttacgaagccgagctgggagatgctagaaaaaccctcgatagcgtagccaaagagcgcgcaagactgcagctggagttgtccaaggtccgcgaggagtttaaggaactgaaggcccgtaatacaaaaaaggagggggacctgatcgccgctcaagctaggctcaaggatctcgaagccttattgaatagcaaagaggccgctctgagcacggctctgtcagaaaagcggacgctggaaggagaactccatgatttacgcggacaggtggctaaactcgaggccgctttaggcgaagctaagaagcagttgcaggatgaaatgttgagaagagtcgacgccgaaaataggttgcagacgatgaaagaagaactcgatttccagaaaaacatttattctgaggagttacgtgaaacgaagagacggcatgagacacggctagtggagattgataatggaaaacagcgcgagttcgagtctagattggccgacgcccttcaagagctgcgcgctcagcatgaggatcaagtggaacaatacaaaaaggaactggaaaagacatacagcgctaagctggacaacgcccgacaatccgccgagaggaattctaatctggttggagctgcccatgaggaattgcagcaaagtaggatcagaatagactccctgtctgctcaactcagtcaattgcagaaacagctcgccgcaaaggaggccaaactccgggatctcgaagactctctggcacgagaacgggatacaagcagacggttacttgctgagaaagagcgagaaatggctgagatgagagcacgaatgcagcagcagctggatgagtaccaggagttgcttgacatcaagttggcccttgacatggagatccacgcatatcgtaagctgctggagggtgaggaggagagactgcgactgtcaccctctcccaccagccagcggagcagaggccgtgcctcttcccactcttcccaaacccagggagggggtagtgtgaccaaaaagcgcaagttggagtctacagagtcacgcagctcttttagtcaacatgcacgcaccagtggaagagtggccgtggaagaggtggacgaggaaggcaaatttgttcgtctgaggaacaagtcaaatgaagatcagtccatgggaaactggcagattaagcggcagaatggcgatgacccactgctcacttacaggttccctccaaagtttaccttgaaagctgggcaggttgtaacaatttgggctgccggtgctggtgccacccatagccctccaactgatctcgtgtggaaagcccaaaacacctggggatgcggcaacagtctgaggaccgccctaataaatagtaccggggaggaggttgccatgagaaagctcgtgcgcagtgtgaccgttgtagaagacgatgaggacgaagatggagatgacctgttgcaccatcaccacgggtcccattgtagctccagtggagacccagcagaatataatctccgatcccggacagttctgtgcggaacatgcggccagcctgctgacaaagcttccgctagcggatccggcgcacaggtgggaggccctattagctccggctcgagcgcgtcctctgtcactgtcactcggagctaccgctcagtcggcggttccggtggaggatcatttggagacaacctggtcaccagaagttacctgctgggaaattcctcgcctaggactcaaagccctcagaactgctcaatcatgtag

SEQ ID NO: 247173 - DNA, 1995 bp, Artificial Sequence
  derived and/or modified sequence
atggagacccccagccagagaagagccaccagaagcggcgcccaggccagcagcacccccctgagccccaccagaatcaccagactgcaggagaaggaggacctgcaggagctgaacgacagactggccgtgtacatcgacagagtgagaagcctggagaccgagaacgccggcctgagactgagaatcaccgagagcgaggaggtggtgagcagagaggtgagcggcatcaaggccgcctacgaggccgagctgggcgacgccagaaagaccctggacagcgtggccaaggagagagccagactgcagctggagctgagcaaggtgagagaggagttcaaggagctgaaggccagaaacaccaagaaggagggcgacctgatcgccgcccaggccagactgaaggacctggaggccctgctgaacagcaaggaggccgccctgagcaccgccctgagcgagaagagaaccctggagggcgagctgcacgacctgagaggccaggtggccaagctggaggccgccctgggcgaggccaagaagcagctgcaggacgagatgctgagaagagtggacgccgagaacagactgcagaccatgaaggaggagctggacttccagaagaacatctacagcgaggagctgagagagaccaagagaagacacgagaccagactggtggagatcgacaacggcaagcagagagagttcgagagcagactggccgacgccctgcaggagctgagagcccagcacgaggaccaggtggagcagtacaagaaggagctggagaagacctacagcgccaagctggacaacgccagacagagcgccgagagaaacagcaacctggtgggcgccgcccacgaggagctgcagcagagcagaatcagaatcgacagcctgagcgcccagctgagccagctgcagaagcagctggccgccaaggaggccaagctgagagacctggaggacagcctggccagagagagagacaccagcagaagactgctggccgagaaggagagagagatggccgagatgagagccagaatgcagcagcagctggacgagtaccaggagctgctggacatcaagctggccctggacatggagatccacgcctacagaaagctgctggagggcgaggaggagagactgagactgagccccagccccaccagccagagaagcagaggcagagccagcagccacagcagccagacccagggcggcggcagcgtgaccaagaagagaaagctggagagcaccgagagcagaagcagcttcagccagcacgccagaaccagcggcagagtggccgtggaggaggtggacgaggagggcaagttcgtgagactgagaaacaagagcaacgaggaccagagcatgggcaactggcagatcaagagacagaacggcgacgaccccctgctgacctacagattcccccccaagttcaccctgaaggccggccaggtggtgaccatctgggccgccggcgccggcgccacccacagcccccccaccgacctggtgtggaaggcccagaacacctggggctgcggcaacagcctgagaaccgccctgatcaacagcaccggcgaggaggtggccatgagaaagctggtgagaagcgtgaccgtggtggaggacgacgaggacgaggacggcgacgacctgctgcaccaccaccacggcagccactgcagcagcagcggcgaccccgccgagtacaacctgagaagcagaaccgtgctgtgcggcacctgcggccagcccgccgacaaggccagcgccagcggcagcggcgcccaggtgggcggccccatcagcagcggcagcagcgccagcagcgtgaccgtgaccagaagctacagaagcgtgggcggcagcggcggcggcagcttcggcgacaacctggtgaccagaagctacctgctgggcaacagcagccccagaacccagagcccccagaactgcagcatcatgtag

SEQ ID NO: 247174 - DNA, 2817 bp, Artificial Sequence
  derived and/or modified sequence
atggtgagcaagggcgccgagctgttcaccggcatcgtgcccatcctgatcgagctgaatggcgatgtgaatggccacaagttcagcgtgagcggcgagggcgagggcgatgccacctacggcaagctgaccctgaagttcatctgcaccaccggcaagctgcctgtgccctggcccaccctggtgaccaccctgagctacggcgtgcagtgcttctcacgctaccccgatcacatgaagcagcacgacttcttcaagagcgccatgcctgagggctacatccaggagcgcaccatcttcttcgaggatgacggcaactacaagtcgcgcgccgaggtgaagttcgagggcgataccctggtgaatcgcatcgagctgaccggcaccgatttcaaggaggatggcaacatcctgggcaataagatggagtacaactacaacgcccacaatgtgtacatcatgaccgacaaggccaagaatggcatcaaggtgaacttcaagatccgccacaacatcgaggatggcagcgtgcagctggccgaccactaccagcagaatacccccatcggcgatggccctgtgctgctgcccgataaccactacctgtccacccagagcgccctgtccaaggaccccaacgagaagcgcgatcacatgatctacttcggcttcgtgaccgccgccgccatcacccacggcatggatgagctgtacaagtccggacttaaggcctctgtcgacagcagtctctgtccttcgacccgagccccgcgccctttccgggacccctgccccgcgggcagcgctgccaacctgccggccatggagaccccgtcccagcggcgcgccacccgcagcggggcgcaggccagctccactccgctgtcgcccacccgcatcacccggctgcaggagaaggaggacctgcaggagctcaatgatcgcttggcggtctacatcgaccgtgtgcgctcgctggaaacggagaacgcagggctgcgccttcgcatcaccgagtctgaagaggtggtcagccgcgaggtgtccggcatcaaggccgcctacgaggccgagctcggggatgcccgcaagacccttgactcagtagccaaggagcgcgcccgcctgcagctggagctgagcaaagtgcgtgaggagtttaaggagctgaaagcgcgcaataccaagaaggagggtgacctgatagctgctcaggctcggctgaaggacctggaggctctgctgaactccaaggaggccgcactgagcactgctctcagtgagaagcgcacgctggagggcgagctgcatgatctgcggggccaggtggccaagcttgaggcagccctaggtgaggccaagaagcaacttcaggatgagatgctgcggcgggtggatgctgagaacaggctgcagaccatgaaggaggaactggacttccagaagaacatctacagtgaggagctgcgtgagaccaagcgccgtcatgagacccgactggtggagattgacaatgggaagcagcgtgagtttgagagccggctggcggatgcgctgcaggaactgcgggcccagcatgaggaccaggtggagcagtataagaaggagctggagaagacttattctgccaagctggacaatgccaggcagtctgctgagaggaacagcaacctggtgggggctgcccacgaggagctgcagcagtcgcgcatccgcatcgacagcctctctgcccagctcagccagctccagaagcagctggcagccaaggaggcgaagcttcgagacctggaggactcactggcccgtgagcgggacaccagccggcggctgctggcggaaaaggagcgggagatggccgagatgcgggcaaggatgcagcagcagctggacgagtaccaggagcttctggacatcaagctggccctggacatggagatccacgcctaccgcaagctcttggagggcgaggaggagaggctacgcctgtcccccagccctacctcgcagcgcagccgtggccgtgcttcctctcactcatcccagacacagggtgggggcagcgtcaccaaaaagcgcaaactggagtccactgagagccgcagcagcttctcacagcacgcacgcactagcgggcgcgtggccgtggaggaggtggacgaggagggcaagtttgtccggctgcgcaacaagtccaatgaggaccagtccatgggcaattggcagatcaagcgccagaatggagatgatcccttgctgacttaccggttcccaccaaagttcaccctgaaggctgggcaggtggtgacgatctgggctgcaggagctggggccacccacagcccccctaccgacctggtgtggaaggcacagaacacctggggctgcgggaacagcctgcgtacggctctcatcaactccactggggaagaagtggccatgcgcaagctggtgcgctcagtgactgtggttgaggacgacgaggatgaggatggagatgacctgctccatcaccaccacggctcccactgcagcagctcgggggaccccgctgagtacaacctgcgctcgcgcaccgtgctgtgcgggacctgcgggcagcctgccgacaaggcatctgccagcggctcaggagcccaggtgggcggacccatctcctctggctcttctgcctccagtgtcacggtcactcgcagctaccgcagtgtggggggcagtgggggtggcagcttcggggacaatctggtcacccgctcctacctcctgggcaactccagcccccgaacccagagcccccagaactgcagcatcatgtaa

SEQ ID NO: 247175 - DNA, 3008 bp, Artificial Sequence
  derived and/or modified sequence
aagcttttggaccctcgtacagaagctaatacgactcactatagggaaataagagagaaaagaagagtaagaagaaatataagagccaccatggtgagcaagggcgccgagctgttcaccggcatcgtgcccatcctgatcgagctgaatggcgatgtgaatggccacaagttcagcgtgagcggcgagggcgagggcgatgccacctacggcaagctgaccctgaagttcatctgcaccaccggcaagctgcctgtgccctggcccaccctggtgaccaccctgagctacggcgtgcagtgcttctcacgctaccccgatcacatgaagcagcacgacttcttcaagagcgccatgcctgagggctacatccaggagcgcaccatcttcttcgaggatgacggcaactacaagtcgcgcgccgaggtgaagttcgagggcgataccctggtgaatcgcatcgagctgaccggcaccgatttcaaggaggatggcaacatcctgggcaataagatggagtacaactacaacgcccacaatgtgtacatcatgaccgacaaggccaagaatggcatcaaggtgaacttcaagatccgccacaacatcgaggatggcagcgtgcagctggccgaccactaccagcagaatacccccatcggcgatggccctgtgctgctgcccgataaccactacctgtccacccagagcgccctgtccaaggaccccaacgagaagcgcgatcacatgatctacttcggcttcgtgaccgccgccgccatcacccacggcatggatgagctgtacaagtccggacttaaggcctctgtcgacagcagtctctgtccttcgacccgagccccgcgccctttccgggacccctgccccgcgggcagcgctgccaacctgccggccatggagaccccgtcccagcggcgcgccacccgcagcggggcgcaggccagctccactccgctgtcgcccacccgcatcacccggctgcaggagaaggaggacctgcaggagctcaatgatcgcttggcggtctacatcgaccgtgtgcgctcgctggaaacggagaacgcagggctgcgccttcgcatcaccgagtctgaagaggtggtcagccgcgaggtgtccggcatcaaggccgcctacgaggccgagctcggggatgcccgcaagacccttgactcagtagccaaggagcgcgcccgcctgcagctggagctgagcaaagtgcgtgaggagtttaaggagctgaaagcgcgcaataccaagaaggagggtgacctgatagctgctcaggctcggctgaaggacctggaggctctgctgaactccaaggaggccgcactgagcactgctctcagtgagaagcgcacgctggagggcgagctgcatgatctgcggggccaggtggccaagcttgaggcagccctaggtgaggccaagaagcaacttcaggatgagatgctgcggcgggtggatgctgagaacaggctgcagaccatgaaggaggaactggacttccagaagaacatctacagtgaggagctgcgtgagaccaagcgccgtcatgagacccgactggtggagattgacaatgggaagcagcgtgagtttgagagccggctggcggatgcgctgcaggaactgcgggcccagcatgaggaccaggtggagcagtataagaaggagctggagaagacttattctgccaagctggacaatgccaggcagtctgctgagaggaacagcaacctggtgggggctgcccacgaggagctgcagcagtcgcgcatccgcatcgacagcctctctgcccagctcagccagctccagaagcagctggcagccaaggaggcgaagcttcgagacctggaggactcactggcccgtgagcgggacaccagccggcggctgctggcggaaaaggagcgggagatggccgagatgcgggcaaggatgcagcagcagctggacgagtaccaggagcttctggacatcaagctggccctggacatggagatccacgcctaccgcaagctcttggagggcgaggaggagaggctacgcctgtcccccagccctacctcgcagcgcagccgtggccgtgcttcctctcactcatcccagacacagggtgggggcagcgtcaccaaaaagcgcaaactggagtccactgagagccgcagcagcttctcacagcacgcacgcactagcgggcgcgtggccgtggaggaggtggacgaggagggcaagtttgtccggctgcgcaacaagtccaatgaggaccagtccatgggcaattggcagatcaagcgccagaatggagatgatcccttgctgacttaccggttcccaccaaagttcaccctgaaggctgggcaggtggtgacgatctgggctgcaggagctggggccacccacagcccccctaccgacctggtgtggaaggcacagaacacctggggctgcgggaacagcctgcgtacggctctcatcaactccactggggaagaagtggccatgcgcaagctggtgcgctcagtgactgtggttgaggacgacgaggatgaggatggagatgacctgctccatcaccaccacggctcccactgcagcagctcgggggaccccgctgagtacaacctgcgctcgcgcaccgtgctgtgcgggacctgcgggcagcctgccgacaaggcatctgccagcggctcaggagcccaggtgggcggacccatctcctctggctcttctgcctccagtgtcacggtcactcgcagctaccgcagtgtggggggcagtgggggtggcagcttcggggacaatctggtcacccgctcctacctcctgggcaactccagcccccgaacccagagcccccagaactgcagcatcatgtaagctgccttctgcggggcttgccttctggccatgcccttcttctctcccttgcacctgtacctcttggtctttgaataaagcctgagtaggaaggcggccgc

SEQ ID NO: 247176 - protein, 465 aa, Artificial Sequence
  derived and/or modified sequence
METPSQRRATRSGAQASSTPLSPTRITRLQEKEDLQELNDRLAVYIDRVRSLETENAGLRLRITESEEVVSREVSGIKAAYEAELGDARKTLDSVAKERARLQLELSKVREEFKELKARNTKKEGDLIAAQARLKDLEALLNSKEAALSTALSEKRTLEGELHDLRGQVAKLEAALGEAKKQLQDEMLRRVDAENRLQTMKEELDFQKNIYSEELRETKRRHETRLVEIDNGKQREFESRLADALQELRAQHEDQVEQYKKELEKTYSAKLDNARQSAERNSNLVGAAHEELQQSRIRIDSLSAQLSQLQKQLAAKEAKLRDLEDSLARERDTSRRLLAEKEREMAEMRARMQQQLDEYQELLDIKLALDMEIHAYRKLLEGEEERLRLSPSPTSQRSRGRASSHSSQTQGGGSVTKKRKLESTESRSSFSQHARTSGRVAVEEVDEDEDGDDLLHHHHVSGSRR

SEQ ID NO: 247177 - protein, 634 aa, Artificial Sequence
  derived and/or modified sequence
METPSQRRATRSGAQASSTPLSPTRITRLQEKEDLQELNDRLAVYIDRVRSLETENAGLRLRITESEEVVSREVSGIKAAYEAELGDARKTLDSVAKERARLQLELSKVREEFKELKARNTKKEGDLIAAQARLKDLEALLNSKEAALSTALSEKRTLEGELHDLRGQVAKLEAALGEAKKQLQDEMLRRVDAENRLQTMKEELDFQKNIYSEELRETKRRHETRLVEIDNGKQREFESRLADALQELRAQHEDQVEQYKKELEKTYSAKLDNARQSAERNSNLVGAAHEELQQSRIRIDSLSAQLSQLQKQLAAKEAKLRDLEDSLARERDTSRRLLAEKEREMAEMRARMQQQLDEYQELLDIKLALDMEIHAYRKLLEGEEERLRLSPSPTSQRSRGRASSHSSQTQGGGSVTKKRKLESTESRSSFSQHARTSGRVAVEEVDEEGKFVRLRNKSNEDQSMGNWQIKRQNGDDPLLTYRFPPKFTLKAGQVVTIWAAGAGATHSPPTDLVWKAQNTWGCGNSLRTALINSTGEGSHCSSSGDPAEYNLRSRTVLCGTCGQPADKASASGSGAQVGGPISSGSSASSVTVTRSYRSVGGSGGGSFGDNLVTRSYLLGNSSPRTQSPQNCSIM

SEQ ID NO: 247178 - DNA, 3153 bp, Artificial Sequence
  derived and/or modified sequence
aggaggacctattagagcctttgccccggcgtcggtgactcagtgttcgcgggagcgccgcacctacaccagccaacccagatcccgaggtccgacagcgcccggcccagatccccacgcctgccaggagcaagccgagagccagccggccggcgcactccgactccgagcagtctctgtccttcgacccgagccccgcgccctttccgggacccctgccccgcgggcagcgctgccaacctgccggccatggagaccccgtcccagcggcgcgccacccgcagcggggcgcaggccagctccactccgctgtcgcccacccgcatcacccggctgcaggagaaggaggacctgcaggagctcaatgatcgcttggcggtctacatcgaccgtgtgcgctcgctggaaacggagaacgcagggctgcgccttcgcatcaccgagtctgaagaggtggtcagccgcgaggtgtccggcatcaaggccgcctacgaggccgagctcggggatgcccgcaagacccttgactcagtagccaaggagcgcgcccgcctgcagctggagctgagcaaagtgcgtgaggagtttaaggagctgaaagcgcgcaataccaagaaggagggtgacctgatagctgctcaggctcggctgaaggacctggaggctctgctgaactccaaggaggccgcactgagcactgctctcagtgagaagcgcacgctggagggcgagctgcatgatctgcggggccaggtggccaagcttgaggcagccctaggtgaggccaagaagcaacttcaggatgagatgctgcggcgggtggatgctgagaacaggctgcagaccatgaaggaggaactggacttccagaagaacatctacagtgaggagctgcgtgagaccaagcgccgtcatgagacccgactggtggagattgacaatgggaagcagcgtgagtttgagagccggctggcggatgcgctgcaggaactgcgggcccagcatgaggaccaggtggagcagtataagaaggagctggagaagacttattctgccaagctggacaatgccaggcagtctgctgagaggaacagcaacctggtgggggctgcccacgaggagctgcagcagtcgcgcatccgcatcgacagcctctctgcccagctcagccagctccagaagcagctggcagccaaggaggcgaagcttcgagacctggaggactcactggcccgtgagcgggacaccagccggcggctgctggcggaaaaggagcgggagatggccgagatgcgggcaaggatgcagcagcagctggacgagtaccaggagcttctggacatcaagctggccctggacatggagatccacgcctaccgcaagctcttggagggcgaggaggagaggctacgcctgtcccccagccctacctcgcagcgcagccgtggccgtgcttcctctcactcatcccagacacagggtgggggcagcgtcaccaaaaagcgcaaactggagtccactgagagccgcagcagcttctcacagcacgcacgcactagcgggcgcgtggccgtggaggaggtggatgaggagggcaagtttgtccggctgcgcaacaagtccaatgaggaccagtccatgggcaattggcagatcaagcgccagaatggagatgatcccttgctgacttaccggttcccaccaaagttcaccctgaaggctgggcaggtggtgacgatctgggctgcaggagctggggccacccacagcccccctaccgacctggtgtggaaggcacagaacacctggggctgcgggaacagcctgcgtacggctctcatcaactccactggggaaggctcccactgcagcagctcgggggaccccgctgagtacaacctgcgctcgcgcaccgtgctgtgcgggacctgcgggcagcctgccgacaaggcatctgccagcggctcaggagcccaggtgggcggacccatctcctctggctcttctgcctccagtgtcacggtcactcgcagctaccgcagtgtggggggcagtgggggtggcagcttcggggacaatctggtcacccgctcctacctcctgggcaactccagcccccgaacccagagcccccagaactgcagcatcatgtaatctgggacctgccaggcaggggtgggggtggaggcttcctgcgtcctcctcacctcatgcccaccccctgccctgcacgtcatgggagggggcttgaagccaaagaaaaataaccctttggtttttttcttctgtatttttttttctaagagaagttattttctacagtggttttatactgaaggaaaaacacaagcaaaaaaaaaaaaaagcatctatctcatctatctcaatcctaatttctcctcccttccttttccctgcttccaggaaactccacatctgccttaaaaccaaagagggcttcctctagaagccaagggaaaggggtgcttttatagaggctagcttctgcttttctgccctggctgctgcccccaccccggggaccctgtgacatggtgcctgagaggcaggcatagaggcttctccgccagcctcctctggacggcaggctcactgccaggccagcctccgagagggagagagagagagagaggacagcttgagccgggcccctgggcttggcctgctgtgattccactacacctggctgaggttcctctgcctgccccgcccccagtccccacccctgcccccagccccggggtgagtccattctcccaggtaccagctgcgcttgcttttctgtattttatttagacaagagatgggaatgaggtgggaggtggaagaagggagaagaaaggtgagtttgagctgccttccctagctttagaccctgggtgggctctgtgcagtcactggaggttgaagccaagtggggtgctgggaggagggagagggaggtcactggaaaggggagagcctgctggcacccaccgtggaggaggaaggcaagagggggtggaggggtgtggcagtggttttggcaaacgctaaagagcccttgcctccccatttcccatctgcaccccttctctcctccccaaatcaatacactagttgtttctacccctgaaaaaaaaaaaaaaaaaa

SEQ ID NO: 247179 - DNA, 1905 bp, Artificial Sequence
  derived and/or modified sequence
atggaaactccgtcccagcgtcgcgctacccggagcggcgcacaggctagtagcacgccactatctcccacacgtataacccgtctgcaggagaaggaagacttgcaggaactaaacgaccggctagctgtgtatattgacagggtgcggagtcttgaaaccgaaaacgctggtctgcgcctgcgcataacggagtcggaggaggtggtgagcagggaagtctccggaataaaggccgcttatgaagctgagctcggggacgcgcgcaagaccctggactcagttgcaaaagaacgggcccgtttacagttagagctttccaaagtccgggaggaatttaaagaactgaaagctaggaatactaagaaggagggcgatttgatcgccgcacaggcgcggctcaaggatctagaagcccttctgaactccaaggaggccgcactgtctaccgctttgtcggagaaaagaacgctagagggcgagctccatgaccttcgaggccaggtcgctaagctggaggctgccctaggcgaggctaagaagcagctgcaggacgagatgctgcggcgcgtcgacgccgaaaataggctgcaaaccatgaaagaggagctcgatttccagaagaatatatactctgaggaattgcgggagacgaagcggaggcacgaaacccgtctcgtggaaatcgacaatggcaagcagcgtgagttcgaatcccggttggccgatgccctgcaggagctgagagcccagcacgaggatcaggtggagcagtacaagaaagaactggagaagacatactctgccaaactggataatgcgagacagtccgctgaaaggaatagtaacttggtgggagcagcacatgaggaactccaacagagccgaatccggatcgactcactgagcgcccagctgtctcagctgcagaagcagctggcagcgaaagaggcgaagctcagagatctagaggactccctcgctcgcgagcgggatacgagccgccgcctcctggcagaaaaggagcgcgagatggccgagatgagggcgaggatgcagcagcagttggacgaataccaggaattgcttgatatcaagctggcactcgatatggaaattcacgcataccgcaaactgcttgagggagaagaggaacgtctgcgactttctccttcccctacctctcaaaggagccgaggacgagcaagcagccactcatcccaaacacagggaggaggaagcgttaccaaaaagcggaagctcgaaagcaccgagtcccgcagctccttttcccaacatgcacggacgtcaggccgcgtagcagtcgaggaggtggatgaggagggaaagttcgtccgcctgagaaacaagagtaatgaagatcagagtatgggaaattggcagatcaagcggcaaaatggagatgacccactcctgacttatcgatttcctcctaagtttaccctgaaagccgggcaggtggtcaccatctgggcagccggggctggagcaactcacagcccacctaccgatctggtgtggaaggcgcagaacacttggggatgcggtaacagcctccgtacagcattgattaacagcacaggggagggatcacattgtagtagttccggggaccccgctgagtacaatcttcgatcacgcaccgttctctgcgggacatgcggccagcctgctgacaaggcgagtgccagtggatctggagcacaagtagggggcccaatttcatcaggatcatccgctagcagtgtaacggtaactcggtcttacagaagtgtggggggctctggggggggctcgttcggggacaatctggtgactcgctcatacctgttaggaaattcatcaccaaggacccagtctcctcagaactgttcaattatgtag

SEQ ID NO: 247180 - DNA, 3135 bp, Artificial Sequence
  derived and/or modified sequence
aggaggacctattagagcctttgccccggcgtcggtgactcagtgttcgcgggagcgccgcacctacaccagccaacccagatcccgaggtccgacagcgcccggcccagatccccacgcctgccaggagcaagccgagagccagccggccggcgcactccgactccgagcagtctctgtccttcgacccgagccccgcgccctttccgggacccctgccccgcgggcagcgctgccaacctgccggccatggagaccccgtcccagcggcgcgccacccgcagcggggcgcaggccagctccactccgctgtcgcccacccgcatcacccggctgcaggagaaggaggacctgcaggagctcaatgatcgcttggcggtctacatcgaccgtgtgcgctcgctggaaacggagaacgcagggctgcgccttcgcatcaccgagtctgaagaggtggtcagccgcgaggtgtccggcatcaaggccgcctacgaggccgagctcggggatgcccgcaagacccttgactcagtagccaaggagcgcgcccgcctgcagctggagctgagcaaagtgcgtgaggagtttaaggagctgaaagcgcgcaataccaagaaggagggtgacctgatagctgctcaggctcggctgaaggacctggaggctctgctgaactccaaggaggccgcactgagcactgctctcagtgagaagcgcacgctggagggcgagctgcatgatctgcggggccaggtggccaagcttgaggcagccctaggtgaggccaagaagcaacttcaggatgagatgctgcggcgggtggatgctgagaacaggctgcagaccatgaaggaggaactggacttccagaagaacatctacagtgaggagctgcgtgagaccaagcgccgtcatgagacccgactggtggagattgacaatgggaagcagcgtgagtttgagagccggctggcggatgcgctgcaggaactgcgggcccagcatgaggaccaggtggagcagtataagaaggagctggagaagacttattctgccaagctggacaatgccaggcagtctgctgagaggaacagcaacctggtgggggctgcccacgaggagctgcagcagtcgcgcatccgcatcgacagcctctctgcccagctcagccagctccagaagcagctggcagccaaggaggcgaagcttcgagacctggaggactcactggcccgtgagcgggacaccagccggcggctgctggcggaaaaggagcgggagatggccgagatgcgggcaaggatgcagcagcagctggacgagtaccaggagcttctggacatcaagctggccctggacatggagatccacgcctaccgcaagctcttggagggcgaggaggagaggctacgcctgtcccccagccctacctcgcagcgcagccgtggccgtgcttcctctcactcatcccagacacagggtgggggcagcgtcaccaaaaagcgcaaactggagtccactgagagccgcagcagcttctcacagcacgcacgcactagcgggcgcgtggccgtggaggaggtggatgaggagggcaagtttgtccggctgcgcaacaagtccaatgaggaccagtccatgggcaattggcagatcaagcgccagaatggagatgatcccttgctgacttaccggttcccaccaaagttcaccctgaaggctgggcaggtggtgacgatctgggctgcaggagctggggccacccacagcccccctaccgacctggtgtggaaggcacagaacacctggggctgcgggaacagcctgcgtacggctctcatcaactccactggggaaggctcccactgcagcagctcgggggaccccgctgagtacaacctgcgctcgcgcaccgtgctgtgcgggacctgcgggcagcctgccgacaaggcatctgccagcggctcaggagcccaggtgggcggacccatctcctctggctcttctgcctccagtgtcacggtcactcgcagctaccgcagtgtggggggcagtgggggtggcagcttcggggacaatctggtcacccgctcctacctcctgggcaactccagcccccgaacccagagcccccagaactgcagcatcatgtaatctgggacctgccaggcaggggtgggggtggaggcttcctgcgtcctcctcacctcatgcccaccccctgccctgcacgtcatgggagggggcttgaagccaaagaaaaataaccctttggtttttttcttctgtatttttttttctaagagaagttattttctacagtggttttatactgaaggaaaaacacaagcaaaaaaaaaaaaaagcatctatctcatctatctcaatcctaatttctcctcccttccttttccctgcttccaggaaactccacatctgccttaaaaccaaagagggcttcctctagaagccaagggaaaggggtgcttttatagaggctagcttctgcttttctgccctggctgctgcccccaccccggggaccctgtgacatggtgcctgagaggcaggcatagaggcttctccgccagcctcctctggacggcaggctcactgccaggccagcctccgagagggagagagagagagagaggacagcttgagccgggcccctgggcttggcctgctgtgattccactacacctggctgaggttcctctgcctgccccgcccccagtccccacccctgcccccagccccggggtgagtccattctcccaggtaccagctgcgcttgcttttctgtattttatttagacaagagatgggaatgaggtgggaggtggaagaagggagaagaaaggtgagtttgagctgccttccctagctttagaccctgggtgggctctgtgcagtcactggaggttgaagccaagtggggtgctgggaggagggagagggaggtcactggaaaggggagagcctgctggcacccaccgtggaggaggaaggcaagagggggtggaggggtgtggcagtggttttggcaaacgctaaagagcccttgcctccccatttcccatctgcaccccttctctcctccccaaatcaatacactagttgtttctacccctg

SEQ ID NO: 247181 - DNA, 1905 bp, Artificial Sequence
  derived and/or modified sequence
atggagacccccagccagaggcgggccaccaggtctggggcccaggccagcagcacccccctgagccccacccgcatcacccggctgcaggagaaggaggacctgcaggagctgaatgaccggctggccgtgtacatcgacagagtgcgcagcctggagacagaaaatgccggcctgcggctgcgcatcacagagagcgaggaggtggtgtcccgggaggtgtctggcatcaaggccgcctatgaagctgagctgggagatgccaggaagaccctggacagcgtggccaaggagcgggcccggctgcagctggagctgagcaaggtgcgggaggagttcaaggagctgaaggccaggaacaccaagaaggagggggacctgattgctgcccaggcccggctgaaggacctggaggccctgctgaacagcaaggaggccgccctgagcacagccctgtctgagaagaggaccctggagggggagctgcatgacctgcggggccaggtggccaagctggaggccgccctgggggaggccaagaagcagctgcaggatgagatgctgcggcgggtggatgctgagaaccggctgcagaccatgaaggaggagctggacttccagaagaacatctacagcgaggagctgcgggagaccaagagaagacatgagacccggctggtggagattgacaatggcaagcagcgggagtttgagagccggctggctgatgccctgcaggagctgcgggcccagcacgaggaccaggtggagcagtacaagaaggagctggagaagacctacagcgccaagctggacaatgcccggcagagcgctgagaggaacagcaacctggtgggcgccgcccacgaggagctgcagcagagccgcatcagaattgacagcctgagcgcccagctgagccagctgcagaagcagctggccgccaaggaggccaagctgcgggacctggaggacagcctggcccgggagcgggacaccagccggcggctgctggccgagaaggagcgggagatggccgagatgagggccaggatgcagcagcagctggatgagtaccaggagctgctggacatcaagctggccctggacatggagatccacgcctacaggaagctgctggagggggaggaggagcggctgcggctgagccccagccccaccagccagaggagccggggccgggccagcagccacagcagccagacccagggcggcggctctgtgaccaagaagaggaagctggagagcacagagagccgcagcagcttcagccagcacgcccggaccagcggccgggtggccgtggaggaggtggatgaggagggcaagtttgtgcggctgaggaacaagagcaatgaagaccagagcatgggcaactggcagatcaagaggcagaatggagatgaccccctgctgacctaccgcttcccccccaagttcaccctgaaggccggccaggtggtgaccatctgggccgccggggccggggccacccacagccccccaacagacctggtgtggaaggcccagaacacctggggctgcggcaacagcctgaggacagccctgatcaacagcactggagagggcagccactgcagcagcagcggggaccctgctgagtacaacctgcggagcaggacagtgctgtgtggcacctgtggccagcctgctgacaaggccagcgccagcggcagcggggcccaggtgggcggccccatcagcagcggcagcagcgccagctctgtgacagtgaccaggagctacagatctgtgggcggcagcggcggcggcagctttggagacaacctggtgaccaggagctacctgctgggcaacagcagccccaggacccagagcccccagaactgcagcatcatgtag

SEQ ID NO: 247182 - DNA, 1905 bp, Artificial Sequence
  derived and/or modified sequence
atggagacccccagccagcggcgggccacccggagcggcgcccaggcgtccagtacacccctgagtccaactagaatcacccggctccaggaaaaggaggacctgcaagagctcaacgacagactggcagtttacatagatcgggtgcgcagtctcgagactgagaacgccgggttgcggctgagaataactgagagtgaggaagtagtgtcaagagaggtgtccgggatcaaggctgcctacgaagccgagcttggagatgcgcgtaaaaccctggattccgtcgccaaagaacgagccagactgcagttggaattgagcaaagtgagagaagagttcaaggaactaaaggcccggaacacaaaaaaggaaggggatttaatcgctgcccaggcgcggctcaaagacctggaagccttactcaactccaaggaggctgccctgtctaccgccttgtctgagaagcgcaccttggaaggggagctgcacgaccttcgaggccaggtagctaagttagaagccgctctgggcgaggccaaaaagcagctgcaggacgagatgctcagacgcgtcgacgcggagaatcgcttgcagaccatgaaggaggagttggactttcagaaaaacatctatagcgaggaactgagagagactaaacggcggcacgagactcggttggtcgagatcgacaacggcaaacaaagagagtttgaatccaggctggccgacgctttacaggaactcagagcccagcacgaggaccaggttgaacagtacaagaaggaactggaaaagacctattccgcaaagctggataacgcaaggcagtccgccgaaagaaacagtaacctcgtgggcgcggcccacgaagaactccaacagtctaggatacggatagattcgttgtcggcccagttgagccagctgcagaagcaactcgccgccaaggaagccaaactccgcgacctcgaggattccctcgccagagaaagggatacctctcgtagactcctcgctgagaaggagcgggagatggctgaaatgcgggcccggatgcaacagcagcttgacgagtatcaggaactgctggatatcaagctcgcccttgatatggagattcatgcgtacaggaagctgctggaaggtgaagaagagcgcctgcgtctgtcaccctctcccacttcccagagatcacggggccgagcttcctcccactcatctcagacccaaggcgggggttctgtcaccaagaagcggaagttagaatccaccgagtccagaagtagcttttcacagcatgcacggacctctggacgcgtcgcagtggaggaagtcgatgaagagggcaagtttgttagactgaggaataaatcaaatgaagatcagagtatgggcaattggcagataaagagacagaacggtgacgatcccctgcttacctatcggttcccccccaagtttactctgaaggctggccaggtcgtcactatatgggctgccggggccggcgcaacccattcgcccccgacggacttggtgtggaaagcgcagaatacctgggggtgtggaaacagcctgcggaccgcgctgatcaactcgacaggagaaggctcacactgctcctcctcgggtgaccccgcggaatacaacctgcgatcaagaacagtactatgcggtacctgcgggcaacctgcagataaagcctccgcttccgggtctggtgcccaggtgggtgggccaatctcctctggaagtagcgcctcaagcgtaaccgtgaccagaagttacagaagcgttggcggcagcgggggtgggtccttcggcgataacctcgtcacaagatcctacctcctcgggaattcttccccccgcacccagagcccacagaactgttcaataatgtag

SEQ ID NO: 247183 - DNA, 1905 bp, Artificial Sequence
  derived and/or modified sequence
atggagacgccatctcaaaggcgcgcaacgagaagtggggctcaagccagcagcacaccactaagccccacccgcatcacccgacttcaggaaaaggaggacctgcaagaactaaacgatcgtctggctgtgtacatcgacagagtaagaagtcttgagaccgaaaatgccggtttgcgcctgcgcattacagaaagtgaggaggttgtgtcccgggaggtgtctggaatcaaagccgcttacgaggcagaactcggggacgcgcgtaagaccctagatagtgtggccaaggagagagctcggctgcaactggaactctctaaagtgcgagaggaatttaaagagttgaaggcaagaaacaccaaaaaggaaggggatctgatagccgctcaagcccgtttgaaagacctcgaggccttactaaactctaaagaggccgctctgagtacagcactaagcgaaaagaggaccctggaaggagaactgcacgacctacggggacaagtcgcgaaattggaggcggcattgggtgaagctaaaaagcagctccaagacgaaatgcttaggcgggttgatgcggaaaatcgattacaaactatgaaggaagaactggacttccaaaagaacatatacagtgaagaactgcgggaaacaaagagacgtcatgagactcggctggtcgaaatcgataatggaaagcaacgagaatttgaaagcaggctcgcggacgccctgcaagagctgcgcgctcaacacgaggaccaggtcgaacaatacaagaaggagcttgagaaaacctacagcgccaagttggataacgcgaggcagagcgctgaaaggaattccaacctggttggagctgcacacgaagagttgcaacagagcagaatcagaatcgatagcctcagtgctcagctctcacagctgcagaagcaactggccgctaaggaagctaaactgagagatctagaagactctctagctcgtgagagagacacttcccgaaggctactggcggagaaggaaagggaaatggccgagatgagggccagaatgcaacagcagctggatgagtaccaagagctccttgatatcaagcttgctctggacatggagatacatgcttaccgcaagcttttggaaggggaggaagaacgtctgcgcctgtctccatctcccaccagccagcgaagcaggggcagggccagcagccacagttctcagacccagggcggtggttctgtgaccaagaaaagaaagctggagtctaccgaatcacgctctagtttctcacaacatgcccgaacctccgggagggtggctgtggaggaggtagatgaagagggcaaatttgtaagacttagaaacaaatctaacgaggatcaaagcatgggtaattggcaaattaagagacagaatggggatgaccctcttcttacttatcgcttccccccaaagtttactctcaaggctgggcaggtggttacgatttgggccgctggcgcaggggctactcactctcccccaacagatcttgtctggaaggcccaaaatacctggggatgtgggaacagcctccggacggcgctgattaactctactggcgaggggtcccactgttcatccagcggcgatccagctgaatacaatttaagatcccgtacagtgctttgtggcacttgcggacagccagcagacaaggcgagtgctagcggcagcggagcgcaggttggaggtcccatctcaagcggctcttcagccagttccgtgaccgtgacacggtcatatcggtccgtcggcggaagcggcggaggatctttcggtgataacctggttaccaggagctatctgctggggaactcatcaccccgaacacagtcacctcagaactgtagcattatgtag

SEQ ID NO: 247184 - DNA, 1905 bp, Artificial Sequence
  derived and/or modified sequence
atggagacccccagccagagaagagccaccagaagcggcgcccaggccagcagcacccccctgagccccaccagaatcaccagactgcaggagaaggaggacctgcaggagctgaacgacagactggccgtgtacatcgacagagtgagaagcctggagaccgagaacgccggcctgagactgagaatcaccgagagcgaggaggtggtgagcagagaggtgagcggcatcaaggccgcctacgaggccgagctgggcgacgccagaaagaccctggacagcgtggccaaggagagagccagactgcagctggagctgagcaaggtgagagaggagttcaaggagctgaaggccagaaacaccaagaaggagggcgacctgatcgccgcccaggccagactgaaggacctggaggccctgctgaacagcaaggaggccgccctgagcaccgccctgagcgagaagagaaccctggagggcgagctgcacgacctgagaggccaggtggccaagctggaggccgccctgggcgaggccaagaagcagctgcaggacgagatgctgagaagagtggacgccgagaacagactgcagaccatgaaggaggagctggacttccagaagaacatctacagcgaggagctgagagagaccaagagaagacacgagaccagactggtggagatcgacaacggcaagcagagagagttcgagagcagactggccgacgccctgcaggagctgagagcccagcacgaggaccaggtggagcagtacaagaaggagctggagaagacctacagcgccaagctggacaacgccagacagagcgccgagagaaacagcaacctggtgggcgccgcccacgaggagctgcagcagagcagaatcagaatcgacagcctgagcgcccagctgagccagctgcagaagcagctggccgccaaggaggccaagctgagagacctggaggacagcctggccagagagagagacaccagcagaagactgctggccgagaaggagagagagatggccgagatgagagccagaatgcagcagcagctggacgagtaccaggagctgctggacatcaagctggccctggacatggagatccacgcctacagaaagctgctggagggcgaggaggagagactgagactgagccccagccccaccagccagagaagcagaggcagagccagcagccacagcagccagacccagggcggcggcagcgtgaccaagaagagaaagctggagagcaccgagagcagaagcagcttcagccagcacgccagaaccagcggcagagtggccgtggaggaggtggacgaggagggcaagttcgtgagactgagaaacaagagcaacgaggaccagagcatgggcaactggcagatcaagagacagaacggcgacgaccccctgctgacctacagattcccccccaagttcaccctgaaggccggccaggtggtgaccatctgggccgccggcgccggcgccacccacagcccccccaccgacctggtgtggaaggcccagaacacctggggctgcggcaacagcctgagaaccgccctgatcaacagcaccggcgagggcagccactgcagcagcagcggcgaccccgccgagtacaacctgagaagcagaaccgtgctgtgcggcacctgcggccagcccgccgacaaggccagcgccagcggcagcggcgcccaggtgggcggccccatcagcagcggcagcagcgccagcagcgtgaccgtgaccagaagctacagaagcgtgggcggcagcggcggcggcagcttcggcgacaacctggtgaccagaagctacctgctgggcaacagcagccccagaacccagagcccccagaactgcagcatcatgtag

SEQ ID NO: 247185 - protein, 464 aa, Artificial Sequence
  derived and/or modified sequence
MQRDHTMDYKESCPSVSIPSSDEHREKKKRFTVYKVLVSVGRSEWFVFRRYAEFDKLYNTLKKQFPAMALKIPAKRIFGDNFDPDFIKQRRAGLNEFIQNLVRYPELYNHPDVRAFLQMDSPKHQSDPSEDEDERSSQKLHSTSQNINLGPSGNPHAKPTDFDFLKVIGKGSFGKVLLAKRKLDGKFYAVKVLQKKIVLNRKEQKHIMAERNVLLKNVKHPFLVGLHYSFQTTEKLYFVLDFVNGGELFFHLQRERSFPEHRARFYAAEIASALGYLHSIKIVYRDLKPENILLDSVGHVVLTDFGLCKEGIAISDTTTTFCGTPEPPFYCRDVAEMYDNILHKPLSLRPGVSLTAWSILEELLEKDRQNRLGAKEDFLEIQNHPFFESLSWADLVQKKIPPPFNPNVAGPDDIRNFDTAFTEETVPYSVCVSSDYSIVNASVLEADDAFVGFSYAPPSEDLFL

SEQ ID NO: 247186 - DNA, 1395 bp, Artificial Sequence
  derived and/or modified sequence
atgcagagagaccacaccatggattacaaagagtcctgcccctcagtgagcattcccagtagcgacgaacatagagaaaagaagaagaggtttacagtgtataaggtcttggtgtccgtcggtagatccgagtggttcgtgttcaggcggtatgccgaatttgataagctgtacaacactctgaagaaacagtttccagcgatggctctcaaaatacccgcgaagcgcatctttggcgataatttcgaccccgactttatcaagcaacggcgggcaggcctgaatgagttcatacagaatttggtgcgctatcctgagctttataatcatcctgacgtccgcgctttcctgcagatggactcaccaaagcaccagtctgatcctagcgaggatgaggatgagaggtcctcccaaaagctgcattctacatctcaaaacattaacttgggaccttccgggaatcctcacgccaagccaaccgattttgacttcctcaaagtgataggaaaagggtccttcgggaaggtgcttctggccaagcggaagttagacgggaagttctacgccgtgaaggtgttgcagaagaaaatcgttctcaaccggaaggagcagaagcacatcatggccgagagaaacgtgctgctgaagaatgtaaaacacccgtttctagtgggtctgcattattcattccagactacagaaaagctctacttcgtgttggattttgtgaacggcggcgagctgttctttcacctccaaagggagaggagtttccccgaacacagggcgaggttctatgctgccgagattgccagtgcgctgggttacctgcattctataaagattgtgtaccgcgatcttaagcctgagaacatcctgctggacagcgttggtcacgtagtgcttacagattttggactgtgtaaggaaggcatagcaatttcggatacaacaacaacattttgcggcacacccgagcctcctttctactgtagagacgtcgccgaaatgtacgataacattctgcacaaacccctgtccctcaggccaggagtctctttaaccgcttggtccatcctggaggagctgctggaaaaggatagacagaaccggctcggcgcgaaggaagacttcctagagatccagaatcatcccttttttgaatcactctcgtgggccgacctggtacagaagaaaatcccgccgccctttaaccctaacgtggcaggccccgacgacatccgcaatttcgataccgccttcacagaagaaacagtgccttattctgtgtgcgtgtcatctgactattctatcgtaaatgcatcggtgctagaggccgacgacgccttcgtgggcttcagctacgcccctccatcggaagacctgttcctgtag

SEQ ID NO: 247187 - DNA, 1395 bp, Artificial Sequence
  derived and/or modified sequence
atgcagagggaccacaccatggactacaaggagagctgccccagcgtgtccatccccagcagtgatgagcaccgggagaagaagaagcgcttcaccgtgtacaaggtgctggtgtctgtgggccgctctgagtggtttgtgttcagaagatatgcagagtttgacaagctgtacaacaccctgaagaagcagtttcctgccatggccctgaagatcccagccaagaggatctttggagacaactttgatcctgacttcatcaagcagaggcgggccggcctgaatgagttcatccagaacctggtgcgctacccagagctgtacaaccacccagatgtgcgggccttcctgcagatggacagccccaagcaccagagcgaccccagtgaagatgaagatgagaggagcagccagaagctgcacagcaccagccagaacatcaacctgggccccagcggcaacccccacgccaagcccacagactttgacttcctgaaggtgattggcaagggcagctttgggaaggtgctgctggccaagaggaagctggatggcaagttctatgctgtgaaggtgctgcagaagaagatcgtgctgaacaggaaggagcagaagcacatcatggccgagagaaatgtgctgctgaagaatgtgaagcaccccttcctggtgggcctgcactacagcttccagaccacagagaagctgtactttgtgctggactttgtgaatggaggagagctgttcttccacctgcagcgggagaggagcttccctgagcaccgggcccgcttctatgctgctgagatcgccagcgccctgggctacctgcacagcatcaagatcgtgtacagagacctgaagccagagaacatcctgctggacagcgtgggccacgtggtgctgacagactttggcctgtgcaaggagggcatcgccatcagtgacaccaccaccaccttctgtggcaccccagagccccccttctactgcagagatgtggccgagatgtatgacaacatcctgcacaagcccctgagcctgcggcctggggtgtccctgacagcctggagcatcctggaggagctgctggagaaggaccggcagaaccggctgggcgccaaggaggacttcctggagatccagaaccaccccttctttgagagcctgtcctgggccgacctggtgcagaagaagatccccccacccttcaaccccaacgtggccggcccagatgacatccggaactttgacacagccttcacagaggagaccgtgccctacagcgtgtgtgtgtccagtgactacagcatcgtgaatgcctctgtgctggaggctgatgatgcctttgtgggcttctcctatgcccctccttctgaggacctcttcctgtag

SEQ ID NO: 247188 - DNA, 1395 bp, Artificial Sequence
  derived and/or modified sequence
atgcagcgggaccacaccatggactacaaggagagctgccccagcgtgtctatccccagttcggatgagcacagggagaagaagaagaggttcacagtgtataaggtgctcgtgtcagtggggcggagtgagtggtttgtcttccggcgttacgccgaattcgataagctgtataacactctcaagaaacaatttcccgccatggcccttaagattccggctaagagaatcttcggagacaatttcgatcctgattttattaagcagcgccgtgccggccttaatgaattcatccagaatttggtccggtaccctgaactgtacaaccatcccgacgtcagagccttccttcaaatggactcgcctaaacaccagtcagacccctcggaagacgaagacgaacgtagctctcagaagctccattccacctcacagaacatcaaccttggacccagcgggaacccacacgctaagcctacagatttcgacttcctaaaagtcattgggaaggggtcgtttggaaaagtgcttctcgctaagcgcaagcttgacggcaagttttacgccgtcaaggttcttcagaaaaaaatagtccttaacaggaaggaacagaaacatatcatggccgagcgaaacgtgctcctcaagaatgtcaagcacccattcctcgtcggcctccattattcctttcagaccacagaaaagttgtattttgtgctggacttcgtcaacggcggcgagttgttttttcatctccagagggagcgcagctttcccgagcatagagcacggttttatgcggctgagattgccagcgctcttggatacttgcactctattaagatagtctacagggacttaaagcccgagaatatcctcctggactcagtagggcatgtcgtgctgactgactttgggctatgtaaggaggggatcgccatttccgatactaccacaaccttttgcgggactcccgaaccaccgttctactgtagagacgtggctgaaatgtacgacaacatccttcacaagcctctgagtctcaggccaggggtaagcctgacggcctggagcatcttggaggagctcctggaaaaagatcgccagaatcgtctcggagccaaggaagatttcctcgaaatccagaatcatccttttttcgagtcattatcatgggcggatctggttcagaaaaagatacccccgccctttaatcccaatgtcgccgggccggacgatatccgtaatttcgataccgctttcaccgaggaaacggtgccttattctgtgtgtgtgtcatctgattatagcattgtcaatgcatcggtcctggaggcagacgatgctttcgtaggattcagttacgcccctccgtctgaggatcttttcttgtag

SEQ ID NO: 247189 - DNA, 1395 bp, Artificial Sequence
  derived and/or modified sequence
atgcaacgagaccacaccatggattacaaagagagctgtccctcagtgagtatccccagctcagatgagcatcgtgagaagaaaaaacgttttaccgtctacaaagttctggtgagcgtcggaagatcggagtggttcgtttttcggaggtatgccgagttcgataagctctataataccctgaagaagcagttccctgcaatggccctcaagatccccgctaagcgaatctttggggacaactttgacccggactttatcaagcagcgcagggccggtctcaacgagtttatacaaaatctcgtgagatacccagagttgtacaaccacccagacgtgcgagccttcctccagatggacagccccaaacaccaatctgatccctccgaagacgaagacgagaggagtagccagaaattgcattctacatctcaaaatattaacctgggaccaagcgggaatccccatgctaaacctacagactttgatttcctcaaggtaatcgggaaaggatctttcggaaaagtattactggcaaagcgcaagctagacgggaagttctatgcagtaaaagtactccagaaaaagatcgttttgaatcgcaaagagcagaagcacatcatggctgaacggaatgtcctattgaaaaatgtcaaacaccctttcttagtaggcctgcattattcctttcagaccaccgaaaagctgtattttgtgctggatttcgtgaacggaggtgaactgttctttcacctacaacgagaaagatcttttcctgagcaccgggctcgattctacgccgcagagattgccagcgcactgggttatctgcactcaattaagatcgtgtacagagaccttaaacccgaaaatatactgctcgattctgtcggtcatgtggtcctgaccgactttggcctgtgcaaggaagggatagcgatctcagacaccaccaccacattttgcgggacccctgagcctccgttttattgccgcgacgtggccgagatgtacgataacattctgcataaaccattgtcgctgcggcctggagtgtctctgactgcctggtcaatactggaggagctcctggagaaggaccgacagaaccgacttggtgctaaggaggacttcctcgagattcagaatcaccctttcttcgagagtcttagttgggcggatctggtccagaagaagattcctcccccttttaacccaaatgtggccggtcctgatgacatcagaaacttcgatacagctttcacagaagaaacggtgccttacagtgtatgcgttagcagcgattacagcatagtgaatgcttccgtcctggaagctgacgatgcgttcgttggctttagctacgcaccgccatcagaagatctttttctgtag

SEQ ID NO: 247190 - DNA, 2483 bp, Artificial Sequence
  derived and/or modified sequence
gggagctggtggcgcggcgcaggtcccggccgagtgtggcgcagcagtggcggcgcttcccattcgccatgcgccgggggtgggtgcccgaaggttgcatgatggaatttgaacattacttcaagaggttttgtattttggattagttaattgggtttgtcctctgctgactgtttcttcggatgcattttttggtgtgctcttgagggattaaatgcaaagagatcacaccatggactacaaggaaagctgcccaagtgtaagcattcccagctccgatgaacacagagagaaaaagaagaggtttactgtttataaagttctggtttcagtgggaagaagtgaatggtttgtcttcaggagatatgcagagtttgataaactttataacactttaaaaaaacagtttcctgctatggccctgaagattcctgccaagagaatatttggtgataattttgatccagattttattaaacaaagacgagcaggactaaacgaattcattcagaacctagttaggtatccagaactttataaccatccagatgtcagagcattccttcaaatggacagtccaaaacaccagtcagatccatctgaagatgaggatgaaagaagttctcagaagctacactctacctcacagaacatcaacctgggaccgtctggaaatcctcatgccaaaccaactgactttgatttcttaaaagttattggaaaaggcagctttggcaaggttcttcttgcaaaacggaaactggatggaaaattttatgctgtcaaagtgttacagaaaaaaatagttctcaacagaaaagagcaaaaacatattatggctgaacgtaatgtgctcttgaaaaatgtgaaacatccgtttttggttggattgcattattccttccaaacaactgaaaagctttattttgttctggattttgttaatggaggggagctttttttccacttacaaagagaacggtcctttcctgagcacagagctaggttttacgctgctgaaattgctagtgcattgggttacttacattccatcaaaatagtatacagagacttgaaaccagaaaatattcttttggattcagtaggacatgttgtcttaacagattttgggctttgtaaagaaggaattgctatttctgacaccactaccacattttgtgggacaccagagcctcctttttattgccgagatgttgctgaaatgtatgacaatatccttcacaaacccctaagtttgaggccaggagtgagtcttacagcctggtccattctggaagaactcctagaaaaagacaggcaaaatcgacttggtgccaaggaagactttcttgaaattcagaatcatcctttttttgaatcactcagctgggctgaccttgtacaaaagaagattccaccaccatttaatcctaatgtggctggaccagatgatatcagaaactttgacacagcatttacagaagaaacagttccatattctgtgtgtgtatcttctgactattctatagtgaatgccagtgtattggaggcagatgatgcattcgttggtttctcttatgcacctccttcagaagacttatttttgtgagcagtttgccattcagaaaccattgagcaaaataagtctatagatgggactgaaacttctatttgtgtgaatatattcaaatatgtataactagtgcctcatttttatatgtaatgatgaaaactatgaaaaaatgtattttcttctatgtgcaagaaaaatagggcatttcaaagagctgttttgattaaaatttatattcttgtttaataagcttatttttaaacaatttaaaagctattattcttagcattaacctatttttaaagaaaccttttttgctattgactgttttttccctctaagtttacactaacatctacccaagatagactgttttttaacagtcaatttcagttcagctaacatatattaatacctttgtaactctttgctatggcttttgttatcacaccaaaactatgcaattggtacatggttgtttaagaagaaaccgtatttttccatgataaatcactgtttgaaatatttggttcatggtatgatcgaaatgtaaaagcataattaacacattggctgctagttaacaattggaataactttattctgcagatcatttaagaagtaacaggccgggcgcggtggctcacgcctgtaatcccagcactttgggaggctgaggcgggcagatcacctgaggtcaggagttggagaccagcctgaccaacatggacaaaccccgtctctactaaaaatacaaaattggcagggtgtggtggcacatgcctataatcccagctacttgggaggctaaggcaggagaatcgcttgaacccgggaggcggaggttgcagtgagccgagatcgcaccattgcactcctgcctgggcaacaagagtgaaactccatctcc

SEQ ID NO: 247191 - DNA, 1395 bp, Artificial Sequence
  derived and/or modified sequence
atgcagagagaccacaccatggactacaaggagagctgccccagcgtgagcatccccagcagcgacgagcacagagagaagaagaagagattcaccgtgtacaaggtgctggtgagcgtgggcagaagcgagtggttcgtgttcagaagatacgccgagttcgacaagctgtacaacaccctgaagaagcagttccccgccatggccctgaagatccccgccaagagaatcttcggcgacaacttcgaccccgacttcatcaagcagagaagagccggcctgaacgagttcatccagaacctggtgagataccccgagctgtacaaccaccccgacgtgagagccttcctgcagatggacagccccaagcaccagagcgaccccagcgaggacgaggacgagagaagcagccagaagctgcacagcaccagccagaacatcaacctgggccccagcggcaacccccacgccaagcccaccgacttcgacttcctgaaggtgatcggcaagggcagcttcggcaaggtgctgctggccaagagaaagctggacggcaagttctacgccgtgaaggtgctgcagaagaagatcgtgctgaacagaaaggagcagaagcacatcatggccgagagaaacgtgctgctgaagaacgtgaagcaccccttcctggtgggcctgcactacagcttccagaccaccgagaagctgtacttcgtgctggacttcgtgaacggcggcgagctgttcttccacctgcagagagagagaagcttccccgagcacagagccagattctacgccgccgagatcgccagcgccctgggctacctgcacagcatcaagatcgtgtacagagacctgaagcccgagaacatcctgctggacagcgtgggccacgtggtgctgaccgacttcggcctgtgcaaggagggcatcgccatcagcgacaccaccaccaccttctgcggcacccccgagccccccttctactgcagagacgtggccgagatgtacgacaacatcctgcacaagcccctgagcctgagacccggcgtgagcctgaccgcctggagcatcctggaggagctgctggagaaggacagacagaacagactgggcgccaaggaggacttcctggagatccagaaccaccccttcttcgagagcctgagctgggccgacctggtgcagaagaagatccccccccccttcaaccccaacgtggccggccccgacgacatcagaaacttcgacaccgccttcaccgaggagaccgtgccctacagcgtgtgcgtgagcagcgactacagcatcgtgaacgccagcgtgctggaggccgacgacgccttcgtgggcttcagctacgccccccccagcgaggacctgttcctgtag

SEQ ID NO: 247192 - protein, 1322 aa, Artificial Sequence
  derived and/or modified sequence
MAWMTYISNWFEQDDWYEGLQRANMSQVRQVGLLAAGCQPWNKDVCAASGDRFAYCATLAIYIYQLDHRYNEFKLHAIMSEHKKTITAISWCPHNPDLFASGSTDNLVIIWNVAEQKVIAKLDSTKGIPASLSWCWNAEDVVAFVSHRGPLFIWTISGPDSGVIVHKDAHSFLSDICMFRWHTHQKGKVVFGHIDGSLSIFHPGNKNQKHVLRPESLEGTDEEDPVTALEWDPLSTDYLLVVNLHYGIRLVDSESLSCITTFNLPSAAASVQCLAWVPSAPGMFITGDSQVGVLRIWNVSRTTPIDNLKLKKTGFHCLHVLNSPPRKKFSVQSPTKNHYTSSTSEAVPPPTLTQNQAFSLPPGHAVCCFLDGGVGLYDMGAKKWDFLRDLGHVETIFDCKFKPDDPNLLATASFDGTIKVWDINTLTAVYTSPGNEGVIYSLSWAPGGLNCIAGGTSRNGAFIWNVQKGKIIQRFNEHGTNGIFCIAWSHKDSKRIATCSSDGFCIIRTIDGKVLHKYKHPAAVFGCDWSQNNKDMIATGCEDTNVRVYYVATSSDQPLKVFSGHTAKVFHVKWSPLREGILCSGSDDGTVRIWDYTQDACINILNGHTAPVRGLMWNTEIPYLLISGSWDYTIKVWDTREGTCVDTVYDHGADVYGLTCHPSRPFTMASCSRDSTVRLWSLTALVTPVQINILADRSWEEIIGNTDYAIEPGTPPLLCGKVSRDIRQEIEKLTANSQVKKLRWFSECLSPPGGSDNLWNLVAVIKGQDDSLLPQNYCKGIMHLKHLIKFRTSEAQELTTVKMSKFGGGIGVPAKEERLKEAAEIHLRLGQIQRYCELMVELGEWDKALSIAPGVSVKYWKKLMQRRADQLIQEDKDDVIPYCIAIGDVKKLVHFFMSRGQLKEALLVAQAACEGNMQPLHVSVPKGASYSDDIYKEDFNELLHKVSKELAEWYFQDGRAVLAACCHLAIDNIELAMAYLIRGNELELAVCVGTVLGESAAPATHYALELLARKCMMISVCFPCVGYSVPFCYVNRNLAADLLLMIPDNELHLIKLCAFYPGCTEEINDLHDKCKLPTVEECMQLAETARADDNIFETVKYYLLSQEPEKALPIGISFVKEYISSSDWTLDTIYPVLDLLSYIRTEKLLLHTCTEARNELLILCGYIGALLAIRRQYQSIVPALYEYTSQLLKRREVSVPLKIEYLSEELDAWRACTQSTNRSLEDSPYTPPSDSQRMIYATLLKRLKEESLKGIIGPDYVTGSNLPSHSDIHISCLTGLKIQGPVFFLEDGKSAISLNDALMWAKVNPFSPLGTGIRLNPF

SEQ ID NO: 247193 - protein, 1298 aa, Artificial Sequence
  derived and/or modified sequence
MSQVRQVGLLAAGCQPWNKDVCAASGDRFAYCATLAIYIYQLDHRYNEFKLHAIMSEHKKTITAISWCPHNPDLFASGSTDNLVIIWNVAEQKVIAKLDSTKGIPASLSWCWNAEDVVAFVSHRGPLFIWTISGPDSGVIVHKDAHSFLSDICMFRWHTHQKGKVVFGHIDGSLSIFHPGNKNQKHVLRPESLEGTDEEDPVTALEWDPLSTDYLLVVNLHYGIRLVDSESLSCITTFNLPSAAASVQCLAWVPSAPGMFITGDSQVGVLRIWNVSRTTPIDNLKLKKTGFHCLHVLNSPPRKKFSVQSPTKNHYTSSTSEAVPPPTLTQNQAFSLPPGHAVCCFLDGGVGLYDMGAKKWDFLRDLGHVETIFDCKFKPDDPNLLATASFDGTIKVWDINTLTAVYTSPGNEGVIYSLSWAPGGLNCIAGGTSRNGAFIWNVQKGKIIQRFNEHGTNGIFCIAWSHKDSKRIATCSSDGFCIIRTIDGKVLHKYKHPAAVFGCDWSQNNKDMIATGCEDTNVRVYYVATSSDQPLKVFSGHTAKVFHVKWSPLREGILCSGSDDGTVRIWDYTQDACINILNGHTAPVRGLMWNTEIPYLLISGSWDYTIKVWDTREGTCVDTVYDHGADVYGLTCHPSRPFTMASCSRDSTVRLWSLTALVTPVQINILADRSWEEIIGNTDYAIEPGTPPLLCGKVSRDIRQEIEKLTANSQVKKLRWFSECLSPPGGSDNLWNLVAVIKGQDDSLLPQNYCKGIMHLKHLIKFRTSEAQELTTVKMSKFGGGIGVPAKEERLKEAAEIHLRLGQIQRYCELMVELGEWDKALSIAPGVSVKYWKKLMQRRADQLIQEDKDDVIPYCIAIGDVKKLVHFFMSRGQLKEALLVAQAACEGNMQPLHVSVPKGASYSDDIYKEDFNELLHKVSKELAEWYFQDGRAVLAACCHLAIDNIELAMAYLIRGNELELAVCVGTVLGESAAPATHYALELLARKCMMISVCFPCVGYSVPFCYVNRNLAADLLLMIPDNELHLIKLCAFYPGCTEEINDLHDKCKLPTVEECMQLAETARADDNIFETVKYYLLSQEPEKALPIGISFVKEYISSSDWTLDTIYPVLDLLSYIRTEKLLLHTCTEARNELLILCGYIGALLAIRRQYQSIVPALYEYTSQLLKRREVSVPLKIEYLSEELDAWRACTQSTNRSLEDSPYTPPSDSQRMIYATLLKRLKEESLKGIIGPDYVTGSNLPSHSDIHISCLTGLKIQGPVFFLEDGKSAISLNDALMWAKVNPFSPLGTGIRLNPF

SEQ ID NO: 247194 - DNA, 3969 bp, Artificial Sequence
  derived and/or modified sequence
atggcctggatgacctacatcagcaactggttcgagcaggacgactggtacgagggcctgcagagagccaacatgagccaggtgagacaggtgggcctgctggccgccggctgccagccctggaacaaggacgtgtgcgccgccagcggcgacagattcgcctactgcgccaccctggccatctacatctaccagctggaccacagatacaacgagttcaagctgcacgccatcatgagcgagcacaagaagaccatcaccgccatcagctggtgcccccacaaccccgacctgttcgccagcggcagcaccgacaacctggtgatcatctggaacgtggccgagcagaaggtgatcgccaagctggacagcaccaagggcatccccgccagcctgagctggtgctggaacgccgaggacgtggtggccttcgtgagccacagaggccccctgttcatctggaccatcagcggccccgacagcggcgtgatcgtgcacaaggacgcccacagcttcctgagcgacatctgcatgttcagatggcacacccaccagaagggcaaggtggtgttcggccacatcgacggcagcctgagcatcttccaccccggcaacaagaaccagaagcacgtgctgagacccgagagcctggagggcaccgacgaggaggaccccgtgaccgccctggagtgggaccccctgagcaccgactacctgctggtggtgaacctgcactacggcatcagactggtggacagcgagagcctgagctgcatcaccaccttcaacctgcccagcgccgccgccagcgtgcagtgcctggcctgggtgcccagcgcccccggcatgttcatcaccggcgacagccaggtgggcgtgctgagaatctggaacgtgagcagaaccacccccatcgacaacctgaagctgaagaagaccggcttccactgcctgcacgtgctgaacagcccccccagaaagaagttcagcgtgcagagccccaccaagaaccactacaccagcagcaccagcgaggccgtgcccccccccaccctgacccagaaccaggccttcagcctgccccccggccacgccgtgtgctgcttcctggacggcggcgtgggcctgtacgacatgggcgccaagaagtgggacttcctgagagacctgggccacgtggagaccatcttcgactgcaagttcaagcccgacgaccccaacctgctggccaccgccagcttcgacggcaccatcaaggtgtgggacatcaacaccctgaccgccgtgtacaccagccccggcaacgagggcgtgatctacagcctgagctgggcccccggcggcctgaactgcatcgccggcggcaccagcagaaacggcgccttcatctggaacgtgcagaagggcaagatcatccagagattcaacgagcacggcaccaacggcatcttctgcatcgcctggagccacaaggacagcaagagaatcgccacctgcagcagcgacggcttctgcatcatcagaaccatcgacggcaaggtgctgcacaagtacaagcaccccgccgccgtgttcggctgcgactggagccagaacaacaaggacatgatcgccaccggctgcgaggacaccaacgtgagagtgtactacgtggccaccagcagcgaccagcccctgaaggtgttcagcggccacaccgccaaggtgttccacgtgaagtggagccccctgagagagggcatcctgtgcagcggcagcgacgacggcaccgtgagaatctgggactacacccaggacgcctgcatcaacatcctgaacggccacaccgcccccgtgagaggcctgatgtggaacaccgagatcccctacctgctgatcagcggcagctgggactacaccatcaaggtgtgggacaccagagagggcacctgcgtggacaccgtgtacgaccacggcgccgacgtgtacggcctgacctgccaccccagcagacccttcaccatggccagctgcagcagagacagcaccgtgagactgtggagcctgaccgccctggtgacccccgtgcagatcaacatcctggccgacagaagctgggaggagatcatcggcaacaccgactacgccatcgagcccggcaccccccccctgctgtgcggcaaggtgagcagagacatcagacaggagatcgagaagctgaccgccaacagccaggtgaagaagctgagatggttcagcgagtgcctgagcccccccggcggcagcgacaacctgtggaacctggtggccgtgatcaagggccaggacgacagcctgctgccccagaactactgcaagggcatcatgcacctgaagcacctgatcaagttcagaaccagcgaggcccaggagctgaccaccgtgaagatgagcaagttcggcggcggcatcggcgtgcccgccaaggaggagagactgaaggaggccgccgagatccacctgagactgggccagatccagagatactgcgagctgatggtggagctgggcgagtgggacaaggccctgagcatcgcccccggcgtgagcgtgaagtactggaagaagctgatgcagagaagagccgaccagctgatccaggaggacaaggacgacgtgatcccctactgcatcgccatcggcgacgtgaagaagctggtgcacttcttcatgagcagaggccagctgaaggaggccctgctggtggcccaggccgcctgcgagggcaacatgcagcccctgcacgtgagcgtgcccaagggcgccagctacagcgacgacatctacaaggaggacttcaacgagctgctgcacaaggtgagcaaggagctggccgagtggtacttccaggacggcagagccgtgctggccgcctgctgccacctggccatcgacaacatcgagctggccatggcctacctgatcagaggcaacgagctggagctggccgtgtgcgtgggcaccgtgctgggcgagagcgccgcccccgccacccactacgccctggagctgctggccagaaagtgcatgatgatcagcgtgtgcttcccctgcgtgggctacagcgtgcccttctgctacgtgaacagaaacctggccgccgacctgctgctgatgatccccgacaacgagctgcacctgatcaagctgtgcgccttctaccccggctgcaccgaggagatcaacgacctgcacgacaagtgcaagctgcccaccgtggaggagtgcatgcagctggccgagaccgccagagccgacgacaacatcttcgagaccgtgaagtactacctgctgagccaggagcccgagaaggccctgcccatcggcatcagcttcgtgaaggagtacatcagcagcagcgactggaccctggacaccatctaccccgtgctggacctgctgagctacatcagaaccgagaagctgctgctgcacacctgcaccgaggccagaaacgagctgctgatcctgtgcggctacatcggcgccctgctggccatcagaagacagtaccagagcatcgtgcccgccctgtacgagtacaccagccagctgctgaagagaagagaggtgagcgtgcccctgaagatcgagtacctgagcgaggagctggacgcctggagagcctgcacccagagcaccaacagaagcctggaggacagcccctacaccccccccagcgacagccagagaatgatctacgccaccctgctgaagagactgaaggaggagagcctgaagggcatcatcggccccgactacgtgaccggcagcaacctgcccagccacagcgacatccacatcagctgcctgaccggcctgaagatccagggccccgtgttcttcctggaggacggcaagagcgccatcagcctgaacgacgccctgatgtgggccaaggtgaaccccttcagccccctgggcaccggcatcagactgaaccccttctag

SEQ ID NO: 247195 - DNA, 393 bp, Artificial Sequence
  derived and/or modified sequence
atgagccaggtgagacaggtgggcctgctggccgccggctgccagccctggaacaaggacgtgtgcgccgccagcggcgacagattcgcctactgcgccaccctggccatctacatctaccagctggaccacagatacaacgagttcaagctgcacgccatcatgagcgagcacaagaagaccatcaccgccatcagctggtgcccccacaaccccgacctgttcgccagcggcagcaccgacaacctggtgatcatctggaacgtggccgagcagaaggtgatcgccaagctggacagagccagaccccccagccccaagatcatctacatcaagatcatcaacatcatcgaggagaacatccacaacagcgagatgcagtggatcatctag

SEQ ID NO: 247196 - DNA, 3897 bp, Artificial Sequence
  derived and/or modified sequence
atgagccaggtgagacaggtgggcctgctggccgccggctgccagccctggaacaaggacgtgtgcgccgccagcggcgacagattcgcctactgcgccaccctggccatctacatctaccagctggaccacagatacaacgagttcaagctgcacgccatcatgagcgagcacaagaagaccatcaccgccatcagctggtgcccccacaaccccgacctgttcgccagcggcagcaccgacaacctggtgatcatctggaacgtggccgagcagaaggtgatcgccaagctggacagcaccaagggcatccccgccagcctgagctggtgctggaacgccgaggacgtggtggccttcgtgagccacagaggccccctgttcatctggaccatcagcggccccgacagcggcgtgatcgtgcacaaggacgcccacagcttcctgagcgacatctgcatgttcagatggcacacccaccagaagggcaaggtggtgttcggccacatcgacggcagcctgagcatcttccaccccggcaacaagaaccagaagcacgtgctgagacccgagagcctggagggcaccgacgaggaggaccccgtgaccgccctggagtgggaccccctgagcaccgactacctgctggtggtgaacctgcactacggcatcagactggtggacagcgagagcctgagctgcatcaccaccttcaacctgcccagcgccgccgccagcgtgcagtgcctggcctgggtgcccagcgcccccggcatgttcatcaccggcgacagccaggtgggcgtgctgagaatctggaacgtgagcagaaccacccccatcgacaacctgaagctgaagaagaccggcttccactgcctgcacgtgctgaacagcccccccagaaagaagttcagcgtgcagagccccaccaagaaccactacaccagcagcaccagcgaggccgtgcccccccccaccctgacccagaaccaggccttcagcctgccccccggccacgccgtgtgctgcttcctggacggcggcgtgggcctgtacgacatgggcgccaagaagtgggacttcctgagagacctgggccacgtggagaccatcttcgactgcaagttcaagcccgacgaccccaacctgctggccaccgccagcttcgacggcaccatcaaggtgtgggacatcaacaccctgaccgccgtgtacaccagccccggcaacgagggcgtgatctacagcctgagctgggcccccggcggcctgaactgcatcgccggcggcaccagcagaaacggcgccttcatctggaacgtgcagaagggcaagatcatccagagattcaacgagcacggcaccaacggcatcttctgcatcgcctggagccacaaggacagcaagagaatcgccacctgcagcagcgacggcttctgcatcatcagaaccatcgacggcaaggtgctgcacaagtacaagcaccccgccgccgtgttcggctgcgactggagccagaacaacaaggacatgatcgccaccggctgcgaggacaccaacgtgagagtgtactacgtggccaccagcagcgaccagcccctgaaggtgttcagcggccacaccgccaaggtgttccacgtgaagtggagccccctgagagagggcatcctgtgcagcggcagcgacgacggcaccgtgagaatctgggactacacccaggacgcctgcatcaacatcctgaacggccacaccgcccccgtgagaggcctgatgtggaacaccgagatcccctacctgctgatcagcggcagctgggactacaccatcaaggtgtgggacaccagagagggcacctgcgtggacaccgtgtacgaccacggcgccgacgtgtacggcctgacctgccaccccagcagacccttcaccatggccagctgcagcagagacagcaccgtgagactgtggagcctgaccgccctggtgacccccgtgcagatcaacatcctggccgacagaagctgggaggagatcatcggcaacaccgactacgccatcgagcccggcaccccccccctgctgtgcggcaaggtgagcagagacatcagacaggagatcgagaagctgaccgccaacagccaggtgaagaagctgagatggttcagcgagtgcctgagcccccccggcggcagcgacaacctgtggaacctggtggccgtgatcaagggccaggacgacagcctgctgccccagaactactgcaagggcatcatgcacctgaagcacctgatcaagttcagaaccagcgaggcccaggagctgaccaccgtgaagatgagcaagttcggcggcggcatcggcgtgcccgccaaggaggagagactgaaggaggccgccgagatccacctgagactgggccagatccagagatactgcgagctgatggtggagctgggcgagtgggacaaggccctgagcatcgcccccggcgtgagcgtgaagtactggaagaagctgatgcagagaagagccgaccagctgatccaggaggacaaggacgacgtgatcccctactgcatcgccatcggcgacgtgaagaagctggtgcacttcttcatgagcagaggccagctgaaggaggccctgctggtggcccaggccgcctgcgagggcaacatgcagcccctgcacgtgagcgtgcccaagggcgccagctacagcgacgacatctacaaggaggacttcaacgagctgctgcacaaggtgagcaaggagctggccgagtggtacttccaggacggcagagccgtgctggccgcctgctgccacctggccatcgacaacatcgagctggccatggcctacctgatcagaggcaacgagctggagctggccgtgtgcgtgggcaccgtgctgggcgagagcgccgcccccgccacccactacgccctggagctgctggccagaaagtgcatgatgatcagcgtgtgcttcccctgcgtgggctacagcgtgcccttctgctacgtgaacagaaacctggccgccgacctgctgctgatgatccccgacaacgagctgcacctgatcaagctgtgcgccttctaccccggctgcaccgaggagatcaacgacctgcacgacaagtgcaagctgcccaccgtggaggagtgcatgcagctggccgagaccgccagagccgacgacaacatcttcgagaccgtgaagtactacctgctgagccaggagcccgagaaggccctgcccatcggcatcagcttcgtgaaggagtacatcagcagcagcgactggaccctggacaccatctaccccgtgctggacctgctgagctacatcagaaccgagaagctgctgctgcacacctgcaccgaggccagaaacgagctgctgatcctgtgcggctacatcggcgccctgctggccatcagaagacagtaccagagcatcgtgcccgccctgtacgagtacaccagccagctgctgaagagaagagaggtgagcgtgcccctgaagatcgagtacctgagcgaggagctggacgcctggagagcctgcacccagagcaccaacagaagcctggaggacagcccctacaccccccccagcgacagccagagaatgatctacgccaccctgctgaagagactgaaggaggagagcctgaagggcatcatcggccccgactacgtgaccggcagcaacctgcccagccacagcgacatccacatcagctgcctgaccggcctgaagatccagggccccgtgttcttcctggaggacggcaagagcgccatcagcctgaacgacgccctgatgtgggccaaggtgaaccccttcagccccctgggcaccggcatcagactgaaccccttctag

SEQ ID NO: 247197 - DNA, 3969 bp, Artificial Sequence
  derived and/or modified sequence
atggcctggatgacctatatatcgaactggtttgagcaggatgactggtacgaggggctgcagagggctaatatgtctcaggtccggcaggtaggtctgctggcagccgggtgtcagccctggaacaaagacgtgtgtgccgcaagcggcgacaggttcgcctactgtgctacacttgccatctacatataccagctggaccaccgctataacgaattcaaactgcacgccattatgagtgaacataaaaagaccatcacagccataagctggtgcccccacaatcctgatctgtttgcctccggaagcaccgataatctcgtcattatctggaacgtggcggaacagaaggttatagccaagctggattccaccaagggaataccagcaagtctctcatggtgttggaacgcagaagacgtggtcgcctttgttagccacagggggcctctgttcatttggactataagcgggcccgatagtggggtgattgtgcacaaagatgctcacagttttctaagtgacatctgtatgttccggtggcatacccatcaaaaggggaaggtggtgttcggtcacattgacggctccctctcgatattccaccctgggaacaaaaatcagaaacacgtgcttaggcctgagagcttagagggtaccgacgaagaagaccctgtcacagcactggaatgggaccctctgtcaactgactacctcctcgtagtgaacctgcactacggcatcagactcgtcgatagcgaaagtctgtcctgtatcacaaccttcaacctcccctctgccgcagcttcagttcagtgcctcgcgtgggtgcccagtgcacccggcatgttcattactggtgactcacaggtaggagtgctccgaatttggaacgtctccaggaccacaccgatagacaatctaaaattaaagaagacaggctttcactgcctgcacgtgctcaattctcccccacgaaagaagttctcagtccagagcccaacgaagaatcactatacaagttcaacttcagaggccgtcccaccccctacactgacacaaaatcaggccttttcactgcctcccggacatgcagtatgctgctttcttgacggcggggtcgggctgtatgatatgggagccaagaagtgggactttttgagagatctcgggcacgtagaaactatcttcgattgtaaattcaaaccagatgaccccaatcttcttgccaccgcttcgttcgatggtacgatcaaggtgtgggacataaatacgttaaccgctgtatacacatctcccggcaatgaaggggtgatttactctttgtcatgggcccctggggggttgaattgcattgcgggaggaacttcgagaaacggcgctttcatttggaatgtgcagaaagggaaaataatccagaggtttaatgaacacgggactaatggcatcttctgcatcgcttggtcccacaaggattctaaacgaatcgccacttgttcaagcgacgggttctgcattatccgaaccattgatggcaaagtactgcacaaatacaagcacccagcagctgtgttcggctgtgactggtctcagaataacaaagatatgattgccaccggctgcgaggataccaacgtccgggtgtactatgtggcaacttctagcgaccagcctctgaaggtgttcagtggacacaccgccaaagtgttccacgtgaagtggtcccccctgagggaggggattctgtgttcagggagcgatgacgggactgtgcggatatgggactatacccaggacgcctgtattaatatcttaaatggtcatacggccccagtgaggggcttaatgtggaacaccgagataccctatctcctgatctccgggtcatgggattatactatcaaggtgtgggataccagagaaggcacttgcgtcgacactgtgtatgaccacggcgctgacgtttacgggctgacctgccatccctctagaccgtttaccatggcatcctgcagtcgcgactcgaccgttaggctctggagcctgaccgccctggtcacccctgtccagattaatattctggccgacagaagctgggaagagattatcggcaataccgactacgcaatcgagcccgggacaccgcctctgctctgcgggaaggtgtccagagacatccggcaagaaattgaaaagctgaccgccaactcccaggttaaaaaacttcgctggttttcagagtgcctctccccgcctggcggatcagataatctctggaatctcgtcgctgtaattaaaggtcaggatgactccctgctcccgcaaaattactgtaaaggaattatgcaccttaagcatctgatcaagttccgaacttccgaggctcaggagctaacaaccgttaaaatgtcaaagtttggcggaggaatcggcgtaccagccaaagaggaaaggctgaaggaagcagcggaaatccatctgaggctgggccagattcaacggtactgcgagttaatggttgagctaggcgaatgggataaggcacttagcattgcccccggggtttccgtcaaatactggaaaaagcttatgcagcgccgcgccgaccagctgattcaggaagataaagatgatgtcattccctactgcatcgcaataggagatgtaaaaaagctggtgcacttcttcatgagcagagggcagttaaaagaggccctgcttgtggcacaagctgcttgcgaaggaaatatgcagcccttacatgtttcagtcccaaagggggccagctactccgatgatatttataaggaggatttcaatgaattgcttcacaaggtgtcgaaagagctggccgagtggtactttcaggatggacgagccgtcctcgcggcctgctgccatctggccatcgacaatatcgagctagccatggcatatcttatccggggtaacgaattagagctagccgtatgtgtcgggactgtcctgggtgagtcagcggccccagctactcactatgctctcgagcttttagcgagaaaatgcatgatgatttcagtgtgttttccttgcgtgggatattcagttccgttctgttacgtcaacaggaacctcgcagccgacctgctcttaatgattcctgacaacgagctccacctgatcaaactgtgtgcgttctacccaggctgtactgaagagataaatgatttacacgataagtgcaagctcccgaccgttgaagagtgtatgcagctggctgaaacagctcgagctgacgataatattttcgaaaccgtgaaatattaccttctgtcccaagaaccggaaaaggcactgccgattggaatatcttttgtgaaggagtatattagttcttccgattggaccctggacacaatttaccccgtactggacctgctcagctatattagaactgaaaagctactgcttcacacttgcacagaagcgaggaacgagcttttgattctctgcggctacatcggagctctgctggcaatcagacgccaataccagtctatagttcctgccttgtatgagtacacctcccagctcttgaaaaggcgcgaggtcagcgtgccccttaaaatcgaatacctgtctgaggagctggatgcgtggcgcgcttgtacccagtctacaaataggtccttagaagattctccctacacacccccgtctgactctcagaggatgatatacgctacactgcttaagcgcctcaaggaggaatccctcaaaggaattatcgggccagactacgtaacaggctcaaacctcccctcccatagcgatatccatattagctgtctgaccggcctcaagatacaaggaccagtgttctttttagaggacggaaagtccgccattagcctgaacgacgctctcatgtgggcgaaagtaaatccattttcaccactcggtacagggatccggttgaaccccttttag

SEQ ID NO: 247198 - DNA, 393 bp, Artificial Sequence
  derived and/or modified sequence
atgtcacaggtcaggcaggttggactgcttgccgccgggtgccagccctggaacaaggatgtgtgtgcagcgagtggggatcgcttcgcgtactgcgccactcttgccatttacatatatcagttagaccatcgctataacgagttcaaactccacgccataatgagcgagcacaaaaagactatcaccgccatttcctggtgcccccacaatccagacctgttcgctagtggaagcaccgacaacctagttatcatctggaacgttgctgagcagaaagtgatcgcgaaattagacagggctaggccacccagtccaaagataatttatataaagatcattaacatcatagaagagaacatccataactccgaaatgcagtggattatctag

SEQ ID NO: 247199 - DNA, 3897 bp, Artificial Sequence
  derived and/or modified sequence
atgtcacaagtacggcaggtaggcctcctagccgccggatgccaaccgtggaataaggatgtgtgcgcagctagcggggaccgcttcgcatattgtgcaacactcgcaatctatatctaccagctggaccataggtataacgagtttaagttgcacgccattatgagcgagcacaaaaagaccattacagctatatcctggtgcccacacaaccctgatttatttgcttcaggatcaacagataatctggttattatctggaacgtcgcagaacagaaggtcatagccaagctggactcaacgaagggcattccagcctctctaagttggtgttggaatgccgaggatgtggtggcctttgtcagccaccgaggcccactcttcatatggaccatctcaggacccgattccggcgtcattgtccataaagacgctcacagtttcttgagcgacatttgcatgtttcgctggcatacccaccaaaaagggaaagttgtgtttggtcacattgacggtagcctgtcaatcttccaccctggcaacaaaaatcagaagcatgtactgagaccagaatccttggagggcacagacgaagaggatcccgtgacagccctcgaatgggatcctctttctacagactaccttctggttgtaaatctacactacgggattcggctggtcgacagtgagagcctgtcttgcatcactacctttaacctgcccagtgcagcagcttctgttcagtgtttggcatgggtgccttccgctcccggtatgtttattactggggactcgcaggtaggagtgttgcgtatttggaacgtgtccagaaccacgcccatagacaacttgaaactgaaaaagacgggcttccattgcctccatgtcctgaattccccccccagaaaaaaattctccgtgcagagtcctacaaagaaccattacacatctagcacaagcgaggcagtgcctcctcctactttaacccagaatcaggccttttctttgccgcccggccatgcagtttgctgctttctcgatggcggggtcggcctgtacgatatgggggctaagaagtgggatttcctccgggatctcggacatgtagaaactatatttgactgcaagtttaagcccgatgaccccaacctgttggctaccgctagctttgacggcactatcaaagtgtgggacattaatactctgaccgctgtgtacacatccccaggtaatgaaggcgtgatctatagcttaagctgggcaccaggaggcttaaattgcatcgcgggtggcacctctagaaatggtgccttcatctggaatgtgcaaaaggggaagatcatacaacgttttaatgaacacggaaccaatggaattttctgtattgcatggagccacaaggacagcaaacgcattgcgacatgcagctcggatggtttctgtataattcggacaatagatggaaaggtgctacacaaatacaagcatccggcagcagtgttcggttgtgactggtctcaaaataacaaggatatgattgcaacaggctgcgaagatacaaatgtgagagtctactatgtcgcaaccagctccgaccagccgctgaaagtctttagcggtcacactgctaaggtttttcatgtgaaatggagcccactgcgggaagggattctgtgttccggatccgacgacggcaccgttaggatctgggattatacccaggacgcctgcattaatatcctgaacggccacacagcacctgtacggggcctcatgtggaacactgaaataccctatcttctgataagtggatcttgggactacacgattaaagtctgggatacccgggagggcacatgcgtggacaccgtgtatgaccatggcgcagacgtgtatggactgacatgtcacccttctcgtccctttacgatggcgtcctgttctcgtgactcgactgtccgcctatggagcctcacagctttggttacccctgtgcagattaatattctcgcggacagaagttgggaagaaatcattgggaataccgactatgctattgaacccgggactccccccctcctatgcggaaaggttagtagagatatacgccaggaaatcgagaaacttacagcgaatagccaggtgaagaagctgcggtggttctccgaatgcctgtccccacccggcggcagcgacaatctctggaaccttgtggctgtgatcaaaggacaagacgatagcttactaccgcagaactattgtaaaggaatcatgcatcttaagcacctcatcaagtttaggacttctgaagcccaagaactaaccacagttaaaatgtctaagttcggtggcgggatcggggtgcctgctaaagaggagagattgaaagaggcagctgaaatccatctgagattagggcagatccagcggtattgcgaactgatggttgagcttggagagtgggacaaggccctgtccatcgcccccggcgtctccgttaaatactggaagaaactcatgcaacggcgggccgatcaactcatccaggaggataaagacgatgttataccatactgcatcgcaatcggcgacgtgaagaagctggtgcacttctttatgagcagagggcagctgaaggaagccctgctggttgctcaggctgcttgtgaaggcaacatgcagccattgcacgtgtcagttccaaaaggcgctagctattccgacgatatctataaagaagatttcaacgaactgctacataaggtgagtaaggaactggccgagtggtatttccaggacggtagggccgttctggctgcgtgttgtcaccttgccattgacaatattgagctggcgatggcttatctgatcagaggaaacgagctggaactggcagtgtgtgtgggaaccgtcttgggtgaaagcgcagcgcccgccacacattatgcactcgaacttcttgctcgcaaatgtatgatgatctcagtttgttttccgtgtgtaggatatagcgtgcccttctgttacgtcaacaggaacctggctgcagatctgctactcatgatcccagacaatgaactgcacctaattaaactatgtgccttctatccagggtgcacagaagagataaatgacctgcacgacaagtgcaagctgccgaccgtggaagagtgcatgcagttagccgagactgccagagctgacgataatatcttcgaaaccgtaaaatactatctgttgagccaagagcctgaaaaggctttaccaatcggaatctcatttgttaaagagtacatttcgtcatctgactggactctcgatactatctacccggttctcgacctgctgtcctacattagaacggagaagcttcttcttcacacttgtacagaggcgcgcaacgaattgctaattctctgcggctacatcggtgccctgctggcaattcggaggcagtaccaatccatcgtaccagctctgtacgagtacacaagccagctactgaaaaggcgagaagtcagcgtcccgctgaaaatcgagtatctttctgaagaactagacgcctggagagcatgcacacagtcgacaaaccgcagtttggaggactctccatacacacctccatccgatagccagaggatgatttatgccacgttgttaaagcgactcaaagaggaatctctaaagggtattataggtccggattacgtgacgggttcaaatctaccatcacattcagatatccacatatcttgcctaaccggcctcaagatacaaggcccagtcttcttcttggaggacggcaaaagcgctatctcgctgaacgacgccctcatgtgggcaaaagtcaacccttttagtccgctgggaactggcataaggttgaatcccttttag

SEQ ID NO: 247200 - DNA, 3969 bp, Artificial Sequence
  derived and/or modified sequence
atggcctggatgacctacatcagcaactggtttgagcaggatgactggtatgagggcctgcagagggccaacatgagccaggtgcggcaggtgggcctgctggccgccggctgccagccctggaacaaggatgtgtgtgccgccagcggggacagatttgcctactgtgccaccctggccatctacatctaccagctggaccaccgctacaatgagttcaagctgcacgccatcatgtctgagcacaagaagaccatcacagccatctcctggtgcccccacaacccagacctgtttgccagcggcagcacagacaacctggtgatcatctggaatgtggccgagcagaaggtgattgccaagctggacagcaccaagggcatcccagccagcctgtcctggtgctggaatgcagaagatgtggtggcctttgtgagccaccggggccccctcttcatctggaccatcagcggcccagattctggagtcatcgtgcacaaggatgcccacagcttcctgagtgacatctgcatgttccgctggcacacccaccagaagggcaaggtggtgtttggccacattgatggcagcctgagcatcttccaccctggcaacaagaaccagaagcacgtgctgcggcctgagagcctggagggcacagatgaagaagatcctgtgacagccctggagtgggaccccctgagcacagactacctgctggtggtgaacctgcactacggcatccggctggtggacagcgagagcctgagctgcatcaccaccttcaacctgcccagcgctgctgcctctgtgcagtgcctggcctgggtgcccagcgcccctggcatgttcatcaccggggacagccaggtgggcgtgctgcgcatctggaatgtgtccaggaccacccccatcgacaacctgaagctgaagaagacaggcttccactgcctgcacgtgctgaacagcccccccaggaagaagttctctgtgcagagccccaccaagaaccactacaccagcagcaccagcgaggccgtgcccccacccaccctgacccagaaccaggccttcagcctgcccccaggccatgctgtgtgctgcttcctggatggaggagtgggcctgtatgacatgggcgccaagaagtgggacttcctgcgggacctgggccacgtggagaccatctttgactgcaagttcaagccagatgaccccaacctgctggccacagccagctttgatggcaccatcaaggtgtgggacatcaacaccctgacagctgtgtacaccagccctggaaatgaaggagtcatctacagcctgtcctgggcccctgggggcctgaactgcatcgccggcggcaccagcagaaatggagccttcatctggaatgtgcagaagggcaagatcatccagcgcttcaatgagcacggcaccaacggcatcttctgcatcgcctggagccacaaggacagcaagagaattgccacctgcagcagtgatggcttctgcatcatccgcaccattgatggcaaggtgctgcacaagtacaagcaccctgctgctgtgtttggctgtgactggagccagaacaacaaggacatgattgccaccggctgtgaggacaccaacgtgcgggtgtactacgtggccaccagcagtgaccagcccctgaaggtgttttctggccacacagccaaggtgttccacgtgaagtggagccccctgcgggagggcatcctgtgcagcggcagtgatgatggcaccgtgcgcatctgggactacacccaggatgcctgcatcaacatcctgaatggccacacagcccctgtgcggggcctgatgtggaacacagagatcccctacctgctgatcagcggctcctgggactacaccatcaaggtgtgggacacccgggagggcacctgtgtggacacagtgtatgaccatggagcagatgtgtatggcctgacctgccaccccagccggcccttcaccatggccagctgcagccgggacagcacagtgcggctgtggagcctgacagccctggtgacccctgtgcagatcaacatcctggccgaccgctcctgggaggagatcatcggcaacacagattatgccatcgagcccggcaccccacccctgctgtgtgggaaggtgtcccgggacatccggcaggagattgagaagctgacagccaacagccaggtgaagaagctgcgctggttctctgaatgtctgagccccccaggcggcagtgacaacctgtggaacctggtggccgtcatcaagggccaggatgacagcctgctgccccagaactactgcaagggcatcatgcacctgaagcacctgatcaagttccgcaccagcgaggcccaggagctgaccaccgtgaagatgagcaagtttggaggcggcatcggcgtgcctgccaaggaggagcggctgaaggaggccgctgagatccacctgcggctgggccagatccagcgctactgtgagctgatggtggagctgggggagtgggacaaggccctgagcatcgcccctggggtgtctgtgaagtactggaagaagctgatgcagaggagagctgaccagctgatccaggaggacaaggatgatgtgatcccctactgcatcgccatcggagatgtgaagaagctggtgcacttcttcatgagccggggccagctgaaggaggccctgctggtggcccaggccgcctgtgagggcaacatgcagcccctgcacgtgtctgtgcccaagggggccagctacagtgatgacatctacaaggaggacttcaatgagctgctgcacaaggtgtccaaggagctggccgagtggtacttccaggacggccgggctgtgctggccgcctgctgccacctggccatcgacaacatcgagctggccatggcctacctgatcagaggaaatgagctggagctggccgtgtgtgtgggcaccgtgctgggggagagcgctgccccagccacccactacgccctggagctgctggccaggaagtgcatgatgatctctgtgtgcttcccctgtgtgggctacagcgtgcccttctgctacgtgaacagaaacctggccgctgacctgctgctgatgatcccagacaatgagctgcacctgatcaagctgtgtgccttctacccaggctgcacagaggagatcaatgacctgcatgacaagtgcaagctgcccaccgtggaggagtgcatgcagctggccgagacagcccgggcagatgacaacatctttgagaccgtgaagtactacctgctgagccaggagcctgagaaggccctgcccatcggcatcagctttgtgaaggagtacatcagcagcagtgactggaccctggacaccatctaccctgtgctggacctgctgagctacatcagaacagagaagctgctgctgcacacctgcacagaggccagaaatgagctgctgatcctgtgtggctacatcggggccctgctggccatccggcggcagtaccagagcatcgtgcctgccctgtatgagtacaccagccagctgctgaagaggcgggaggtgtctgtgcccctgaagattgagtacctgtctgaggagctggatgcctggagggcctgcacccagagcaccaacagaagcctggaggacagcccctacaccccacccagcgacagccagaggatgatctatgccaccctgctgaagaggctgaaggaggagagcctgaagggcatcatcggccctgactatgtgacaggcagcaacctgcccagccacagcgacatccacatcagctgcctgaccggcctgaagatccagggccctgtgttcttcctggaggatggcaagagcgccatcagcctgaatgatgccctgatgtgggccaaggtgaaccccttcagccccctgggcaccggcatccggctgaaccccttctag

SEQ ID NO: 247201 - DNA, 393 bp, Artificial Sequence
  derived and/or modified sequence
atgagccaggtgcggcaggtgggcctgctggccgccggctgccagccctggaacaaggatgtgtgtgccgccagcggggacagatttgcctactgtgccaccctggccatctacatctaccagctggaccaccgctacaatgagttcaagctgcacgccatcatgtctgagcacaagaagaccatcacagccatctcctggtgcccccacaacccagacctgtttgccagcggcagcacagacaacctggtgatcatctggaatgtggccgagcagaaggtgattgccaagctggaccgggcccggccccccagccccaagatcatctacatcaagatcatcaacatcatcgaggagaacatccacaacagcgagatgcagtggatcatctag

SEQ ID NO: 247202 - DNA, 3897 bp, Artificial Sequence
  derived and/or modified sequence
atgagccaggtgcggcaggtgggcctgctggccgccggctgccagccctggaacaaggatgtgtgtgccgccagcggggacagatttgcctactgtgccaccctggccatctacatctaccagctggaccaccgctacaatgagttcaagctgcacgccatcatgtctgagcacaagaagaccatcacagccatctcctggtgcccccacaacccagacctgtttgccagcggcagcacagacaacctggtgatcatctggaatgtggccgagcagaaggtgattgccaagctggacagcaccaagggcatcccagccagcctgtcctggtgctggaatgcagaagatgtggtggcctttgtgagccaccggggccccctcttcatctggaccatcagcggcccagattctggagtcatcgtgcacaaggatgcccacagcttcctgagtgacatctgcatgttccgctggcacacccaccagaagggcaaggtggtgtttggccacattgatggcagcctgagcatcttccaccctggcaacaagaaccagaagcacgtgctgcggcctgagagcctggagggcacagatgaagaagatcctgtgacagccctggagtgggaccccctgagcacagactacctgctggtggtgaacctgcactacggcatccggctggtggacagcgagagcctgagctgcatcaccaccttcaacctgcccagcgctgctgcctctgtgcagtgcctggcctgggtgcccagcgcccctggcatgttcatcaccggggacagccaggtgggcgtgctgcgcatctggaatgtgtccaggaccacccccatcgacaacctgaagctgaagaagacaggcttccactgcctgcacgtgctgaacagcccccccaggaagaagttctctgtgcagagccccaccaagaaccactacaccagcagcaccagcgaggccgtgcccccacccaccctgacccagaaccaggccttcagcctgcccccaggccatgctgtgtgctgcttcctggatggaggagtgggcctgtatgacatgggcgccaagaagtgggacttcctgcgggacctgggccacgtggagaccatctttgactgcaagttcaagccagatgaccccaacctgctggccacagccagctttgatggcaccatcaaggtgtgggacatcaacaccctgacagctgtgtacaccagccctggaaatgaaggagtcatctacagcctgtcctgggcccctgggggcctgaactgcatcgccggcggcaccagcagaaatggagccttcatctggaatgtgcagaagggcaagatcatccagcgcttcaatgagcacggcaccaacggcatcttctgcatcgcctggagccacaaggacagcaagagaattgccacctgcagcagtgatggcttctgcatcatccgcaccattgatggcaaggtgctgcacaagtacaagcaccctgctgctgtgtttggctgtgactggagccagaacaacaaggacatgattgccaccggctgtgaggacaccaacgtgcgggtgtactacgtggccaccagcagtgaccagcccctgaaggtgttttctggccacacagccaaggtgttccacgtgaagtggagccccctgcgggagggcatcctgtgcagcggcagtgatgatggcaccgtgcgcatctgggactacacccaggatgcctgcatcaacatcctgaatggccacacagcccctgtgcggggcctgatgtggaacacagagatcccctacctgctgatcagcggctcctgggactacaccatcaaggtgtgggacacccgggagggcacctgtgtggacacagtgtatgaccatggagcagatgtgtatggcctgacctgccaccccagccggcccttcaccatggccagctgcagccgggacagcacagtgcggctgtggagcctgacagccctggtgacccctgtgcagatcaacatcctggccgaccgctcctgggaggagatcatcggcaacacagattatgccatcgagcccggcaccccacccctgctgtgtgggaaggtgtcccgggacatccggcaggagattgagaagctgacagccaacagccaggtgaagaagctgcgctggttctctgaatgtctgagccccccaggcggcagtgacaacctgtggaacctggtggccgtcatcaagggccaggatgacagcctgctgccccagaactactgcaagggcatcatgcacctgaagcacctgatcaagttccgcaccagcgaggcccaggagctgaccaccgtgaagatgagcaagtttggaggcggcatcggcgtgcctgccaaggaggagcggctgaaggaggccgctgagatccacctgcggctgggccagatccagcgctactgtgagctgatggtggagctgggggagtgggacaaggccctgagcatcgcccctggggtgtctgtgaagtactggaagaagctgatgcagaggagagctgaccagctgatccaggaggacaaggatgatgtgatcccctactgcatcgccatcggagatgtgaagaagctggtgcacttcttcatgagccggggccagctgaaggaggccctgctggtggcccaggccgcctgtgagggcaacatgcagcccctgcacgtgtctgtgcccaagggggccagctacagtgatgacatctacaaggaggacttcaatgagctgctgcacaaggtgtccaaggagctggccgagtggtacttccaggacggccgggctgtgctggccgcctgctgccacctggccatcgacaacatcgagctggccatggcctacctgatcagaggaaatgagctggagctggccgtgtgtgtgggcaccgtgctgggggagagcgctgccccagccacccactacgccctggagctgctggccaggaagtgcatgatgatctctgtgtgcttcccctgtgtgggctacagcgtgcccttctgctacgtgaacagaaacctggccgctgacctgctgctgatgatcccagacaatgagctgcacctgatcaagctgtgtgccttctacccaggctgcacagaggagatcaatgacctgcatgacaagtgcaagctgcccaccgtggaggagtgcatgcagctggccgagacagcccgggcagatgacaacatctttgagaccgtgaagtactacctgctgagccaggagcctgagaaggccctgcccatcggcatcagctttgtgaaggagtacatcagcagcagtgactggaccctggacaccatctaccctgtgctggacctgctgagctacatcagaacagagaagctgctgctgcacacctgcacagaggccagaaatgagctgctgatcctgtgtggctacatcggggccctgctggccatccggcggcagtaccagagcatcgtgcctgccctgtatgagtacaccagccagctgctgaagaggcgggaggtgtctgtgcccctgaagattgagtacctgtctgaggagctggatgcctggagggcctgcacccagagcaccaacagaagcctggaggacagcccctacaccccacccagcgacagccagaggatgatctatgccaccctgctgaagaggctgaaggaggagagcctgaagggcatcatcggccctgactatgtgacaggcagcaacctgcccagccacagcgacatccacatcagctgcctgaccggcctgaagatccagggccctgtgttcttcctggaggatggcaagagcgccatcagcctgaatgatgccctgatgtgggccaaggtgaaccccttcagccccctgggcaccggcatccggctgaaccccttctag

SEQ ID NO: 247203 - DNA, 3969 bp, Artificial Sequence
  derived and/or modified sequence
atggcctggatgacctacatcagcaactggttcgagcaggacgactggtacgagggattgcaacgggcgaacatgagccaggtcagacaggtgggattactggccgctggctgccagccttggaacaaggatgtttgcgctgcatctggcgaccgtttcgcttattgcgccactttggccatctacatctatcagctggaccatcgctataatgagttcaagctgcacgcgatcatgagtgagcacaaaaagacgattaccgcgattagctggtgtccccataacccagacctgttcgcatcaggttccaccgacaatctggtgataatttggaacgtggcggagcagaaagtcattgcgaagttggatagcacgaagggcattcccgcctccctgagttggtgttggaacgctgaagatgtcgtggcctttgtcagccatagggggcccctttttatttggacaatctcgggaccagactcaggagtaattgttcataaggatgctcatagttttctctcagacatttgcatgtttcgctggcatacccaccaaaagggaaaggtcgtctttgggcatatagacggcagtctctccatctttcatccggggaacaaaaaccagaagcacgtgcttcgccccgagagtctagagggaaccgatgaggaggacccggtgacagcgctggaatgggatccgctcagtaccgactacctgctcgtggttaatttgcactacgggatacgtctcgtcgactccgaaagcttgtcatgtatcaccactttcaacctcccctccgctgctgcctctgtccagtgtctggcgtgggtaccctccgctcccgggatgttcattactggcgatagtcaagtcggagtgctcagaatatggaatgtaagcaggaccacaccaatcgataacctcaaactgaaaaagacagggttccactgtttacatgttctgaactcgcccccccgtaagaaatttagcgtgcaatctccgacgaagaaccattacactagctcaacaagcgaggccgtacccccaccaactttgacacagaaccaggcattttctctcccaccaggccatgcagtctgttgttttcttgatggcggagtcggtctctacgacatgggcgccaaaaagtgggatttcctgagggatctggggcatgtagagacaatttttgactgtaagtttaagcccgatgatccaaatctcttggccaccgcatcttttgatgggacaattaaagtgtgggatataaatacattgaccgccgtatatacctcgcctggtaacgagggtgtaatatacagtttgtcctgggcaccaggtggtttaaactgcattgccgggggcacttcacgaaacggggccttcatctggaatgtgcagaaaggtaaaattatccagaggttcaacgagcatggcaccaatgggattttttgtatagcctggagtcataaggatagcaagaggatcgccacttgtagctccgacggcttctgtatcattagaaccatcgatggtaaagtgttgcacaaatataaacaccctgccgccgtgtttggctgcgactggtcacagaacaacaaggatatgattgcaactggctgtgaagacaccaacgtgagagtgtattacgttgcaacctcctccgatcagcctctgaaagtgttcagtgggcacaccgcaaaagtgttccacgtcaaatggagccctttgcgtgaaggaattctgtgcagcggatcggacgatggaacggtgagaatatgggactatacgcaggatgcctgcattaacatactcaacggtcacactgcgcctgttcgcgggctgatgtggaacacagaaatcccctacctgttgatctctggctcctgggattatacgatcaaggtgtgggacacccgggaaggtacatgtgtcgacaccgtctacgatcacggtgccgatgtgtacggattgacctgccacccaagccgccccttcactatggctagttgtagtcgggactcaacagtgagactgtggtctctcacagctctggtgacacctgttcagattaatatactcgccgataggagctgggaggagatcataggtaacaccgactacgcaattgaacctggaacgccgccactactgtgtgggaaagtgtcacgcgatattagacaagaaatcgaaaagctgacggcgaactcccaggttaagaagttaagatggttttcagaatgcctctcacctcctggagggtctgataacctctggaacctcgttgcggtaattaagggacaggatgactctcttctccctcagaattactgtaaaggtatcatgcatctcaaacacctgattaaattcagaacatcagaggcccaggagttaacgactgtaaaaatgagcaagttcggaggcggtataggcgtgccggccaaggaggaaaggttaaaagaggccgccgaaattcacctccgactgggtcagattcagaggtactgcgaactgatggtggagctcggggagtgggacaaagccctttcaatagccccaggcgtgtcagtgaagtattggaaaaaactgatgcagagacgcgccgaccagctcattcaggaggataaagatgacgtcatcccatactgtattgcgattggcgacgtaaaaaaactggtgcactttttcatgagcagaggacaactgaaagaagccctgctggtggcacaggctgcgtgtgaaggcaacatgcagcctctccatgtgtcagtgcccaaaggagcctcctacagcgacgacatatataaagaggactttaacgaattactgcacaaggtcagcaaggaactagccgaatggtattttcaagatggtcgcgccgttcttgctgcatgttgccatctggccattgacaacatcgagctcgcaatggcctatctcataagaggaaacgaattagagctggccgtgtgtgtggggactgtgctcggggagagcgccgcccctgctactcactatgctctggaactgctggctcgcaagtgtatgatgatttccgtgtgcttcccttgcgtgggatactctgtccctttttgctacgttaataggaacctggcggccgatcttcttttaatgatccccgacaatgaattgcatctgatcaagctgtgcgcattctatcctggttgcactgaggagattaatgacctgcatgataaatgtaagctccctaccgttgaagagtgcatgcagctcgccgagaccgccagggctgacgacaatatattcgagaccgtaaaatactacctcctgtctcaggagcccgaaaaggcactgcctataggcattagctttgtgaaagaatacatttctagcagtgactggaccctggacaccatctaccccgtgcttgatctcttatcctacatccgaaccgaaaaactgctgctgcacacgtgtaccgaggccagaaatgaactgctcatcctttgcggctatataggcgcactgctcgctatccggcgccagtatcagtccattgtgccagcactgtacgaatacaccagtcaactgctgaaaaggcgggaagtgagtgtgcccctgaagatcgaatacttgtctgaggagctcgacgcatggagagcctgcacccagagcacgaatcggtcactggaggattctccgtatacccctccaagcgacagccaaaggatgatctatgcgacgttgctgaagagactgaaggaagaatctctaaagggaatcattggtcccgattatgtgaccggcagcaacctcccttcacattccgatatccacatttcctgtctgactgggcttaagatccaaggccccgtatttttcttggaagatgggaaatcagccatttcactcaacgacgccctaatgtgggcaaaggtgaatccattctcccccttgggtactggaatcaggcttaatccattctag

SEQ ID NO: 247204 - DNA, 393 bp, Artificial Sequence
  derived and/or modified sequence
atgagccaggtgcggcaggtgggcctgctggccgccggctgccagccctggaacaaagacgtttgcgccgccagcggggatcggtttgcttattgtgccaccctagctatttacatttaccagctcgatcatcgctataacgaattcaagctgcacgcaatcatgtcggagcataaaaagaccattactgccatttcctggtgtcctcacaaccctgatctattcgctagcggcagtaccgacaacctcgtgatcatttggaacgtggcagagcagaaagtaattgcaaaactggaccgcgcacggcctcccagccctaaaatcatatatattaagataattaacataattgaagaaaacattcataattcagaaatgcaatggatcatctag

SEQ ID NO: 247205 - DNA, 3897 bp, Artificial Sequence
  derived and/or modified sequence
atgagccaggtgcggcaggtgggcctgctggccgccggctgccagccctggaataaagacgtatgtgccgcgagtggagacagatttgcatactgtgcaacattggctatctacatctatcagctcgaccatcggtacaatgagtttaaattgcacgcgatcatgagtgagcataaaaaaacgataactgccatatcctggtgtccacacaatccagacttgtttgcctcaggtagcactgacaatcttgtgatcatttggaatgtggcagaacaaaaagtgattgccaagctggattctaccaaagggattccagcaagcctctcctggtgttggaacgctgaagatgtggtggcctttgtgtcacataggggcccgttatttatttggaccatttcgggccccgacagcggtgttatagtccataaggatgcccacagcttcttgtccgacatctgtatgtttcgctggcacactcaccaaaagggcaaggtggtgttcggtcacattgatggtagcctgtcaatcttccaccccggaaataaaaatcagaagcatgttcttcggcctgagtccctcgaggggaccgacgaggaggacccagtgaccgcacttgaatgggaccccctttccaccgattatctactggtggtgaatctgcactatggaattagactggtggactccgagtcactaagttgtattacaacgtttaatctcccatccgcagccgcaagcgttcagtgtttggcctgggtgccttccgcgcccgggatgtttattacgggagactcccaggttggagtattacggatatggaatgtctcaaggacaacccccatcgataacctgaagcttaaaaaaactgggttccactgtttgcacgtgctcaattcaccaccacggaaaaaattctccgtgcagtccccaacaaagaaccattatacttcaagcacttccgaagcggtcccccctcccactctaacccagaaccaagcattcagcctgccccctggacatgcagtctgctgtttcctggatggaggtgtgggcttgtacgatatgggagcaaagaaatgggatttcctgagggacctgggccacgtggaaactattttcgactgtaaattcaaacccgatgacccaaatctcctggccaccgcctcgtttgacggcactattaaggtgtgggatatcaatacattgacagcagtgtacacgtctccagggaacgaaggagttatttatagtctttcttgggcccccggggggcttaattgcatcgcgggcggaacaagcaggaacggtgcattcatatggaacgtgcagaaaggaaaaatcatacaacgctttaacgaacatggcactaatgggatcttttgtatagcgtggtcccataaagactcaaaacggatagccacctgttcctcagatggtttctgtataatcaggactatcgatggcaaagtcctgcacaagtacaaacatccggcagctgtgtttggatgtgactggtcacaaaacaacaaggatatgattgccactggctgcgaagacacaaatgtgagggtctattacgtcgcaacttctagcgaccagcccctgaaagtattttcggggcataccgctaaagtgtttcacgtgaaatggtcccctctgagagaagggattctgtgtagtggatccgacgacggcactgtccggatttgggactacacccaagatgcatgtatcaacatacttaacgggcataccgcacccgtacgaggcctcatgtggaacactgagatcccttacttgctgattagcggttcctgggattacaccattaaggtgtgggatacacgagagggcacatgcgttgacactgtgtatgaccacggcgccgacgtttatggtttaacttgtcatccatcccgtccattcaccatggcttcgtgtagccgagacagcacagtaaggctgtggagtttgaccgctttagtcactcccgtgcagataaacatcctggccgatcggagctgggaagagataattggcaatactgactacgcaatcgagccagggaccccgccattactgtgcgggaaggtttcaagggacatccgccaggagatcgaaaagctgactgctaatagccaggtcaagaagctgaggtggttctcggagtgtctttccccccctggaggatcggacaacttatggaacctcgtggccgtgatcaagggccaggacgattccttgctgccccagaactactgtaaaggcatcatgcacctgaagcatctgatcaaattccgtacctccgaggctcaggagttaaccaccgttaaaatgtcaaagtttggaggaggcattggcgttcccgccaaggaggagagacttaaggaggctgccgaaatccacctgaggctcggtcagattcaacgctactgcgagctgatggtcgagctcggggagtgggataaggcacttagcattgcacccggggtgtctgttaagtattggaaaaagctcatgcagcgacgggccgatcaacttatccaagaagataaggatgacgttataccttactgcattgccatcggcgacgtgaagaagctcgtacatttctttatgagccggggccagctcaaagaggccctgctagtggcacaagcggcctgcgaaggtaacatgcagccactgcatgtgtccgtccccaaaggagcgagttacagcgatgacatctacaaagaggatttcaacgaacttctgcacaaggtgagcaaggagctggccgagtggtatttccaggatggccgtgccgtgctcgccgcctgctgccaccttgcaatcgataacatcgagctcgcaatggcgtatctgatccgcgggaatgaactcgaactcgctgtttgtgtaggaaccgtactgggagagtctgcagcgccagcgacacattacgccctggagttgttggccaggaagtgcatgatgattagtgtctgcttcccttgtgtgggatatagcgtgcccttttgctatgtgaatcggaacttagcagcagatctattactaatgatcccggacaacgagctgcacttgattaagttgtgtgctttttacccaggttgtacagaggagattaatgatcttcatgacaagtgtaagctgccaaccgtcgaggagtgtatgcaattggccgagaccgcccgtgcagatgacaatattttcgagactgtcaaatattacttgttaagccaggaacccgaaaaggcactgcccataggtattagtttcgttaaggaatacattagctccagcgactggacactcgataccatttacccagtgctagacctcctaagttacatcagaactgagaagttgctactgcacacttgcaccgaggccaggaacgagctgctaatcttgtgcggatacatcggagccttgctcgcgattcggcgccagtaccaaagtatcgtgcccgccttgtatgagtatactagtcaactactgaagcggagggaggtgtccgtgcctctcaaaatcgaatatctgagtgaggagttggatgcctggcgagcttgtactcaaagcaccaatcgatccttggaagattcaccttacacccctccctccgacagtcagaggatgatatacgcaacgctgctcaagcgtcttaaggaagaatctctgaaaggcattatagggccagactatgtgacaggaagcaacctgccaagccatagtgacattcacattagttgcttgacagggctgaagattcaggggccagtgttttttctggaggacggtaagagcgccatcagtctgaatgatgcactgatgtgggccaaggttaacccgttctccccactgggtactggcatccgcttaaatcctttctag

SEQ ID NO: 247206 - DNA, 3969 bp, Artificial Sequence
  derived and/or modified sequence
atggcttggatgacatacatctctaactggtttgagcaagacgactggtatgaaggcctccagagagctaatatgagccaggtcagacaagtgggcctcctcgccgcaggctgtcagccttggaataaggacgtgtgcgctgcaagcggagacagatttgcgtactgtgcaaccttagctatctacatctaccagctggatcatcgatataacgagttcaaactgcatgcaatcatgagtgaacacaagaagaccattaccgccatcagttggtgcccacataatcctgatctctttgcatcagggtcaaccgacaatcttgtcataatctggaatgtcgccgagcaaaaggtcatcgccaaactagattcaaccaaaggaatccctgcctccttaagttggtgttggaacgcggaggacgtggtggcctttgtgtcgcatcggggtcctcttttcatttggaccatctctggccctgattcaggggtgattgtacataaggatgcacacagtttcttgagtgatatatgtatgttccgatggcacacgcaccagaagggaaaagtggtctttggccatatcgatggcagcctctccattttccaccctgggaataagaatcagaaacatgttctgcgaccggagtcgctggagggcactgatgaagaagatcctgtcaccgctctggagtgggacccactcagtaccgattatcttctggtcgtgaatttgcattacggcatcaggctcgtggacagtgagagcctgtcctgtattaccacctttaacctccctagcgcggctgcctcagttcagtgtttggcttgggtgcctagcgctccaggtatgttcatcaccggcgactcccaggtcggagtcttaagaatatggaatgtatctcggactacaccgatagataacctgaagcttaagaaaaccggctttcattgcctccacgtgttaaactcacctccacgcaaaaaattctcagtgcagtcacccacaaagaaccattatactagctctactagcgaggccgtcccaccgcctactctgacccaaaatcaggctttcagcttgcctcctggccatgcagtgtgttgcttcctggatggtggcgtggggctctatgacatgggggctaaaaaatgggactttctgagagacctggggcatgtcgaaacaattttcgattgcaagttcaagccagatgacccaaacttgcttgctacagctagttttgatggcaccataaaagtctgggatatcaacactctgaccgctgtttacacttcccctggcaacgaaggcgtcatctactcattatcctgggcaccgggaggccttaactgcattgccggaggcaccagtaggaatggtgcatttatctggaatgtgcaaaagggtaaaatcatccagcggttcaacgagcacgggaccaacggaatcttctgtattgcctggagtcacaaagatagcaagaggatcgccacttgttcctcggatggattctgcattatacgcactatcgacggcaaagtactgcataaatataaacatcccgctgcagtgtttggttgcgactggtcccagaacaataaggacatgattgccactgggtgcgaagacactaatgtgagagtttattacgtcgccacaagtagtgatcagcctcttaaagttttttctggccatacagccaaagtgttccacgtcaagtggtctcctctgcgcgagggaattctctgtagcgggagcgacgatggtactgtgaggatttgggactatacacaagatgcgtgcatcaatatcctgaacggccataccgcgcctgttcgcggtttgatgtggaacacagagattccgtacctgctgatctcgggcagttgggattataccattaaggtgtgggatactcgggagggtacatgtgttgacacagtgtacgatcacggagctgacgtgtatgggttgacttgccaccccagtagacccttcaccatggcaagctgctcacgcgactctacagtcagactctggagtttaactgccctggttaccccggtccagattaacatcctcgccgatcgctcatgggaggagattattggaaatacagattacgcaattgagcctggtacacctcccttactctgcggtaaagtgtctcgcgacatcaggcaggagatcgagaagctgacggccaattctcaagtaaaaaagctacgctggttctccgagtgcttatctcctcccggaggatctgataacctttggaatctggtggcggtcataaagggtcaagacgattctttactgccacagaattattgcaaaggcatcatgcatctcaagcacctgattaagttcagaacctctgaggcccaagagttaaccactgttaagatgagcaaattcggagggggtatcggcgtgccagctaaagaagagagacttaaggaagctgccgaaattcacctccgcttaggccagattcagcggtactgtgaactcatggtggagctgggtgagtgggataaggcactttccattgctccaggagtttccgtgaaatactggaagaagctcatgcagagaagggccgatcagctgattcaggaagataaggacgacgtcataccttactgcatcgccattggggatgttaagaagcttgtgcatttcttcatgtcgaggggtcaactgaaagaagctctgttggtggcacaagccgcttgtgaagggaacatgcagcccctccacgtatctgtgcccaaaggcgcttcttactctgacgacatttacaaagaagactttaacgagctcctgcataaggttagtaaggagctcgccgagtggtactttcaggacggtcgagcagtgttggctgcctgctgccacctggccatcgacaacatcgaattggcaatggcctatctgatcaggggcaacgagctcgagctggctgtgtgcgtaggtaccgttcttggggagagcgcagcccctgctacccactatgctctggaactgttggctcgaaagtgtatgatgatcagtgtatgtttcccatgtgtaggctactcagtgcctttctgctatgtgaaccgaaatctggctgctgacttgctactaatgattccagacaatgagttgcatctcataaagctatgtgcgttttatccgggttgcacagaagaaatcaacgatttgcacgataagtgcaagctgccaactgttgaggagtgcatgcagctggccgaaaccgcacgtgccgatgacaacatttttgagacagtcaagtattatctgctgtctcaggaacctgagaaggcactacctatcggcatctccttcgtgaaggagtacatatccagctcagactggactttggacacaatttacccggtcctcgatctcctgagttatatcaggacagaaaagctgctccttcacacctgtaccgaagctagaaatgagttgctaatcctctgtggctacattggagccctgctcgcgattagacgccagtaccaatccattgtgccagccctgtacgaatacacatcccagctgctcaaaaggagagaggtcagtgtgcccctgaagatcgagtatctcagcgaggagctggacgcatggagagcatgcacccagtcgactaaccgcagcctggaggacagtccctatacgcccccaagcgatagccagagaatgatttacgcaacactgctcaaaaggcttaaggaggaatcgctcaaaggaataatcggccctgattatgtaacgggctcaaacttgccatcgcattccgacatccacatatcctgtcttaccggactgaaaatacagggtcccgtcttcttcctagaggacggaaaatccgccattagcctaaacgacgctcttatgtgggccaaagtcaaccctttttcccctctcgggacagggatccgactgaacccattctag

SEQ ID NO: 247207 - DNA, 393 bp, Artificial Sequence
  derived and/or modified sequence
atgtcccaggtccgtcaggtcgggttgctcgctgccggatgtcagccatggaacaaggatgtgtgcgctgcttcgggagacagatttgcatactgcgccacactcgcgatctatatctatcagctggaccaccgatataacgagtttaaactccacgcgattatgagtgaacataagaagactatcaccgctatctcttggtgccctcacaaccccgacctcttcgcgagcggctctaccgataatctggtgatcatttggaatgtagcggaacaaaaggtgatcgcgaagctggatagggccaggcccccttccccaaaaataatctacattaagatcatcaatattatcgaagaaaacatccataatagtgaaatgcagtggatcatctag

SEQ ID NO: 247208 - DNA, 3897 bp, Artificial Sequence
  derived and/or modified sequence
atgagccaggtgcgacaggtaggcctgctggccgcaggatgtcagccatggaataaggacgtgtgtgccgcatcaggcgaccgattcgcttactgcgcaacccttgctatctacatttatcagttggaccacagatataatgaattcaaattgcatgccatcatgtccgaacacaagaaaacaatcaccgccatctcgtggtgtccccacaatccagatctgtttgccagtggctccactgacaacctagtgataatatggaatgtggctgagcagaaggtgattgcgaagctggactcaaccaagggaatccctgcgtcgttgagttggtgctggaatgctgaggatgtggtggcatttgtgagtcaccggggaccactgttcatctggacgatctcaggacctgattccggtgtcatcgttcacaaagatgcccactcatttctgagcgacatttgtatgttcagatggcatactcaccagaaaggcaaggtggtattcggccacatcgatggctccttgagtatttttcacccaggcaacaaaaaccagaagcacgtcttaaggcctgagtcactagagggaacggacgaggaagatcccgtcaccgccctcgaatgggatcctctgtctactgactatctgcttgtggtgaacctccactatggaattagattggtggactccgagtctctgtcttgcatcacaaccttcaacctgccaagcgcagccgctagtgtccagtgtttggcctgggtcccttctgctcccggaatgtttatcaccggcgattcccaggtgggtgtgttgcgaatctggaatgtcagtagaactactccaatagacaacctcaagctcaagaaaacaggcttccactgcttgcacgtgctgaacagtcccccacgaaaaaaattctccgtgcagtctccgaccaagaaccactacacctcatctacctccgaagccgtgccacctcctacccttactcagaaccaggcattttctttgcctcccggtcatgcagtgtgctgttttctagatggcggtgtgggattgtatgatatgggagctaaaaaatgggacttcctaagggacctgggccatgtggaaaccattttcgactgtaaatttaaaccagatgaccccaaccttttagccacagcttcattcgacggcaccatcaaggtgtgggatatcaacactttgaccgccgtatacacctctcctggcaacgagggggtgatttacagcttgagctgggcaccgggaggcctgaactgcattgcaggcggtactagtcgcaatggtgcttttatctggaatgtgcagaaggggaaaatcatccaaaggtttaatgagcacggaaccaatggcatcttttgcattgcttggtctcataaggactccaaacggattgcaacctgctcttctgatggtttctgcatcatcagaacgatagacggaaaagtcttacataagtacaaacatcccgcagcagtttttgggtgtgactggagtcagaacaacaaggacatgattgcaaccggatgcgaagatacaaatgtccgagtgtattatgtggctacctcatcggaccaaccgctcaaagtgttcagcggccacaccgcaaaagtgtttcacgtgaagtggtctcccctgcgggaaggtattctgtgttcaggctcggacgatggtaccgtgcggatctgggattatacgcaagatgcatgcattaacattctgaacggtcacaccgcgccagtgcggggactgatgtggaacacagaaataccgtatctgctcatctcaggcagctgggattacactattaaagtctgggatactcgtgagggcacctgcgtcgatacagtctatgaccatggggcagatgtttatggtctcacctgccatccatcaagacccttcaccatggcttcatgctccagggactctactgtgcgcttgtggtcactgaccgccctggtgaccccggtccagattaacatcctggcggatcgatcttgggaagaaatcattggcaacaccgactacgccatcgaaccgggtacgccacccctcctctgcgggaaggtaagccgtgatatcagacaggaaatcgagaaactgactgctaattcccaggtgaagaagttgcggtggtttagtgagtgcctgagtccaccaggcggatcagacaatttatggaacctggttgcagtcattaagggacaggatgactccctgttaccccagaactattgcaaagggattatgcatctcaagcaccttatcaaattcagaacgagcgaggctcaagagctgactacggtgaagatgagtaagttcggcggaggtataggcgtaccggctaaagaagagaggttgaaggaggccgctgagatccatctgcggttgggccaaatccagaggtattgtgagctcatggtggaactcggggagtgggacaaggccttgtccattgcgccaggtgtctctgtgaagtattggaagaagctgatgcagcgacgtgctgaccaactgatccaagaagacaaggacgacgtgatcccatattgcatagcaataggcgacgttaagaaactggtgcactttttcatgagcagggggcagttaaaggaggccctcctcgtcgctcaggccgcttgcgagggcaacatgcagccattgcatgtgagcgtgcccaagggtgccagctattccgatgacatttacaaggaagatttcaacgagctgctccataaggtgtcaaaggaactggctgagtggtattttcaagacggcagagcggtcttggccgcatgctgtcatctcgcaatcgacaacattgaactagccatggcatacttgatccgcggaaatgaactggagcttgccgtttgcgtgggcaccgttttgggtgaaagcgcagcgccagctacacattacgccctggagttactcgccagaaagtgtatgatgatttcagtttgcttcccctgtgtgggatattccgtgccattttgttatgttaaccgaaacctggctgccgatctcctcctgatgatccctgataacgagctgcacctgattaagctgtgtgccttctatcccggttgcactgaggaaatcaatgacctgcacgacaagtgcaagctgcctacagtggaggaatgcatgcagctggccgaaacagctcgggctgatgataatatcttcgagacagtgaaatattacctcctgagccaggagcctgaaaaagccctccccatcggcatctccttcgtgaaggaatacatcagcagtagtgactggactctggataccatttatcctgtgctggatttgcttagctacatccgtaccgagaagttgctgttgcacacatgtactgaggcacggaatgaactgctcatcctgtgcggttatataggtgctctgctcgccatccgacgccagtaccagtctatagtccctgcactgtacgagtacaccagccaactcctaaaacgccgagaggtgagtgtgcctttaaagatagaatacctttccgaagaattggacgcttggagggcctgtactcagtcaacaaacaggagcctggaagactctccatataccccaccaagcgactcccaacgtatgatttatgctacattactgaaacgcctgaaagaggaaagtttaaagggcatcatcggacccgattacgtaacaggctccaatcttccatctcacagcgatatacatataagctgtctgacgggattgaaaatacaaggcccagtgttcttcctcgaagatgggaagagcgcaatctctcttaatgatgctctgatgtgggcaaaggttaaccccttttcccctctgggcacaggtatcagactaaatccattctag

SEQ ID NO: 247209 - DNA, 4705 bp, Artificial Sequence
  derived and/or modified sequence
gcggggagggtccgcgcgttggtggtgctcgcctcgcagctgcgcccgccggcttcagcaccttccgctgtccgccgctgcagccgcctcctcctccaggtgctgactattctgatgccgagtttccaattgccttgattaaagtagaaacattctatggcttggatgacttacatttcaaattggtttgagcaagatgattggtatgaaggactacaaagagcaaacatgtcccaggtaaggcaagtgggattgctggctgctggatgtcagccatggaacaaggatgtatgtgctgccagtggagacaggtttgcatattgtgcgaccctggctatctatatttatcagttggatcaccgttataatgaattcaaacttcacgcaattatgtctgaacataaaaaaacaatcacagcaatttcttggtgtccacataatcctgatctgtttgcaagtggcagtactgataatttagtgatcatttggaatgttgcagaacaaaaagtcattgctaaactcgacagtacaaaagggatccctgcttctcttagttggtgctggaatgcagaggatgtggtggcatttgtttcccacagaggcccactgttcatttggaccatctcaggaccagatagtggagtgattgtacacaaagatgctcatagcttcttgtctgatatctgtatgttcagatggcatacacaccaaaaggggaaagttgtgtttggtcatattgatggaagtctatcaatttttcatccaggtaataaaaatcagaaacatgttttgagaccagaatctcttgaagggacagatgaagaggatccagttacggccttggaatgggacccactatctactgattatcttctagtggttaatttgcattatggaattcgcctggtagattctgaatcactttcttgcataacaacatttaatcttcccagtgcagcagcttctgtacagtgcttagcctgggttcccagtgctcctgggatgtttataactggagattctcaagtgggtgttttacgcatttggaatgtttcaagaacaacacctattgataatcttaaattaaagaaaacaggatttcactgcttacatgtacttaattctcctccaagaaaaaagttttcagtccaatctccaaccaaaaatcattatacatcctcaacaagcgaagcagttccacccccaactttaacacagaatcaagcattttctcttcctcctggtcatgcagtgtgttgtttcttggatggtggagttggactttatgatatgggagctaagaagtgggattttcttagagacttgggacatgtggaaactatctttgactgcaaattcaaacctgacgatcctaatcttttagcaacagcttcatttgatggcactataaaagtctgggatataaacacattaacagcagtgtacacatccccgggtaatgaaggtgttatttattccctttcttgggctccaggtggtttaaattgtattgctgggggaacttcccgaaatggtgcttttatttggaatgttcaaaagggcaaaattatacaacgatttaatgagcatggaacaaatggaatattctgcattgcctggagtcataaagattctaaaagaatagcaacctgcagcagtgatggtttctgtattattcgaacaattgatggtaaagtgctacacaaatataaacatccagctgcagtgtttggttgtgattggagccaaaacaataaagacatgatagccactggctgtgaagacacaaatgttcgtgtttattatgtagccaccagctcagatcaaccattgaaagtatttagtgggcatacagcaaaagtgtttcatgttaaatggtctcctctgagagagggaattctttgcagtggttctgatgatggtaccgttcgaatctgggattatactcaggatgcttgcatcaatattcttaatggacacactgcacctgtgagaggattaatgtggaatactgagattccatatctgctcatatctggcagctgggactatactataaaagtatgggacactcgagaaggaacttgtgtggatactgtgtatgatcacggtgcagatgtatatggtttaacctgccatcccagtcgccccttcactatggcctcttgctcccgtgactctacagtgagactctggtcattaacagccttagtcactcctgtacaaataaatattctggcagacagatcttgggaagaaattattgggaacactgattatgctatagaaccaggcactcctcctctactgtgtggtaaagtgtcaagagatattagacaggaaatagaaaaactaactgctaattctcaagtgaaaaaactaagatggttctcagaatgtttatctcctccaggtggcagtgacaatttatggaacttggttgctgtgataaaaggacaggatgatagcttacttcctcagaactactgcaaaggaataatgcacttgaaacatctgattaaatttagaacatctgaagctcaagaactaacaacagtcaagatgtctaaatttggtggtggtattggtgtacctgctaaagaggaaagactgaaggaagctgctgaaatccacttgagattaggacaaattcagagatactgtgaacttatggttgaacttggagagtgggacaaagccctgtcaattgcaccaggagtctctgtgaaatactggaagaagttaatgcagaggagagctgaccaattaatccaggaagataaggatgatgtcattccatactgcatagccattggtgatgtgaaaaagctagtccattttttcatgtcaagaggtcagcttaaagaagctctgcttgttgcacaggctgcttgtgaaggaaatatgcagcccttacatgtttccgtgcctaaaggagcttcatattctgatgatatctacaaggaagactttaatgaactcctgcacaaagtcagtaaagaactggcagaatggtattttcaagatggtcgagcagtactagccgcatgttgccatcttgccatagataatattgagcttgctatggcatacctgattcgcggaaatgaactggagttggcagtctgtgtgggcacagtactaggagagtctgcagcaccagcaacccactatgccttagaattactggcgagaaagtgcatgatgatttcagtatgctttccatgtgttggatacagtgtccccttttgttacgttaacaggaatttggcagctgatcttcttctgatgattcctgataatgaactacatttaataaaactctgtgctttctacccaggatgtactgaagagataaatgaccttcatgataagtgtaagctacccacagtggaagaatgtatgcagttagctgagacagcccgtgcagatgacaatatatttgaaactgtaaaatattacttgttaagtcaagaacctgaaaaagcccttcctattggtattagctttgttaaagaatacatcagtagctcagactggactttggataccatataccctgttcttgacctactgagctatattcgtactgaaaaattactcttgcatacgtgtactgaagctcgaaatgagttgctgatattatgtggttacattggtgcattactggctatcagaagacagtaccaaagcattgttccagcactttatgagtacacaagtcagctattaaaacgtcgggaggtgtcagtacctttaaaaattgaatatctttctgaggaattggatgcatggagagcttgcacacagtccaccaacagatcattagaagactctccgtatacacccccttctgattcacaaagaatgatttatgcaactttattaaagagactaaaagaagagtcactgaaaggaattattggaccagattatgtgactggatcaaatcttccaagtcattctgatattcacatttcttgtcttacgggattaaaaatccagggccctgtgtttttccttgaagacgggaaatctgctatctccttgaatgatgctttgatgtgggcaaaggtgaatccattctcacctttagggactggaatacgactcaatccattctgatagaagatttttgtccatgcttgatttttttttttaaagaaaaactttcatgggttagcattaccttaatctttgttgctcaagtgccagaggttgggagaaggattgcaggttgggagaggtgggaaatagcagtgaattttagtcattaacttcaaaatatatatatatatataatttaaaggaaaaataggtgcctcctttataaacagtaatagctacgtttgggaaggaggaaacatttaaattataaaggactgaataatctaaaaagcatataaaagtttcacacagcataaaagataccaaaatatcatatggttgaaatattgaaacatattaaattgtgcaacacctagaatagtgctagacatacagtaagtacttaatggatatttgaatgattgaatatcttgaaatgttgaaatgtaaggtgtgcacagtgatcttcaacttaacaaacacttacgttctcctttataaaatgcatagtaaaccactaacgttagctgttttaataaaagttttcagttataagtttagtaaatattaataaatggatacacattcaaaatacttt

SEQ ID NO: 247210 - DNA, 7397 bp, Artificial Sequence
  derived and/or modified sequence
gcctctggggcagaccctggagatcgggctcgcggcgccttccatcgtggctccgcgctggggcttgcggagcacgcttcccgcccctcggagcccgcgggcccggccgccccgcccccgggcgccctgagcgagcaggcggggagggcggggagggtccgcgcgttggtggtgctcgcctcgcagctgcgcccgccggcttcagcaccttccgctgtccgccgctgcagccgcctcctcctccaggcaaacatgtcccaggtaaggcaagtgggattgctggctgctggatgtcagccatggaacaaggatgtatgtgctgccagtggagacaggtttgcatattgtgcgaccctggctatctatatttatcagttggatcaccgttataatgaattcaaacttcacgcaattatgtctgaacataaaaaaacaatcacagcaatttcttggtgtccacataatcctgatctgtttgcaagtggcagtactgataatttagtgatcatttggaatgttgcagaacaaaaagtcattgctaaactcgacagtacaaaagggatccctgcttctcttagttggtgctggaatgcagaggatgtggtggcatttgtttcccacagaggcccactgttcatttggaccatctcaggaccagatagtggagtgattgtacacaaagatgctcatagcttcttgtctgatatctgtatgttcagatggcatacacaccaaaaggggaaagttgtgtttggtcatattgatggaagtctatcaatttttcatccaggtaataaaaatcagaaacatgttttgagaccagaatctcttgaagggacagatgaagaggatccagttacggccttggaatgggacccactatctactgattatcttctagtggttaatttgcattatggaattcgcctggtagattctgaatcactttcttgcataacaacatttaatcttcccagtgcagcagcttctgtacagtgcttagcctgggttcccagtgctcctgggatgtttataactggagattctcaagtgggtgttttacgcatttggaatgtttcaagaacaacacctattgataatcttaaattaaagaaaacaggatttcactgcttacatgtacttaattctcctccaagaaaaaagttttcagtccaatctccaaccaaaaatcattatacatcctcaacaagcgaagcagttccacccccaactttaacacagaatcaagcattttctcttcctcctggtcatgcagtgtgttgtttcttggatggtggagttggactttatgatatgggagctaagaagtgggattttcttagagacttgggacatgtggaaactatctttgactgcaaattcaaacctgacgatcctaatcttttagcaacagcttcatttgatggcactataaaagtctgggatataaacacattaacagcagtgtacacatccccgggtaatgaaggtgttatttattccctttcttgggctccaggtggtttaaattgtattgctgggggaacttcccgaaatggtgcttttatttggaatgttcaaaagggcaaaattatacaacgatttaatgagcatggaacaaatggaatattctgcattgcctggagtcataaagattctaaaagaatagcaacctgcagcagtgatggtttctgtattattcgaacaattgatggtaaagtgctacacaaatataaacatccagctgcagtgtttggttgtgattggagccaaaacaataaagacatgatagccactggctgtgaagacacaaatgttcgtgtttattatgtagccaccagctcagatcaaccattgaaagtatttagtgggcatacagcaaaagtgtttcatgttaaatggtctcctctgagagagggaattctttgcagtggttctgatgatggtaccgttcgaatctgggattatactcaggatgcttgcatcaatattcttaatggacacactgcacctgtgagaggattaatgtggaatactgagattccatatctgctcatatctggcagctgggactatactataaaagtatgggacactcgagaaggaacttgtgtggatactgtgtatgatcacggtgcagatgtatatggtttaacctgccatcccagtcgccccttcactatggcctcttgctcccgtgactctacagtgagactctggtcattaacagccttagtcactcctgtacaaataaatattctggcagacagatcttgggaagaaattattgggaacactgattatgctatagaaccaggcactcctcctctactgtgtggtaaagtgtcaagagatattagacaggaaatagaaaaactaactgctaattctcaagtgaaaaaactaagatggttctcagaatgtttatctcctccaggtggcagtgacaatttatggaacttggttgctgtgataaaaggacaggatgatagcttacttcctcagaactactgcaaaggaataatgcacttgaaacatctgattaaatttagaacatctgaagctcaagaactaacaacagtcaagatgtctaaatttggtggtggtattggtgtacctgctaaagaggaaagactgaaggaagctgctgaaatccacttgagattaggacaaattcagagatactgtgaacttatggttgaacttggagagtgggacaaagccctgtcaattgcaccaggagtctctgtgaaatactggaagaagttaatgcagaggagagctgaccaattaatccaggaagataaggatgatgtcattccatactgcatagccattggtgatgtgaaaaagctagtccattttttcatgtcaagaggtcagcttaaagaagctctgcttgttgcacaggctgcttgtgaaggaaatatgcagcccttacatgtttccgtgcctaaaggagcttcatattctgatgatatctacaaggaagactttaatgaactcctgcacaaagtcagtaaagaactggcagaatggtattttcaagatggtcgagcagtactagccgcatgttgccatcttgccatagataatattgagcttgctatggcatacctgattcgcggaaatgaactggagttggcagtctgtgtgggcacagtactaggagagtctgcagcaccagcaacccactatgccttagaattactggcgagaaagtgcatgatgatttcagtatgctttccatgtgttggatacagtgtccccttttgttacgttaacaggaatttggcagctgatcttcttctgatgattcctgataatgaactacatttaataaaactctgtgctttctacccaggatgtactgaagagataaatgaccttcatgataagtgtaagctacccacagtggaagaatgtatgcagttagctgagacagcccgtgcagatgacaatatatttgaaactgtaaaatattacttgttaagtcaagaacctgaaaaagcccttcctattggtattagctttgttaaagaatacatcagtagctcagactggactttggataccatataccctgttcttgacctactgagctatattcgtactgaaaaattactcttgcatacgtgtactgaagctcgaaatgagttgctgatattatgtggttacattggtgcattactggctatcagaagacagtaccaaagcattgttccagcactttatgagtacacaagtcagctattaaaacgtcgggaggtgtcagtacctttaaaaattgaatatctttctgaggaattggatgcatggagagcttgcacacagtccaccaacagatcattagaagactctccgtatacacccccttctgattcacaaagaatgatttatgcaactttattaaagagactaaaagaagagtcactgaaaggaattattggaccagattatgtgactggatcaaatcttccaagtcattctgatattcacatttcttgtcttacgggattaaaaatccagggccctgtgtttttccttgaagacgggaaatctgctatctccttgaatgatgctttgatgtgggcaaaggtgaatccattctcacctttagggactggaatacgactcaatccattctgatagaagatttttgtccatgcttgatttttttttttaaagaaaaactttcatgggttagcattaccttaatctttgttgctcaagtgccagaggttgggagaaggattgcaggttgggagaggtgggaaatagcagtgaattttagtcattaacttcaaaatatatatatatatataatttaaaggaaaaataggtgcctcctttataaacagtaatagctacgtttgggaaggaggaaacatttaaattataaaggactgaataatctaaaaagcatataaaagtttcacacagcataaaagataccaaaatatcatatggttgaaatattgaaacatattaaattgtgcaacacctagaatagtgctagacatacagtaagtacttaatggatatttgaatgattgaatatcttgaaatgttgaaatgtaaggtgtgcacagtgatcttcaacttaacaaacacttacgttctcctttataaaatgcatagtaaaccactaacgttagctgttttaataaaagttttcagttataagtttagtaaatattaataaatggatacacattcaaaatacttttaaaaaaaagaaaatgttaccagtttttttatctgaagtttaactgtcccattgtaaaggtgtaagttatataggcttgaaaaaaattggcgggtaaaaatcacaaaatgcagtcgaatatatatatgaaaacttgcattaggtgataaagtgactattttaagagattcagcatgcatggatattagttttgattaatgtgtacaataatttacacagtatactctagtcaatttatgttaactttatttaaaacacaatttatttggccgggcacggtggctcacacctgtaatctcagcactttggcaggccaaggcaggtggatcacctgaggtcaggagttcatgaccagcctggccagcatggtaaaaccctgtctccactaaaaatacaaaaattagccaggcatggtggcgggcacctgtaatcccagttacttgggaagctgaggcaggagaatcccttgaacctgggaggcagaggttccagtgagccaagatcgcaccactgcactccagcctgggcaacaaagagcgaaactctgtctcaaaaaacaaaccaacaaaaaccacaattgatttgatgaaaattagttttaagtaaatgtttgtaaatagatattggttgaatttttggatatattatgttgatttaacttttaaaatgttgtttaaaagtgtgaagctatgaaaagcctgataatgtgactacagatatttcagttggactagaattctgactttgaaacttattaaattaatgcatactggaagtactttgatactcaagttgtttcacaagatttataatatagatggttttgtttgactaaagaataatctcatataactagaatacttgtggcttttattatctttaaacttgttgcatttaaaatatttttaaaaccttcttaacaaaacttcttaaaactggaaaaaatatatattatgtatctatgtatcatatttatcacatgaccacttttgattccttaaaaagacattacaggcttaaattccattttattaaaaaaaaaaaattgcctgtaatcccagcacttcaggaggccgagatgggcagatcttgaggtcggtagatggagaccatcctggccaacatggtgaaaccctgtctctactaaaaatacaaaaattagctgggtgtggtggtgtgtacctgtagtcccagctacccaggaagctaaggcaggagaatcgcttgaatccaggaggcggaggttgcagtgagctgagatcgcactactgcactccagcctgggcgacagagcaagaccaccatctccaaaaattatatatataaaaataattaatattatagaagagaatatacacaactcagagatgcaatggataatataaaaagagtacctgagatgtatttttttaaactcttagagatatctgtaactcaaatttttcttaggtgaggaggattattaactggcacatatgtactaaaaacccctcacttaaaaatggcagtctcaatcctactgtcattctttttattttaaaataaataaataagcctatctttttgtgcttacatacttaaaaggatatcattaagtatataaacaatcattacttctgtatttttaatgaatgcaggaaaataatatttttatgtataaaagatgaagaaaaaattttgcaagtctttaagcacataaatacaacagaatagccacccaatttctgtctgaaatctaaattggatggatttgaccatcattctattatctttgatttctacaatgtctatatcttattacctataactattaatttttcatagaattataaatgtcatttgactatgtcaatctgtatatattgtaccttaatatgaaaaacaaattttttaattcataaaagtatttttattagatttcatatgcatgaaacccaagcaaattatatgaatttattttactatttgaaaatgttcatattaccaataatgtggacaaattactttgcaggtttaaatatgcctctgtaaaggaagagtctcattagacaatgatttttaaagcattggaaaaatattttgcctgtaaaagttagtaactaggtggttcacaaaattacaacatcaaaatagttacatcttgtgaaaatatatgatttttatgtcaatcaagacaaatgaaatatatatgtatgtgtatatatatacatgtatgtatgaaatatatatatgtgcgtgtgtgtgtgtatatatatatatatatatatatatttctatgaaattgtccagatgtgttcaggaacatgattgcattagagcaatgactgtattttgttgtccttataacatttatattatttcagttttaagtcaaaaggtattctgaatataataaaagcctcacaaattatttgtaaaatttagtagttcatatttagtatatcagtaatatagaagacatctttatagtcaactcttaattaatgcttattgtaccaaatctttgagatatttgtacataaatgaaatatgtactttcatgctaaaattatatatcatgactgtgctataatttggcatgtcattatctagatttatatgtatgtacgtatttcaggtccttgaaattttaataaatattacagttaaatcctgatatgacatagtt

SEQ ID NO: 247211 - protein, 378 aa, Artificial Sequence
  derived and/or modified sequence
MNNSGADEIGKLFVGGLDWSTTQETLRSYFSQYGEVVDCVIMKDKTTNQSRGFGFVKFKDPNCVGTVLASRPHTLDGRNIDPKPCTPRGMQPERTRPKEGWQKGPRSDNSKSNKIFVGGIPHNCGETELREYFKKFGVVTEVVMIYDAEKQRPRGFGFITFEDEQSVDQAVNMHFHDIMGKKVEVKRAEPRDSKSQAPGQPGASQWGSRVVPNAANGWAGQPPPTWQQGYGPQGMWVPAGQAIGGYGPPPAGRGAPPPPPPFTSYIVSTPPGGFPPPQGFPQGYGAPPQFSFGYGPPPPPPDQFAPPGVPPPPATPGAAPLAFPPPPSQAAPDMSKPPTAQPDFPYGQYGLGSYSPAPPGCGPHFVYSLMVRLSSDVA

SEQ ID NO: 247212 - DNA, 1137 bp, Artificial Sequence
  derived and/or modified sequence
atgaacaacagcggcgccgacgagatcggcaagctgttcgtgggcggcctggactggagcaccacccaggagaccctgagaagctacttcagccagtacggcgaggtggtggactgcgtgatcatgaaggacaagaccaccaaccagagcagaggcttcggcttcgtgaagttcaaggaccccaactgcgtgggcaccgtgctggccagcagaccccacaccctggacggcagaaacatcgaccccaagccctgcacccccagaggcatgcagcccgagagaaccagacccaaggagggctggcagaagggccccagaagcgacaacagcaagagcaacaagatcttcgtgggcggcatcccccacaactgcggcgagaccgagctgagagagtacttcaagaagttcggcgtggtgaccgaggtggtgatgatctacgacgccgagaagcagagacccagaggcttcggcttcatcaccttcgaggacgagcagagcgtggaccaggccgtgaacatgcacttccacgacatcatgggcaagaaggtggaggtgaagagagccgagcccagagacagcaagagccaggcccccggccagcccggcgccagccagtggggcagcagagtggtgcccaacgccgccaacggctgggccggccagcccccccccacctggcagcagggctacggcccccagggcatgtgggtgcccgccggccaggccatcggcggctacggccccccccccgccggcagaggcgccccccccccccccccccccttcaccagctacatcgtgagcaccccccccggcggcttcccccccccccagggcttcccccagggctacggcgcccccccccagttcagcttcggctacggcccccccccccccccccccgaccagttcgccccccccggcgtgccccccccccccgccacccccggcgccgcccccctggccttcccccccccccccagccaggccgcccccgacatgagcaagccccccaccgcccagcccgacttcccctacggccagtacggcctgggcagctacagccccgccccccccggctgcggcccccacttcgtgtacagcctgatggtgagactgagcagcgacgtggcctag

SEQ ID NO: 247213 - DNA, 2274 bp, Artificial Sequence
  derived and/or modified sequence
cgcgcggtgaccgttggcgccgaggggaggaggcagccgccgccgccgccgccgccgccgccgccgccgccgccgccgttgcgcagatccgggccgcggctgtggggagggcgacggagcgggtgaccttccggaggcgggagcgagcgaggaggcccgggagcgccgagcgtcgccgccgccgccgccatgaacaactcgggcgccgacgagatcgggaagctcttcgtgggcggtcttgactggagcacgacccaagagactctgcgcagctacttttcccaatatggagaagtcgtagattgtgttatcatgaaagataaaaccaccaaccagtctcgaggctttgggtttgtcaaatttaaagacccaaactgtgtggggacggtgctggccagcagaccgcacacgctagatggccgaaacatcgaccccaagccatgcacaccccgggggatgcagccggagagaacacggccgaaggaaggatggcagaaaggacccaggagcgataacagtaaatcaaataagatatttgtcggtggaattcctcacaattgtggtgagacagagctcagggaatacttcaagaagttcggagtggtcacggaggtagtcatgatctatgacgccgagaagcagaggccccgaggttttggatttattactttcgaggacgaacaatcagtggaccaggctgtcaacatgcattttcacgacatcatgggcaaaaaagtggaagttaaacgagctgagcctcgggacagcaagagccaagcgccgggacagccaggtgccagccagtgggggagccgggttgtgcccaacgctgccaatggctgggcaggccagcccccgcccacgtggcagcaaggatatggcccgcaaggaatgtgggtgccggcaggacaggcgattggtggctatggaccgccccctgcaggaagaggagcccccccgccacccccaccgttcacctcctacatcgtgtccacccctcctggaggctttccccctccccagggcttccctcagggctacggtgccccgccacagttcagttttggctacgggcctccacctccaccgccagatcagtttgcccctccgggggttcctcctccaccagccactcccggggcagcacctctggctttcccaccgcctccgtctcaggctgccccggacatgagcaagcccccgacagctcagccagacttcccctatggtcagtatggcctgggttcctattctccagccccgccgggctgcggcccacactttgtttacagtcttatggtcaggctgagcagtgatgtggcctagcaggttacgggcaggacttgagtggcttcggacagggcttctcagaccccagccagcagcctccttcctacgggggtccctccgtgccagggtcggggggcccccccgccggcggcagcggctttggacgagggcagaaccacaacgtgcaagggttccacccctaccgacgctagcccgcggcgccgcgacgtctgcacggcccagacccaggattccaaacttgtgaactcgtgacaatcacaaacttggcggcaaagtggcgactcaaccttgggggggggggcggggggagggcgcgaggcttttggagcggctgtgggtgtcgtctggactgaggtttttaaatatttctttctctaacccatcagcacaataaaaaaaagtcactggttcaacaacagggtttaaaaaaaatgtcttcagctttaattcaaaacttcaggtttctttttcttccttttttttggaaattattttcctgagccttttgttttacggtatattgtaaacttttatgttaaagaaaaaatatacatttacaaattgtgagatttttaagagaaattttctacgatgtatactggcttattttttaatttaaaacggggtttccgtcggcactggtggagggggtgcgctgttagtcccctcgctcctggctttgggggttgggacttggtggtccagaaactctgggagcttctagaagaaatctactgagtgtatttctgttttttgtttaattccttgcttttgtcgactgacctgcttggtagtgtctgaggtgaactgtgggggttgcgcacagccagccgcgtggatcccacgcagcgctgaaccgaaccgagtaggaagcctttctccccaggcacgtggcttcagggcgtttcccattgaccagtttgaccctggtttgaataaagagaagtgcgtttggattagaaa

SEQ ID NO: 247214 - DNA, 1137 bp, Artificial Sequence
  derived and/or modified sequence
atgaataacagcggtgcggacgagataggcaaactctttgtgggtggactggattggagtaccactcaggagacactgagatcttacttttcccagtacggggaggtggtggactgcgtcattatgaaagacaagaccacaaaccagtctagaggcttcggattcgtgaaattcaaagaccccaattgcgttggtaccgtcctcgcatcccgcccccacaccttggacggcagaaatatcgaccccaaaccgtgcacccctcgcgggatgcagcccgaacgcacacgacctaaagaaggatggcagaaaggaccacggagcgataatagtaaatcgaataagatcttcgtaggaggaatcccacataactgcggtgaaaccgaacttcgggagtatttcaagaagttcggtgtggtgacggaagtagtcatgatttatgacgcagagaagcagcgaccccgtggtttcgggttcataacctttgaagatgaacaaagcgtggatcaggcggtcaatatgcattttcacgatattatgggcaaaaaggtggaggtgaaacgtgcagagcccagagattccaagtcgcaggcgcctggccaacccggtgcatctcagtggggctcacgggtagtgccgaacgccgccaatggatgggccggccagccgccacctacttggcagcagggctatgggccacagggaatgtgggtccccgccggacaggcaataggcggatacggacccccccccgccggccggggcgcccccccccctccccccccattcacaagctacatagtttccacccctcctggaggatttccgcctcctcagggcttcccacagggttacggtgcgccgcctcaatttagtttcggatatgggccacccccacctcctccagaccaatttgctccgcccggcgtaccacccccacctgcaacgccaggtgctgcacccttggcattccccccaccccctagtcaggccgccccagacatgtctaaaccacctactgcccaacccgacttcccctacggtcagtacgggctggggtcttactcaccagctccccctggatgcggaccccatttcgtctactccctcatggtgcggctgtcctccgatgtcgcatag

SEQ ID NO: 247215 - DNA, 1137 bp, Artificial Sequence
  derived and/or modified sequence
atgaacaacagcggggctgatgaaattggcaagctgtttgtgggcggcctggactggagcaccacccaggagaccctgcggagctacttcagccagtatggagaggtggtggactgtgtgatcatgaaggacaagaccaccaaccagagccggggctttggatttgtgaagttcaaggaccccaactgtgtgggcaccgtgctggccagccggccccacaccctggatggcaggaacatcgaccccaagccctgcaccccccggggcatgcagcctgagaggacccggcccaaggagggctggcagaagggccccaggagtgacaacagcaagagcaacaagatctttgtgggcggcatcccccacaactgtggggagacagagctgcgggagtacttcaagaagtttggagtggtgacagaggtggtgatgatctatgatgctgagaagcagaggccccggggcttcggcttcatcacctttgaagatgagcagagcgtggaccaggccgtgaacatgcacttccatgacatcatgggcaagaaggtggaggtgaagagagctgagccccgggacagcaagagccaggcccctggccagcccggggccagccagtggggcagccgggtggtgcccaatgctgccaacggctgggccggccagcccccacccacctggcagcagggctacggcccccagggcatgtgggtgcctgctggccaggccatcggcggctacggccccccacctgctggccgcggggcccctcctcctcctccacccttcaccagctacatcgtgtccaccccacctgggggcttccccccaccccagggcttcccccagggctacggggccccaccccagttctcctttggctacggccccccacctcctcctccagaccagtttgcccctcctggggtgcccccacctccagccacccctggggccgcccccctggccttccccccaccacccagccaggccgccccagacatgagcaagcccccaacagcccagcctgacttcccctacggccagtatggcctgggcagctacagccctgcccctcctggctgcggcccccactttgtgtacagcctgatggtgcggctgagcagtgatgtggcctag

SEQ ID NO: 247216 - DNA, 1137 bp, Artificial Sequence
  derived and/or modified sequence
atgaacaacagcggcgccgacgagatcggcaagctgttcgtgggcggtctggattggtccacaactcaagagaccctgagatcatatttttctcagtacggggaagttgtggattgtgtgatcatgaaagataagacaaccaatcaatcacgtggttttgggttcgtgaaatttaaagatccaaactgcgttggtacagtgctcgcaagtcgtcctcacacccttgacggaagaaatatcgatcccaagccatgcacccctaggggtatgcaaccggagaggacacgacctaaggagggctggcagaagggcccacgcagtgataactctaaatctaataagatctttgtgggaggcatcccacataactgcggcgagacggagctgcgtgagtacttcaagaaatttggagtcgtcactgaggttgttatgatttacgatgccgagaaacaacgtcccaggggctttggattcataacctttgaggacgaacagtcagtagatcaggctgtaaacatgcatttccatgatataatgggtaagaaggtcgaggtgaaaagggccgagccgcgtgacagtaaaagccaagcacccggacagccgggagcgtctcaatgggggtctagagtggtccccaatgcagccaacggctgggctggtcagcctcctcccacctggcagcaaggttacggaccccagggcatgtgggtccctgctggccaggctatcggaggttatggtcctccacctgcaggtagaggtgcgcccccacctcctccacccttcacgagctacatcgtctctactccaccgggcggttttccaccaccacagggctttcctcagggatatggagcgcccccccaattttcatttggatacggcccccccccaccgcctccagaccagtttgcacctcccggcgtcccgccccccccagctacccccggagcagctcctcttgcttttcccccgcccccatcccaagcagctcccgatatgtctaagccgcccacagctcagccggattttccttacggtcagtacggcctgggatcctacagtcctgccccgcccggatgtggtccccatttcgtgtattctctgatggttcgtttgtcatcagatgtcgcatag

SEQ ID NO: 247217 - DNA, 1137 bp, Artificial Sequence
  derived and/or modified sequence
atgaataatagcggtgcagatgagattggcaagcttttcgtgggcggtttagactggtctaccacacaagaaacactgcggtcttacttcagccagtatggagaggtcgtggattgcgttatcatgaaggataaaacaacaaatcagtctcgcggattcggctttgtcaagttcaaagatcctaactgtgtcgggacagttttggcctccaggccccatactctggatggaaggaatattgatcccaaaccctgcactcctcgcggaatgcagcctgagagaacccgaccaaaggagggctggcagaagggtccaaggtctgataactccaagagtaacaaaatttttgtgggcggaatcccacacaattgcggtgaaacagaacttcgtgaatacttcaaaaagttcggcgtcgtcacagaagtggtgatgatttacgacgcagagaagcagcgcccaagaggatttggtttcatcacattcgaagacgagcagagcgtcgaccaggccgttaacatgcactttcatgatataatgggcaagaaagtggaggtgaagcgcgctgagccacgagactctaagtctcaggcacccggacagcctggtgcctcgcagtggggatctcgggtggtgcccaacgctgccaacggctgggccggacagcccccaccgacctggcaacagggctacggcccacaggggatgtgggttccagccggacaagctatcggaggctacggccctccccctgccggtaggggggctccgcctccacctcctccattcaccagttacatcgtgtcgactcctccgggaggatttcccccaccacagggatttcctcaaggttatggtgctcctccgcagtttagtttcgggtacggtccacccccaccgccaccagatcaatttgctcctccaggggtcccccctcccccagcaacccctggagcagccccactggcattccctccaccaccatcccaagctgcccctgatatgtcaaagcctccaactgcacagccagacttcccgtatggtcagtatgggttgggatcctatagtcccgctcccccaggttgcggaccccacttcgtttattctttgatggtgagactgtcttctgacgtcgcatag

SEQ ID NO: 247218 - protein, 344 aa, Artificial Sequence
  derived and/or modified sequence
MSGEPELIELRELAPAGRAGKGRTRLERANALRIARGTACNPTRQLVPGRGHRFQPAGPATHTWCDLCGDFIWGVVRKGLQCARLSADCKFTCHYRCRALVCLDCCGPRDLGWEPAVERDTNVDEPVEWETPDLSQAEIEQKIKEYNAQINSNLFMSLNKDGSYTGFIKVQLKLVRPVSVPSSKKPPSLQDARRGPGRGTSVRRRTSFYLPKDAVKHLHVLSRTRAREVIEALLRKFLVVDDPRKFALFERAERHGQVYLRKLLDDEQPLRLRLLAGPSDKALSFVLKENDSGEVNWDAFSMPELHNFLRILQREEEEHLRQILQKYSYCRQKIQEALHACPLG

SEQ ID NO: 247219 - DNA, 1035 bp, Artificial Sequence
  derived and/or modified sequence
atgagcggcgagcccgagctgatcgagctgagagagctggcccccgccggcagagccggcaagggcagaaccagactggagagagccaacgccctgagaatcgccagaggcaccgcctgcaaccccaccagacagctggtgcccggcagaggccacagattccagcccgccggccccgccacccacacctggtgcgacctgtgcggcgacttcatctggggcgtggtgagaaagggcctgcagtgcgccagactgagcgccgactgcaagttcacctgccactacagatgcagagccctggtgtgcctggactgctgcggccccagagacctgggctgggagcccgccgtggagagagacaccaacgtggacgagcccgtggagtgggagacccccgacctgagccaggccgagatcgagcagaagatcaaggagtacaacgcccagatcaacagcaacctgttcatgagcctgaacaaggacggcagctacaccggcttcatcaaggtgcagctgaagctggtgagacccgtgagcgtgcccagcagcaagaagccccccagcctgcaggacgccagaagaggccccggcagaggcaccagcgtgagaagaagaaccagcttctacctgcccaaggacgccgtgaagcacctgcacgtgctgagcagaaccagagccagagaggtgatcgaggccctgctgagaaagttcctggtggtggacgaccccagaaagttcgccctgttcgagagagccgagagacacggccaggtgtacctgagaaagctgctggacgacgagcagcccctgagactgagactgctggccggccccagcgacaaggccctgagcttcgtgctgaaggagaacgacagcggcgaggtgaactgggacgccttcagcatgcccgagctgcacaacttcctgagaatcctgcagagagaggaggaggagcacctgagacagatcctgcagaagtacagctactgcagacagaagatccaggaggccctgcacgcctgccccctgggctag

SEQ ID NO: 247220 - DNA, 1035 bp, Artificial Sequence
  derived and/or modified sequence
atgagcggggagccagagctaatagaactgagagagctggccccagcaggaagggccggcaaaggtaggacccggcttgaaagagctaatgcactgcgcattgctcgtgggacagcgtgcaatcctacacggcaactcgtgcctggaagaggtcatcgcttccagcccgccggtccggccacccatacttggtgtgacttgtgtggtgactttatatggggggtcgtccggaaagggctccaatgcgccagactgagcgcagattgtaaattcacatgccattatcgttgtcgagccctggtgtgcctggactgctgtggtccacgcgatctgggatgggagccagctgtggaacgggatactaatgtagatgagcctgtggagtgggaaacgccggatttgtcgcaggctgagatagagcagaagatcaaggagtacaacgcccagattaacagtaatctgtttatgagcttaaataaagacggcagctataccgggtttatcaaggttcagctcaaacttgtgcgacccgtgtctgtgccctccagcaaaaagcccccaagcttacaagatgctagacgaggtccagggcggggtaccagcgtgagaaggcggacaagcttttacttacctaaggatgctgtcaaacatctgcatgttttaagcagaacacgagctcgagaagtgattgaagccctgctcagaaagttcctggtcgtcgatgaccccaggaagttcgccctgtttgagcgagccgaaaggcatgggcaggtgtatctgcggaagcttctcgatgatgaacagcctctcagactgaggttattagcaggtccctctgataaggccctttccttcgtgttgaaagagaacgatagtggggaggttaattgggacgcattctcaatgcccgagctccataactttctgaggatacttcagagagaagaagaagagcacctccgacaaatccttcaaaagtattcgtattgcagacagaaaatccaggaagcacttcatgcctgcccactcggctag

SEQ ID NO: 247221 - DNA, 1035 bp, Artificial Sequence
  derived and/or modified sequence
atgtctggagagcctgagctgattgagctgcgggagctggccccagctggccgggccgggaaaggaagaacccggctggagcgggccaatgccctgcgcatcgcccggggcacagcctgcaaccccacccggcagctggtgcccggccggggccaccgcttccagcctgctggccctgccacccacacctggtgtgacctgtgtggggacttcatctggggcgtggtgaggaagggcctgcagtgtgcccggctgtctgctgactgcaagttcacctgccactaccgctgccgggccctggtgtgcctggactgctgcggcccccgggacctgggctgggagcctgctgtggagcgggacaccaacgtggatgagcctgtggagtgggagaccccagacctgagccaggccgagattgagcagaagatcaaggagtacaatgcccagatcaacagcaacctcttcatgagcctgaacaaggatggcagctacacaggcttcatcaaggtgcagctgaagctggtgcggcctgtgtctgtgcccagcagcaagaagccacccagcctgcaggatgcccggcggggccctggccggggcacctctgtgagaagaaggaccagcttctacctgcccaaggatgctgtgaagcacctgcacgtgctgagcaggacccgggcccgggaggtgattgaggccctgctgaggaagttcctggtggtggatgaccccaggaagtttgccctgtttgagcgggcagagagacatggccaggtgtacctgaggaagctgctggatgatgagcagcccctgcggctgcggctgctggccggccccagcgacaaggccctgagctttgtgctgaaggaaaatgacagcggggaggtgaactgggatgccttctccatgcctgagctgcacaacttcctgcgcatcctgcagcgggaggaggaggagcacctgcggcagatcctgcagaagtacagctactgccggcagaagatccaggaggccctgcacgcctgccccctgggctag

SEQ ID NO: 247222 - DNA, 1035 bp, Artificial Sequence
  derived and/or modified sequence
atgagcggcgagcccgagctgatcgagctgcgggagctggcccccgcgggcagggcaggaaaaggaaggacgcgactggaaagggccaacgccttgcgaattgcccgcggaactgcttgcaaccccacaaggcagttggtcccaggaaggggacatcgttttcagccagctggacccgcaactcacacgtggtgcgatttgtgcggagacttcatctggggcgtggtacgcaaaggcttacagtgtgctcgcctgtcagccgattgcaagtttacctgtcattataggtgtagggccctcgtatgtctggattgctgcggaccacgtgacttgggttgggaacccgccgtggaacgggataccaatgtggacgagccagtggaatgggagacaccggacctaagccaggctgagattgagcagaagatcaaggagtataacgcacagattaactccaacctgttcatgtccctcaataaggatgggtcctatacggggttcataaaagtacagcttaagttggtccgcccagtgagcgtaccctctagtaagaaaccgccatctttgcaggacgctcgccgcggaccagggcgaggaaccagtgtcagaaggagaacgagtttttacctgccaaaagatgctgtcaagcatcttcacgtgttgagtcgaacccgggcacgggaggtgatcgaggccttgcttcggaagttcttggtggtggatgaccctaggaaatttgccttattcgagcgggcagagcggcacgggcaagtttacctccgaaaactcctggatgacgagcagcccctgcgcctgcgcctgcttgccgggcctagtgacaaagccttgtcctttgtcctgaaagaaaatgacagtggtgaggtgaattgggatgctttctcgatgcccgagctgcacaattttttgcgtatcttacagcgagaggaggaggaacatttgaggcagattctgcagaaatacagctactgcagacagaagatccaggaggccctccatgcgtgccccctcgggtag

SEQ ID NO: 247223 - DNA, 1035 bp, Artificial Sequence
  derived and/or modified sequence
atgtccggagagccggaactgattgaactccgcgagctagcaccagctgggagagcgggtaaaggccgaaccaggctcgaacgagcaaatgctctgaggatagccagggggacagcctgcaatccgactcgtcagttggtgcccggtagaggacacagattccaacctgccggaccggcaacacacacttggtgcgatctgtgtggagatttcatttggggggtggtgcggaaaggtcttcagtgcgctaggctgtccgcagactgcaaatttacctgccactacaggtgccgggctctggtctgtctggattgttgtggccctcgtgacctcggctgggagcctgccgtggagagggacacaaacgtcgatgaacctgtggagtgggaaacaccggatctttctcaagctgagatcgaacaaaagattaaggagtataatgctcaaattaactcaaatctgtttatgagcctgaacaaagacggttcttacacgggattcatcaaggttcagctgaaactggtccggcctgtctcagtaccatcctcaaaaaagcccccatcacttcaggacgccagaaggggaccaggacggggtacctccgttcgtcgccgaacatctttttatctgcctaaagatgccgtgaaacaccttcatgtgctttcccggacacgagcgagggaggttatcgaagccctcctcagaaaatttctcgtcgtcgatgacccgaggaaattcgcccttttcgagcgcgctgagcggcatggacaggtgtacctgcgtaaactacttgatgacgagcagccgttgaggctccgattactcgcagggccttccgacaaggccctgtcattcgtcctgaaagagaacgacagcggcgaagtgaactgggacgccttttccatgccagagttgcacaactttctgaggattctgcaacgggaggaggaggagcaccttcgacaaatactacagaaatacagctattgtaggcaaaaaatccaagaggcgctgcacgcctgtccccttggttag

SEQ ID NO: 247224 - DNA, 1864 bp, Artificial Sequence
  derived and/or modified sequence
cgcccaaagccagcgaagcacgggcccaaccgggccatgtcgggggagcctgagctcattgagctgcgggagctggcacccgctgggcgcgctgggaagggccgcacccggctggagcgtgccaacgcgctgcgcatcgcgcggggcaccgcgtgcaaccccacacggcagctggtccctggccgtggccaccgcttccagcccgcggggcccgccacgcacacgtggtgcgacctctgtggcgacttcatctggggcgtcgtgcgcaaaggcctgcagtgcgcgcgcctctctgcagattgcaagttcacctgccactaccgctgccgcgcgctcgtctgcctggactgttgcgggccccgggacctgggctgggaacccgcggtggagcgggacacgaacgtggacgagcctgtggagtgggagacacctgacctttctcaagctgagattgagcagaagatcaaggagtacaatgcccagatcaacagcaacctcttcatgagcttgaacaaggacggttcttacacaggcttcatcaaggttcagctgaagctggtgcgccctgtctctgtgccctccagcaagaagccaccctccttgcaggatgcccggcggggcccaggacggggcacaagtgtcaggcgccgcacttccttttacctgcccaaggatgctgtcaagcacctgcatgtgctgtcacgcacaagggcacgtgaagtcattgaggccctgctgcgaaagttcttggtggtggatgacccccgcaagtttgcactctttgagcgcgctgagcgtcacggccaagtgtacttgcggaagctgttggatgatgagcagcccctgcggctgcggctcctggcagggcccagtgacaaggccctgagctttgtcctgaaggaaaatgactctggggaggtgaactgggacgccttcagcatgcctgaactacataacttcctacgtatcctgcagcgggaggaggaggagcacctccgccagatcctgcagaagtactcctattgccgccagaagatccaagaggccctgcacgcctgcccccttgggtgacctcttgtacccccaggtggaaggcagacagcaggcagcgccaagtgcgtgccgtgtgagtgtgacagggccagtggggcctgtggaatgagtgtgcatggaggccctcctgtgctgggggaatgagcccagagaacagcgaagtagcttgctccctgtgtccacctgtgggtgtagccaggtatggctctgcacccctctgccctcattactgggccttagtgggccagggctgccctgagaagctgctccaggcctgcagcaggagtggtgcagacagaagtctcctcaatttttgtctcagaagtgaaaatcttggagaccctgcaaacagaacagggtcatgtttgcaggggtgacggccctcatctatgaggaaaggttttggatcttgaatgtggtctcaggatatccttatcagagctaagggtgggtgctcagaataaggcaggcattgaggaagagtcttggtttctctctacagtgccaactcctcacacaccctgaggtcagggagtgctggctcacagtacagcatgtgccttaatgcttcatatgaggaggatgtccctgggccagggtctgtgtgaatgtgggcactggcccaggttcataccttatttgctaatcaaagccagggtctctccctcaggtgttttttatgaagtgcgtgaatgtatgtaatgtgtggtggcctcagctgaatgcctcctgtggggaaaggggttggggtgacagtcatcatcagggcctggggcctgagagaattggctcaataaagatttcaagatcc

SEQ ID NO: 247225 - DNA, 1657 bp, Artificial Sequence
  derived and/or modified sequence
caactgttgagcaggcctctctgcctgtggccttccggccggtttccagacgcccaggtggccaacattagagtccgcgtagcagtgtgagattgcaagttcacctgccactaccgctgccgcgcgctcgtctgcctggactgttgcgggccccgggacctgggctgggaacccgcggtggagcgggacacgaacgtggacgagcctgtggagtgggagacacctgacctttctcaagctgagattgagcagaagatcaaggagtacaatgcccagatcaacagcaacctcttcatgagcttgaacaaggacggttcttacacaggcttcatcaaggttcagctgaagctggtgcgccctgtctctgtgccctccagcaagaagccaccctccttgcaggatgcccggcggggcccaggacggggcacaagtgtcaggcgccgcacttccttttacctgcccaaggatgctgtcaagcacctgcatgtgctgtcacgcacaagggcacgtgaagtcattgaggccctgctgcgaaagttcttggtggtggatgacccccgcaagtttgcactctttgagcgcgctgagcgtcacggccaagtgtacttgcggaagctgttggatgatgagcagcccctgcggctgcggctcctggcagggcccagtgacaaggccctgagctttgtcctgaaggaaaatgactctggggaggtgaactgggacgccttcagcatgcctgaactacataacttcctacgtatcctgcagcgggaggaggaggagcacctccgccagatcctgcagaagtactcctattgccgccagaagatccaagaggccctgcacgcctgcccccttgggtgacctcttgtacccccaggtggaaggcagacagcaggcagcgccaagtgcgtgccgtgtgagtgtgacagggccagtggggcctgtggaatgagtgtgcatggaggccctcctgtgctgggggaatgagcccagagaacagcgaagtagcttgctccctgtgtccacctgtgggtgtagccaggtatggctctgcacccctctgccctcattactgggccttagtgggccagggctgccctgagaagctgctccaggcctgcagcaggagtggtgcagacagaagtctcctcaatttttgtctcagaagtgaaaatcttggagaccctgcaaacagaacagggtcatgtttgcaggggtgacggccctcatctatgaggaaaggttttggatcttgaatgtggtctcaggatatccttatcagagctaagggtgggtgctcagaataaggcaggcattgaggaagagtcttggtttctctctacagtgccaactcctcacacaccctgaggtcagggagtgctggctcacagtacagcatgtgccttaatgcttcatatgaggaggatgtccctgggccagggtctgtgtgaatgtgggcactggcccaggttcataccttatttgctaatcaaagccagggtctctccctcaggtgttttttatgaagtgcgtgaatgtatgtaatgtgtggtggcctcagctgaatgcctcctgtggggaaaggggttggggtgacagtcatcatcagggcctggggcctgagagaattggctcaataaagatttcaagatcc

SEQ ID NO: 247226 - protein, 251 aa, Artificial Sequence
  derived and/or modified sequence
MADLTSVLTSVMFSPSSKMFIGGLSWQTSPDSLRDYFSKFGEIRECMVMRDPTTKRSRGFGFVTFADPASVDKVLGQPHHELDSKTIDPKVAFPRRAQPKMVTRTKKIFVGGLSANTVVEDVKQYFEQFGKVEDAMLMFDKTTNRHRGFGFVTFENEDVVEKVCEIHFHEINNKMVECKKAQPKEVMFPPGTRGRARGLPYTMDAFMLGMGMLGYPNFVATYGRGYPGFAPSYGYQFPDYLPVSQDIIFIN

SEQ ID NO: 247227 - DNA, 756 bp, Artificial Sequence
  derived and/or modified sequence
atggcggatctgacatctgtgctgacgagcgtgatgttttcacccagttccaagatgtttattggaggattatcctggcagacatcaccagactccctcagggattatttttcgaagtttggtgaaattcgggaatgcatggtcatgcgcgatccaaccaccaaaaggagtcgcggcttcggtttcgtgacgttcgcggatcccgcaagcgtggataaagtgttagggcaacctcaccatgaacttgactccaaaaccattgatccaaaagtcgctttcccccgtagagcccagcctaagatggtcacccgtacaaaaaagatcttcgtcggtggcttaagcgccaatacagtcgtggaggatgtgaaacaatactttgagcaattcggaaaggtggaagatgccatgcttatgtttgacaagacaaccaacaggcatagaggcttcggctttgtcacctttgagaatgaggatgtagtggaaaaagtctgcgaaatccacttccacgagattaacaataagatggttgaatgtaaaaaggctcagcctaaggaagtgatgttcccgcccggaacccggggaagagcccggggattaccatataccatggacgcatttatgctgggtatggggatgttaggatacccaaatttcgtcgcaacgtacggccgggggtatccaggatttgctccttcctacgggtaccagttccccgactatctgcctgtgagtcaggacataatttttataaattag

SEQ ID NO: 247228 - DNA, 756 bp, Artificial Sequence
  derived and/or modified sequence
atggctgacctgacctctgtgctgacctctgtgatgttcagccccagcagcaagatgtttattggaggcctgtcctggcagaccagcccagacagcctgcgggactacttcagcaagtttggagagatccgggagtgcatggtgatgagggaccccaccaccaagaggagccggggcttcggctttgtgacctttgctgaccctgcctctgtggacaaggtgctgggccagccccaccacgagctggacagcaagaccatcgaccccaaggtggccttcccccggcgggcccagcccaagatggtgaccaggaccaagaagatctttgtgggcggcctgagcgccaacacagtggtggaggatgtgaagcagtactttgagcagtttgggaaggtggaggatgccatgctgatgtttgacaagaccaccaacagacaccggggctttggatttgtgacctttgaaaatgaagatgtggtggagaaggtgtgtgagatccacttccacgagatcaacaacaagatggtggagtgcaagaaggcccagcccaaggaggtgatgtttcctcctggcacccggggccgggcccggggcctgccctacaccatggatgccttcatgctgggcatgggcatgctgggctaccccaactttgtggccacctacggccggggctacccaggctttgcccccagctatggctaccagttcccagactacctgcctgtgtcccaggacatcatcttcatcaactag

SEQ ID NO: 247229 - DNA, 756 bp, Artificial Sequence
  derived and/or modified sequence
atggccgacctgaccagcgtgctgaccagcgtgatgttcagccccagctcaaaaatgttcatcggaggtctatcctggcaaacctcacctgactcactgcgagactatttttcaaagtttggcgaaatacgggaatgtatggtgatgcgggatcctaccacaaagcggtcaagggggtttggattcgtgacattcgctgatcccgcctcagtcgacaaggttcttggccaacctcatcacgagctggatagtaagaccattgacccaaaagtggcatttccacgtagagcgcagcctaagatggttacccgcaccaagaaaatctttgtgggagggctatcagccaacaccgtggtcgaggatgttaaacagtatttcgaacagttcggcaaggttgaagacgccatgctgatgttcgataaaaccaccaataggcaccggggattcgggttcgtgaccttcgaaaacgaggacgtggtggagaaggtgtgcgaaatccactttcacgagataaataacaagatggttgagtgtaaaaaggctcagcctaaggaagtgatgtttcccccagggaccagaggtcgagcacgcggtctgccctatacaatggacgccttcatgctgggaatgggaatgctcggctacccgaattttgtggccacgtacggtaggggctaccccgggttcgcgccgtcttatggttaccaattccccgactacctcccagtgtcccaggatatcatattcatcaactag

SEQ ID NO: 247230 - DNA, 756 bp, Artificial Sequence
  derived and/or modified sequence
atggctgacctaacatctgtgttgacatctgtgatgttctctcctagctcaaaaatgttcattggtggtctttcctggcagacatcccccgactctcttagggattatttttctaaattcggggagatccgcgagtgcatggtgatgcgggacccaacaactaaaaggagtcggggtttcggattcgtcactttcgcagatccagcctccgtcgataaagtccttggtcagcctcatcacgaactggattctaaaaccattgaccccaaggtggcattccctcggagagcgcagccaaagatggttaccagaacaaagaagatatttgtgggcggactgagtgccaatactgtggtggaggatgtaaagcagtatttcgaacagttcggcaaggtcgaggacgctatgctgatgttcgacaagaccaccaatagacaccgaggctttggatttgtcacattcgagaatgaagatgtggtagaaaaggtatgcgagatccactttcatgagataaataacaaaatggttgaatgtaaaaaggcacaacccaaggaagtgatgtttcctcctgggacaagaggaagggccagaggcctcccttatactatggacgccttcatgttgggaatgggcatgctcggatatccgaattttgtggccacttatggcagggggtaccccggattcgctccgagctatggctaccaattcccagattatctgccagtgagccaggacattatttttataaactag

SEQ ID NO: 247231 - DNA, 2142 bp, Artificial Sequence
  derived and/or modified sequence
gctttccttttagcttttgtaagttacacgtcaaaatggccgatctgacatcggtgctcacttctgttatgttttctccctctagtaaaatgtttatcggtggactgagctggcagacctcaccagatagccttagagactattttagcaaatttggagaaattagagaatgtatggtcatgagagatcccactacgaaacgctccagaggcttcggtttcgtcacgttcgcagacccagcaagtgtagataaagtattaggtcagccccaccatgagttagattccaagacgattgaccccaaagttgcatttcctcgtcgagcgcaacccaagatggtcacaagaacaaagaaaatatttgtaggcgggttatctgcgaacacagtagtggaagatgtaaagcaatatttcgagcagtttggcaaggtggaagatgcaatgctgatgtttgataaaactaccaacaggcacagagggtttggctttgtcacttttgagaatgaagatgttgtggagaaagtctgtgagattcatttccatgaaatcaataataaaatggtagaatgtaagaaagctcagccgaaagaagtcatgttcccacctgggacaagaggccgggcccggggactgccttacaccatggacgcgttcatgcttggcatggggatgctgggatatcccaacttcgtggcgacctatggccgtggctaccccggatttgctccaagctatggctatcagttcccagactatttgccggtttcacaagacataatttttatcaactagctcttaagagaggcatagcaaagtgggggttgctaccatttctagagagagaggacacagtcccggcctgggctgcccccgctccagtcaatgctcactgaaagtctgtcttagctgcctgtttgaatgactgttctttttctcatttttaattcttggactcatgtcctcattgcttcactcaattaaaaaaaaattattctccagtcccctcccactttgcttcttgtatgcattgtgaccgaccccacttcctcagaatgtaacggggccagagggaaacttctcacaaacttcgtagagcctcctcaggggaagctaggaagaagacatcaaatgtttttaagtcatgaccaaacaggcttgttggggacatatcatggggtgagctttgaagtgctggtggtccagaggggttgcagatacgtgacttggagcacccgtgtcttacgatggacagtgataaaggtgaacacacagagacagactattctctaagaatgtgagaaacctgatctggaagaggagctatataaacactatctgactatctttgtcttttggggccagtggctgttggcataatcacaagcctgtctgtcttcgagaagggacagtggagtcatccaggtgctgccacatgacaggcacggtgggcaccgatccacagtgggccccgccttccccagctcgcctccctgcctgtgctggcctggccttgcctgctggcaccattggagtaggagggggtggaacacagggggcccatcctgatcaggccccatctcaaggttggcactcctgcccatcacccttagaaggatcttttcccatggcttgacttccttcatttccctaactgaaatacacccactctcttggaataatgacgtaccactcagttggaccctcaagagtcactgctttgtctgtgctggtagtttgtgagaagtgacccgcacgcttccatttgatgcatttgatgtgagtgaatccatacatttgaatgtcattgtccttgagaccctacatgtgcagtttggctcatctcattaaagatgcttgatgtaataattggttagtttccttttattttcctgcaggcttttccatgagtattatttttttcaaagaacaaatctgtatggcttttccccatctccatattttgttttgctatgaattgctttgctttggtgaacttgtcctagtatgcttgcctcacaaacgttttagccattgtgaattttcttcatctctgtaaatagttcatctgtgcttctccctgatgacgttttattttttttcccctgtaagcaaccgaggtagaaaaataaattgtttaccatgg

SEQ ID NO: 247232 - DNA, 756 bp, Artificial Sequence
  derived and/or modified sequence
atggccgacctgaccagcgtgctgaccagcgtgatgttcagccccagcagcaagatgttcatcggcggcctgagctggcagaccagccccgacagcctgagagactacttcagcaagttcggcgagatcagagagtgcatggtgatgagagaccccaccaccaagagaagcagaggcttcggcttcgtgaccttcgccgaccccgccagcgtggacaaggtgctgggccagccccaccacgagctggacagcaagaccatcgaccccaaggtggccttccccagaagagcccagcccaagatggtgaccagaaccaagaagatcttcgtgggcggcctgagcgccaacaccgtggtggaggacgtgaagcagtacttcgagcagttcggcaaggtggaggacgccatgctgatgttcgacaagaccaccaacagacacagaggcttcggcttcgtgaccttcgagaacgaggacgtggtggagaaggtgtgcgagatccacttccacgagatcaacaacaagatggtggagtgcaagaaggcccagcccaaggaggtgatgttcccccccggcaccagaggcagagccagaggcctgccctacaccatggacgccttcatgctgggcatgggcatgctgggctaccccaacttcgtggccacctacggcagaggctaccccggcttcgcccccagctacggctaccagttccccgactacctgcccgtgagccaggacatcatcttcatcaactag

SEQ ID NO: 247233 - protein, 3396 aa, Artificial Sequence
  derived and/or modified sequence
MTAWLISLMSIEVLLLAVRHLSLHIEPEEGSLAGGTWITVIFDGLELGVLYPNNGSQLEIHLVNVNMVVPALRSVPCDVFPVFLDLPVVTCRTRSVLSEAHEGLYFLEAYFGGQLVSSPNPGPRDSCTFKFSKAQTPIVHQVYPPSGVPGKLIHVYGWIITGRLETFDFDAEYIDSPVILEAQGDKWVTPCSLINRQMGSCYPIQEDHGLGTLQCHVEGDYIGSQNVSFSVFNKGKSMVHKKAWLISAKQDLFLYQTHSEILSVFPETGSLGGRTNITITGDFFDNSAQVTIAGIPCDIRHVSPRKIECTTRAPGKDVRLTTPQPGNRGLLFEVGDAVEGLELTEATPGYRWQIVPNASSPFGFWSQEGQPFRARLSGFFVAPETNNYTFWIQADSQASLHFSWSEEPRTKVKVASISVGTADWFDSWEQNRDEGTWQQKTPKLELLGGAMYYLEAEHHGIAPSRGMRIGVQIHNTWLNPDVVTTYLREKHQIRVRAQRLPEVQVLNVSGRGNFFLTWDNVSSQPIPANATAHLIQTTIEELLAVKCKLEPLWSNILLRLGFERGPEVSNSDGDLTSGTEPFCGRFSLRQPRHLVLTPPAAQKGYRLDQYTHLCLAYKGHMNKILKMIVSFTIGFQNMVKNTTCDWSLTRTSPESWQFDCTDLWETCVRCFGDLQPPPANSPVLVHQINLLPLAQETGLFYVDEIIIADTNVTVSQADSGTARPGGNLVESVSVVGSPPVYSVTSWLAGCGTELPLITARSVPTEGTEEGSGLVLVTTQRRQRTSPPLGGHFRIQLPNTVISDVPVQISAHHLHQLLQNNADDFTSRYLNASDFTVKEDLYTCYEHVWTLSWSTQIGDLPNFIRVSDENLTGVNPAAATRVVYDGGVFLGPIFGDMLATANQHTQVVVRVNDVPAHCPGSCSFQYLQGSTPCVHSVWYSIDGDINLMIYITGTGFSGDSQFLQVTVNKTSCKVIFSNQTNVVCQTDLLPVGMHRILMLVRPSGLAISATGEDLFLNVKPRLDMVEPSRAADIGGLWATIRGSSLEGVSLILFGSYSCAINVATSNSSRIQCKVPPRGKDGRIVNVTVIRGDYSAVLPRAFTYVSSLNPVIVTLSRNISNIAGGETLVIGVARLMNYTDLDVEVHVQDALAPVHTQSAWGLEVALPPLPAGLHRISVSINGVSIHSQGVDLHIQYLTEVFSIEPCCGSLLGGTILSISGIGFSRDPALVWVLVGNRSCDIVNLTEASIWCETLPAPQIPDAGAPTVPAAVEVWAGNRFFARGPSPSLVGKGFTFMYEAAATPVVTAMQGEITNSSLSLHVGGSNLSNSVILLGNLNCDVETQSFQGNVSLSGCSIPLHSLEAGIYPLQVRQKQMGFANMSVVLQQFAVMPRIMAIFPSQGSACGGTILTVRGLLLNSRRRSVRVDLSGPFTCVILSLGDHTILCQVSLEGDPLPGASFSLNVTVLVNGLTSECQGNCTLFIREEASPVMDALSTNTSGSLTTVLIRGQRLATTADEPMVFVDDQLPCNVTFFNASHVVCQTRDLAPGPHYLSVFYTRNGYACSGNVSRHFYIMPQVFHYFPKNFSLHGGSLLTIEGTGLRGQNTTSVYIDQQTCLTVNIGAELIRCIVPTGNGSVALEIEVDGLWYHIGVIGYNKAFTPELISISQSDDILTFAVAQISGAANIDIFIGMSPCVGVSGNHTVLQCVVPSLPAGEYHVRGYDCIRGWASSALVFTSRVIITAVTENFGCLGGRLVHVFGAGFSPGNVSAAVCGAPCRVLANATVSAFSCLVLPLDVSLAFLCGLKREEDSCEAARHTYVQCDLTVAMATEQLLESWPYLYICEESSQCLFVPDHWAESMFPSFSGLFISPKLERDEVLIYNSSCNITMETEAEMECETPNQPITVKITEIRKRWGQNTQGNFSLQFCRRWSRTHSWFPERLPQDGDNVTVENGQLLLLDTNTSILNLLHIKGGKLIFMAPGPIELRAHAILVSDGGELRIGSEDKPFQGRAQITLYGSSYSTPFFPYGVKFLAVRNGTLSLHGSLPEVIVTCLRATAHALDTVLALEDAVDWNPGDEVVIISGTGVKGAKPMEEIVTVETVQDTDLYLKSPLRYSHNFTENWVAGEHHILKATVALLSRSITIQGNLTNEREKLLVSCQEANAPEGNLQHCLYSMSEKMLGSRDMGARVIVQSFPEEPSQVQLKGVQFQVLGQAFHKHLSSLTLVGAMRESFIQGCTVRNSFSRGLSMCGTLGLKVDSNVFYNILGHALLVGTCTEMRYISWEAIHGRKDDWSGHGNIIRNNVIIQVSGAEGLSNPEMLTPSGIYICSPTNVIEGNRVCGAGYGYFFHLMTNQTSQAPLLSFTQNIAHSCTRYGLFVYPKFQPPWDNVTGTTLFQSFTVWESAGGAQIFRSSNLRLKNFKVYSCRDFGIDVLESDANTSVTDSLLLGHFAHKGSLCMSSGIKTPKRWELMVSNTTFVNFDLINCVAIRTCSDCSQGQGGFTVKTSQLKFTNSSNLVAFPFPHAAILEDLDGSLSGKNRSHILASMETLSASCLVNSSFGRVVHGSACGGGVLFHRMSIGLANTPEVSYDLTMTDSRNKTTTVNYVRDTLSNPRGWMALLLDQETYSLQSENLWINRSLQYSATFDNFAPGNYLLLVHTDLPPYPDILLRCGSRVGLSFPFLPSPGQNQGCDWFFNSQLRQLTYLVSGEGQVQVILRVKEGMPPTISASTSAPESALKWSLPETWQGVEEGWGGYNNTIPGPGDDVLILPNRTVLVDTDLPFFKGLYVMGTLDFPVDRSNVLSVACMVIAGGELKVGTLENPLEKEQKLLILLRASEGVFCDRMNGIHIDPGTIGVYGKVHLYSAYPKNSWTHLGADIASGNERIIVEDAVDWRPHDKIVLSSSSYEPHEAEVLTVKEVKGHHVRIYERLKHRHIGSVHVTEDGRHIRLAAEVGLLTRNIQIQPDVSCRGRLFVGSFRKSSREEFSGVLQLLNVEIQNFGSPLYSSVEFSNVSAGSWIISSTLHQSCGGGIHAAASHGVLLNDNIVFGTAGHGIDLEGQAYTVTNNLVVLMTQPAWSTIWVAGIKVNQVKDINLHGNVVAGSERLGFHIRGHKCSSCELLWSDNVAHSSLHGLHLYKESGLDNCTRISGFLAFKNFDYGAMLHVENSVEIENITLVDNTIGLLAVVYVFSAPQNSVKKVQIVLRNSVIVATSSSFDCIQDKVKPHSANLTSTDRAPSNPRGGRIGILWPVFTSEPNQWPQEPWHKVRNDHSISGIMKLQDVTFSSFVKSCYSDDLDVCILPNAENSGIMHPITAERTRMLKIKDKNKFYFPSLQPRKDLGKVVCPELDCASPRKYLFKDLDGRALGLPPPVSVFPKTEAEWTASFFNAVTTEQALKISE

SEQ ID NO: 247234 - DNA, 10191 bp, Artificial Sequence
  derived and/or modified sequence
atgactgcctggctcatttcactaatgtcaattgaggtcctgctactggcggttaggcacctgagtttgcacattgagccggaagaaggctcacttgctgggggaacttggataacagtcattttcgacggacttgaactgggtgtgctgtacccaaacaacggatctcaactggagattcacctcgtaaacgtgaatatggtagtgcccgccttacggagcgtaccttgcgatgtgtttccagttttcctcgatttaccagtagtaacctgccgaacccgatcagttctgtccgaagcccacgaggggctctacttcttggaggcctatttcggcggacagctcgttagctctcccaatcccggcccgcgagacagctgcacttttaagttttcgaaagcccagacacctatcgtccaccaagtgtatccaccgtctggcgtcccgggaaaactgatacatgtatatgggtggatcattacaggaaggctggagacttttgatttcgatgcggaatatatcgattcccccgtaatactggaagcgcaaggcgataagtgggtcactccttgtagccttattaatcggcagatgggtagttgttatccaattcaagaagatcatggtcttggtacactgcagtgtcacgtggaaggtgactatatcggttctcagaatgtctccttctctgttttcaacaaaggaaagtccatggtgcacaagaaggcttggcttatctctgcaaagcaagacctgttcctataccagacccactcagagattctatctgtgttccctgagactggctcacttggcgggagaactaacatcacaattaccggtgatttcttcgacaactcagcacaggtcaccatcgcgggtattccctgtgatatacgccacgtaagtccaaggaagatcgaatgcaccacccgcgcccctggcaaagatgttaggctgaccaccccccagcccggcaatagaggcctgctgtttgaggtcggcgatgctgtggaggggcttgaactcacggaggccaccccgggctaccgctggcaaatagttcccaatgcttccagtccttttggattctggagccaagagggacagccatttcgcgccaggctgtccggctttttcgtagcccccgaaaccaacaattacacattttggattcaagctgattctcaagccagtctccatttttcatggagcgaggaaccccggacgaaggtgaaggtggcgtctatatcagtggggactgcagattggttcgatagctgggagcaaaatcgagacgagggcacatggcagcagaaaaccccaaagcttgagctgcttgggggagcgatgtattatttggaagccgagcaccacgggatcgcaccttcaagaggaatgcggatcggcgttcagatccataatacttggttgaatccagacgtggtgacaacatacctgcgcgagaagcaccagatccgagtaagggcccagcgacttcccgaagtgcaggtcttaaacgtttccggaagaggaaacttttttttgacatgggataacgtttccagtcagcccattccagcaaacgccaccgctcatctgatccagaccacaatcgaagaactcctggccgttaaatgcaagctcgaacccctgtggagtaatatactactgcgcctgggcttcgagagggggcccgaggtgtctaacagcgacggagatttaactagtggcaccgagccgttttgtgggcgctttagcctgaggcagccacggcatcttgtgctgacccctccagctgcacagaaagggtatcgattggatcaatacacccacctctgccttgcatataagggccacatgaataagattcttaaaatgattgtgagcttcactattggttttcagaatatggtgaagaacacaacatgcgattggtcactgaccagaacatccccagaatcatggcagtttgactgtacagatctctgggagacatgtgtcagatgcttcggggacctgcagccgcccccagccaattctccagtgttggtgcaccaaatcaaccttcttcctcttgcccaggaaacgggcctcttttacgtggacgaaataattatagctgatacgaatgtgactgtgtcccaagccgactccggaaccgctaggccaggcgggaacctagtcgaatcggttagcgtcgtcgggagcccacctgtctattctgtaaccagctggctcgcaggctgcggtacagagctacctctcattaccgcaaggagtgtccccaccgagggcactgaagaaggatctggactcgttctcgtcactacacaaagaaggcagaggactagccctcctctgggaggacacttccggatccagctgccgaacaccgtaatcagcgacgtgcctgtccagattagtgcgcatcaccttcaccagctgctgcagaataacgctgatgatttcacttctagatatctgaacgcgagcgacttcaccgtgaaggaggatctgtacacatgttacgagcacgtgtggactctgagttggagcacccagatcggtgacttgcctaattttatcagggttagcgatgagaacttgaccggcgttaacccagctgccgcaactcgggtggtgtatgacggcggggtcttccttgggcccatcttcggcgatatgctggccaccgcaaaccaacacacgcaggtggtggtgagggtgaatgatgtgcccgcacattgccccggctcatgcagctttcagtatttgcagggctccactccttgcgtccactccgtatggtacagtattgatggcgacattaatttgatgatatacatcaccggaacaggattctccggagattcccagtttctgcaagtaaccgtaaacaagacctcttgtaaggtgatatttagtaaccaaaccaatgtggtatgtcaaacagatctgttgcctgtaggtatgcatcggatacttatgctcgtacgaccgtctggattggccataagtgccacaggggaggatctgttcttgaacgtcaaaccaaggcttgacatggtcgagcctagtcgggcagctgatattggcggcttgtgggccaccattcgaggcagcagcttggaaggggtatcccttattctattcggctcctatagctgcgctataaatgttgctacctctaactcttcccgaatacagtgtaaagttcctccaagaggtaaggacggacgcatcgtgaacgtcaccgtcatcagaggggactatagtgccgtcctgccccgcgcatttacatacgtttctagtcttaaccctgttatagtgacgctcagcagaaatatctccaatatcgccggcggtgaaaccttggtgattggtgttgccagattgatgaattacacggatctggatgtagaggtacatgtacaggatgctctcgctcccgtacatacccagtcagcctggggactggaagtagccctccctccactcccagcaggcctgcacaggattagcgtgagcataaatggcgttagtatccactcccagggagtggatctgcatattcagtatcttaccgaagtgttctcaattgagccgtgctgcggaagcctgcttggaggcacaattctatccataagtgggattggcttttcacgagacccagccttggtctgggtgctggtcgggaatcgatcctgcgacattgttaacttaacagaggcctcaatttggtgcgaaaccctgcctgccccccagattcccgacgctggtgccccaaccgtccctgcggcggtggaggtttgggctgggaataggttcttcgcgaggggaccctcgccgagtctagtgggcaaaggattcacattcatgtatgaggctgccgccactccagttgttaccgccatgcagggcgaaatcacaaacagctcattgtcactgcacgtaggaggcagtaatcttagcaattctgtgatccttttaggcaatttaaattgcgacgtcgagacacagtcgtttcagggcaacgtctctctgtccggatgttctataccgctacactccctcgaggctggcatctaccccttacaagtaaggcagaaacagatgggcttcgctaatatgagtgtggtgctgcagcagttcgccgtgatgccgaggattatggccatctttccaagccagggctcggcatgcgggggaaccatcctcaccgtacgcggcctcctcctgaactcaaggaggcgcagcgtgagagttgacctgagcggcccgttcacatgtgtcatcctgagcctcggcgaccacacaatcctctgccaggtgagcctggagggagaccctttgccaggggcttcctttagcttaaatgtcaccgtattggtcaatggcttgacaagcgagtgtcaaggcaactgcactctgttcattagggaggaagcaagcccagtgatggacgccctgagcacgaataccagtggtagccttaccactgttctcatccgtggacagcgcctggcaaccacagccgacgaaccaatggtgtttgtggatgatcaactgccctgtaatgtaacctttttcaacgcctctcacgtggtatgtcagaccagggacttggctccaggacctcactacttaagtgtattttacacccgaaatggatatgcctgctccgggaacgtcagccggcatttctacatcatgccccaggttttccactatttccccaaaaatttttccctgcacggaggctcattattaaccatcgaaggaactggcctcaggggccaaaacactacctcagtgtacattgatcagcagacctgccttacggtgaacatcggggcagagttgattcgatgtattgtccccacaggtaacgggtcagtggctttagagatcgaggtcgacggcctgtggtatcatattggagtaatcggatacaacaaggccttcacaccagaactcatttcaataagccagagcgacgacattctgacattcgccgtcgcgcagatctctggtgccgccaatatcgacatctttattgggatgtccccctgtgtgggcgtgagtggaaatcacactgtcttgcaatgtgtcgtgccatcactcccagccggggagtatcacgtgcgaggatacgactgtattcggggatgggcatccagcgctttggtgtttacatctcgggtgatcatcactgccgtaacggagaactttggatgcctcggaggtcgtctcgtgcatgtgtttggcgccgggtttagccccggtaacgtcagcgccgcagtatgtggcgcgccgtgccgagtgctcgctaacgccaccgttagcgccttctcctgcctcgtcctgcctttggacgtctcattagcttttttgtgcggattgaaaagagaggaggattcttgtgaagctgcacgccacacctacgtgcaatgcgacctaactgtggccatggcaactgagcagctactggagagctggccttacctctacatctgtgaggagagttcccagtgcttgttcgtgcctgaccactgggctgagagcatgttcccatcattcagtggtctcttcatatccccaaaacttgagagagatgaagtgctgatatacaatagttcttgcaatatcacaatggagaccgaagcagaaatggagtgcgaaactcctaatcagcctatcactgtaaaaatcactgaaatccgaaagaggtggggccagaacactcaagggaacttttcactgcagttttgcaggcggtggagccggacccactcttggttccctgaacggctcccccaggacggggacaacgtcaccgtggaaaatgggcaactcctcctgttggatactaatacgtctattctgaacctccttcacatcaagggtgggaagctgatctttatggcacccggaccaattgaactgcgggcccatgcaattttggtttccgacggaggcgaattaagaatcgggagcgaagataaacccttccagggaagagctcaaattacgctctacggaagctcatactcaaccccctttttcccatatggtgtcaagttcctcgccgtccgtaacggaaccctgtccctgcacggatccttacccgaagtcatcgtgacatgcctgagagccactgcccacgctttggatacggttttggcattggaggatgcagtggactggaatcccggagacgaagttgtcattataagcggtactggcgtgaaaggagcaaaacccatggaagaaatagtgacagttgagacagtgcaggataccgatctctacctgaaatcccctttgcgctatagtcacaatttcaccgagaactgggtcgcaggggaacaccatatcctaaaggccacagtagccttgctctcccgctctatcacaatccaaggaaacctcactaacgagagggaaaagctgctagtgagctgccaggaagccaacgccccggaaggtaacttacagcactgtttgtacagcatgtccgagaaaatgctgggatccagggacatgggtgcccgcgtgatcgtacaaagctttccggaagaaccatcacaggtgcagctcaagggggtccagttccaagtgctcggacaggcattccataagcatctgagttctttgaccctcgtcggcgcaatgagagagtccttcatccagggatgcacagtacggaatagtttttctcgggggctctcgatgtgtgggaccttggggctgaaggtggactccaacgttttctacaacatactggggcatgctcttcttgtcggcacttgcacagaaatgcgatacatttcgtgggaggccattcacggacgcaaggacgactggtctggacatggtaatattattcggaataatgtgattatacaagtgtctggtgcagagggcctctccaacccagagatgcttactccttccggcatctacatttgctcacctaccaacgtgattgaagggaaccgcgtttgcggggcaggttatggctacttcttccacctcatgacaaatcagacatcccaggcacctctgctctctttcacacaaaatatagctcacagctgtacaagatatgggcttttcgtgtaccccaagttccagccgccttgggacaacgtgacagggacaacactgttccagagttttactgtttgggagtccgctggaggggctcaaatctttcggagcagtaatttgaggctgaaaaatttcaaggtctactcttgccgcgactttggcatcgatgtgctagagtcagatgctaatacgtccgtcactgacagcttgttgctcggccactttgcgcataaagggtcattatgtatgtcctccggcattaagactcctaaaaggtgggagctcatggtttccaatacaacttttgtcaattttgacctaatcaactgcgtggctatccgcacttgtagcgattgttcacagggccaaggcgggttcactgttaagacctctcagttgaaattcacaaattcaagcaatttggttgccttccccttcccccacgctgctattttagaggacctggatggctctctgagcgggaagaacagatcccacatccttgccagcatggagaccctaagtgccagctgcttggtgaactctagctttggccgagtagtgcacggaagcgcctgtggcgggggcgtgctctttcatcggatgtctattggtcttgccaatacaccagaggttagttacgacttgaccatgaccgattcaagaaacaaaaccactacagtaaactatgtccgggacacattgagtaacccaagaggatggatggcactcctcctggatcaagagacttatagcctgcagagcgaaaacctgtggattaatagatcactgcaatacagcgcgacatttgataactttgctccgggtaattacctactgctggtacataccgacctccccccataccctgacatccttctccgctgcggctcacgggtgggcctgtcctttccgttcctccccagtcccggtcagaaccaggggtgtgactggtttttcaacagtcaacttagacagttaacatatttggtgtcaggcgagggtcaggttcaggtgattttgcgtgtcaaggaaggcatgccccctactatcagtgcatcgaccagcgctcccgagagcgccctgaagtggtctctccccgagacttggcaaggagttgaagagggttggggcggctacaacaacacaatcccagggcctggggatgacgtgctaatattacccaatcgaactgtcctcgtggatacagatctcccctttttcaaaggactttacgtgatgggaacattggactttccggtggatcgtagtaacgtactgtccgtagcttgtatggtgattgctggcggagagttaaaagttggaacacttgagaatccactggagaaagagcagaaactcctgatcctgttgagagccagcgaaggtgtcttttgcgaccggatgaatggcatccatatcgaccccggtaccataggcgtgtacggcaaggtgcacttgtattccgcgtatcctaagaactcatggacacatttaggagccgacattgcctcgggaaatgagagaatcattgtggaggatgccgtggactggaggcctcacgataaaattgtgctttcctccagctcatatgaaccacacgaagctgaggtcctcaccgtcaaagaagtgaagggacatcacgttcgtatatacgagcggctcaaacacagacatatcgggagcgtgcatgttaccgaggacggacggcacatccgcttggctgctgaagtcgggctgcttactaggaacatacaaatccaacccgacgtcagctgcagaggtcggctcttcgtcggaagcttccgcaagagctcacgtgaggaattctcaggagtccttcagttactaaacgtggaaatacagaattttggtagccccctgtactcctcagttgagtttagtaacgtgtctgctggaagctggatcatcagctcaaccctgcaccagagctgcggcggaggcattcatgcagccgcctctcacggcgtgcttcttaatgacaacatcgtcttcggcacagccgggcatggcatagaccttgaagggcaagcctataccgtgaccaacaatctcgtggtgctcatgactcaaccagcatggagcaccatttgggtcgccggtatcaaggtcaaccaagtaaaggatataaacttgcatggaaacgttgtggcgggctctgaacgcctgggattccacattcgcgggcataaatgtagctcttgcgagttgctctggagcgacaatgttgcccactcctctctccatggcctgcacttatacaaggagtcaggactggacaactgtacccggatatcaggattcctggctttcaaaaactttgattatggtgccatgctccacgtcgagaattcggtcgagattgagaatataacgctagtggataataccattggactgttggccgtagtttacgtttttagtgcccctcagaattctgtcaaaaaggtgcagattgtgctgcggaactccgtgatcgtcgcgacatcctctagtttcgactgtatccaggacaaggtgaaaccccatagtgcaaacctcacgtccactgatcgcgcaccatctaacccgcggggaggcagaattggcattctgtggcctgtcttcacctcggagccaaatcagtggccacaggagccgtggcataaggtgcgcaatgaccatagcatctccggtattatgaagctgcaggacgtaacctttagctcctttgttaagtcctgctatagtgatgacctggacgtctgtattcttccaaatgctgagaactctggcatcatgcatcccatcactgcggaacggacaaggatgttaaaaattaaggacaaaaacaaattctacttcccttcactgcaaccccgcaaagaccttggtaaagttgtgtgtcctgagctggactgtgcatcccctcgaaagtacctgttcaaagacctggacgggagggcgcttggcctgcccccgccagtatcagttttccctaagaccgaggctgaatggaccgcctccttttttaatgcagtcaccactgagcaggcactgaaaataagtgagtag

SEQ ID NO: 247235 - DNA, 10191 bp, Artificial Sequence
  derived and/or modified sequence
atgaccgcttggctgatcagcctcatgtcaattgaagttttgttacttgcagtgcgccacctgagtttgcatatcgaacctgaagagggttcgctggcggggggaacatggatcacagtaattttcgacggtctggagctcggcgttttataccctaacaacgggtcccagttggagatccacctggttaacgtgaacatggtcgtgccagcattgagaagcgtaccctgtgacgtcttccccgtttttctggacttgcctgtcgtgacatgcagaacaaggtccgtcctgagtgaagcgcacgagggactgtacttcctcgaggcttactttggcggtcagttagtgtcctcgcccaacccagggcctcgagactcgtgcaccttcaaattttccaaagcccagacacctatcgttcaccaggtctatccaccgagcggagtacccggcaagttgatccatgtgtacgggtggataatcacaggaaggctggagaccttcgattttgatgccgagtacatcgactcccctgttatcttggaggcccagggcgataagtgggtaaccccatgtagcctcattaatcggcaaatggggtcttgctaccctatccaggaggatcacggtttaggtacgctgcaatgccacgtcgagggagactacattggtagccagaacgtttcttttagcgtcttcaataaaggcaagtcgatggtccacaaaaaggcatggctcataagcgcgaaacaggacctgtttctctaccagactcattctgaaatattgagcgttttccccgagactggctctctcggtggcagaacaaatattacaatcacaggcgacttttttgacaacagcgcccaagtcaccatcgcgggaattccttgtgatattaggcacgtgagtccccgtaagattgagtgcacaaccagagcacctgggaaagacgtgcgcctaaccacgccacagcctggcaacagggggctgctgttcgaagtgggcgatgccgtcgaagggctcgagctgaccgaggctacccctgggtacaggtggcagattgtgcccaatgcctctagtccctttggcttctggagccaagaggggcagcccttccgcgcaaggctctccggattctttgtggctcccgaaaccaacaactacaccttttggatccaggcagactcccaggcaagtctgcacttttcgtggtccgaggagcctcggacaaaagttaaggtggcaagcatcagcgtgggtaccgccgattggtttgactcctgggagcagaaccgcgacgaaggcacttggcagcagaagactcctaaactggagctgctgggtggtgccatgtactacctggaggccgagcatcatgggatcgcgccgtcccgcggaatgagaatcggagtccaaattcacaacacatggctcaaccccgatgtggtcaccacttacttgagggaaaaacaccagatccgcgtcagggcccagcgcttgcccgaagtccaggtgttaaatgttagcgggaggggcaatttcttcctgacgtgggataacgtatctagtcaacctataccagccaacgcaaccgcacaccttattcagactaccatagaggagctgctcgcagtgaagtgcaagctggagcccctgtggtctaatattctcctgcggttaggctttgagcggggtccggaggtgtcaaacagtgacggcgatctgacttccgggaccgagccgttctgcggccgcttcagcttgaggcagcctcggcacctggtgctcaccccaccagccgcacagaaagggtatcgcctggaccaatatacgcacttgtgtttagcctataaagggcacatgaataagattctgaagatgattgttagttttacgattggctttcagaacatggtgaagaacactacctgtgattggtctcttactagaacatctcctgaaagctggcagtttgactgcacagacctttgggaaacctgtgtgagatgcttcggggacctgcagccaccacccgcgaactctcctgttttagtccatcagattaacctgctcccactggcccaggagaccggcttattttacgtcgatgagatcatcattgccgacacaaatgtaactgtgagccaggctgattccggaaccgcaaggccaggtgggaacctcgtcgaatcagtcagcgtggttggttctcctccagtgtattctgtgactagttggttggccggctgtgggactgaacttcctttgatcaccgcaagaagtgtgccaacagaggggaccgaggaaggttccggtctagtgcttgtgaccacgcagaggcggcagcgaacgtctcccccactcggaggacacttccgcattcaacttcccaatacagtgattagcgacgtcccagtccagatttccgcccaccacctgcaccagctcctgcagaacaacgctgatgattttacttctaggtacttgaacgcctcagactttacagtcaaagaagacctctacacctgttatgagcacgtctggacattgagctggagcacgcagattggcgaccttccgaatttcatcagagtgtccgatgagaatctgacaggtgtgaaccccgccgctgcaacccgggtggtctacgacgggggagtgtttctgggccctattttcggggacatgctggccactgcaaatcagcacacacaagtcgtggtgagagtaaatgacgtgcccgcccattgccccggatcttgctccttccaatacctacagggatccactccatgcgtccattctgtatggtattctatagacggggatattaaccttatgatctacattaccggcacaggttttagcggagactcccagttcctgcaagttactgtgaataagacatcttgcaaggtcatattctctaaccagaccaatgtcgtttgccagacagaccttttgcccgttgggatgcaccggatcctgatgttggtgcgacccagtggtctagctatttctgccaccggtgaggatttgttcttgaacgtaaagccgcgcttggatatggtcgaaccgagtagggccgccgatataggggggttatgggccactattcggggctcttctctggagggggtctccctgatactatttggttcctacagttgcgctataaacgtggccacatcaaacagctcaagaattcagtgtaaggtaccaccgcgggggaaggatgggagaatcgtgaatgtgacggtcatcagaggagattatagcgccgtgctcccccgcgcctttacatacgtcagttcactcaaccccgtcattgtaacactgtcgcgtaacatcagtaacattgcgggtggggaaacactcgtaatcggtgtggcgcgtctaatgaattacaccgacttagatgttgaagtgcacgtgcaagacgctctcgcccctgtacacactcagagcgcatggggccttgaagtggcattgccccctctccctgccggcctgcaccgtatcagcgtgtcgatcaacggcgtatccatacattcacagggtgtggacttgcatatacagtatctgaccgaggtgttttcaattgaaccttgttgcggctcgcttctcggtggcacaattctgtccatctccggcatcggcttctctcgcgacccggcgcttgtttgggtcctcgtaggtaataggtcctgtgatatcgtgaatttgaccgaagcttctatctggtgcgaaacactgcctgcacctcagatccccgatgcaggagctcccacagtgccggcagcagtagaggtttgggctgggaatcggtttttcgcacgaggccctagcccaagccttgtaggcaaaggattcacatttatgtacgaggccgcagccaccccagtggtgacagcaatgcagggagagattactaatagctcactttccctccatgtggggggcagcaatctgtcaaattccgttattctcctgggaaacctgaactgcgacgtggaaacacagagttttcagggtaacgttagtctgagtggatgttccatacccctccactccctcgaagccggcatatacccactgcaggtgaggcagaagcaaatgggatttgctaatatgagcgtggtgctacagcagtttgctgttatgccaagaataatggccatttttccttcccagggttctgcatgtgggggaacaattctgactgtgcgcggacttctacttaattcaagaaggagatccgtcagggtggatttgtccggtcctttcacctgtgtcatcctcagtctcggtgatcacacaatcctgtgtcaggtttctctcgagggagacccactgccaggggcttctttttctttgaacgtaactgtcctagtgaacgggctaaccagcgagtgtcagggcaactgcacactgttcattagagaagaagcaagccctgttatggatgccctatccactaacacaagcggctcactcacaacagtgctgatcagggggcaaagactcgcaaccaccgcagacgaaccgatggtgtttgtggacgatcagctaccttgtaatgtgactttcttcaatgcttcccacgttgtttgtcaaactagagacttagctcccgggccacactacctgtccgtgttctatacacggaatggatacgcctgtagtggtaatgtatccagacacttctacatcatgccacaagtttttcactactttcctaaaaactttagcctgcatggcgggagcctcctgacaatagagggcacaggcctccgcggccagaatacgacatccgtctacattgatcagcagacttgtttgaccgtgaacattggtgccgaactcatcaggtgcatcgtgcccacagggaacggaagtgtcgcactggagattgaggtggatggtttgtggtaccacatcggggttattggttacaacaaggccttcactcccgaattgatcagtattagtcaaagtgacgacatcctgacattcgcggtggcacagattagtggggccgccaatatagatatttttattggtatgagcccttgcgtgggggtaagcgggaatcatacagtgctccaatgtgtggtcccgtctctgcccgctggagagtaccatgtgaggggatacgattgtatccgaggctgggcgagttcggctttagtttttacttcacgggtgatcattacagccgttactgagaatttcggctgtctgggaggccgcctggtccacgtcttcggtgcagggttttcaccggggaatgtgtccgccgccgtatgcggagcaccctgccgagtcctcgccaacgcaacagtgagtgcgttctcatgcctcgtcctgcccctagatgtgagccttgctttcctttgcggcctcaaacgagaggaggactcctgcgaagccgctcgccatacctacgtacagtgcgatctcacagtggccatggctacggagcagttactcgagtcatggccctatctttatatatgcgaggaatcctcacagtgtcttttcgttcccgaccattgggctgaaagcatgttcccttctttcagtggcctgttcatctcccctaagctcgagagagacgaggtgcttatctacaactcttcttgtaatattaccatggaaacagaggcggagatggaatgcgaaacgccaaatcaacctatcacagttaagatcactgaaattaggaagcgttgggggcagaatacccagggaaactttagtctccagttctgtagacgctggagccgtacacattcctggttccccgagagacttccacaagacggcgacaatgtgacagtggagaacggacaactcttactgctggacactaacacatcaattctgaacttgcttcacatcaaaggcgggaaactcatcttcatggcaccaggcccaatcgaattaagggcccacgcaattctcgtgtcagatggtggggaactcaggattggatctgaagacaagccattccaaggcagggcccagattacgttgtacggatcttcctattcaaccccgtttttcccttacggggtgaagtttctggcagtgcgcaacggaacactgagcctccacggttcgctgcccgaggttatagtaacctgcctgagagcgacagcccatgccctcgacacagtgctggccctcgaggatgccgtggattggaaccctggagacgaggtcgtgatcatcagcggcaccggggtcaagggagctaagcctatggaagaaatcgtgactgtagagaccgtacaggacacagacctctacctgaaatctcccctgagatacagccataactttactgagaattgggtcgccggtgagcaccacattcttaaagcaacagtcgcactccttagtcgctctatcactatccagggtaacttgacgaacgagcgcgagaagcttctcgtgtcatgccaggaggccaacgctcctgaggggaacctacagcactgcctgtactccatgtccgagaaaatgctgggcagtcgcgacatgggagcaagggttatcgtgcagtcgttcccagaggaacccagccaggtgcagctgaaaggcgtgcaatttcaggtcctcgggcaggcctttcacaagcatttgtcctcactcaccttagtaggagctatgagggaaagcttcatccagggatgcacagttaggaattctttctctcgcgggctgagcatgtgcggaacactcggcctgaaggtcgactccaacgtgttttacaatatcctgggccacgcactgctcgtggggacatgtacagaaatgcgctatatcagctgggaggccattcacgggagaaaggatgattggtcaggacacggcaacatcatcaggaacaatgtgatcattcaggttagcggagccgaggggcttagcaatccggagatgttgactccctccggaatatacatctgctctcctacaaacgttatcgaagggaacagggtgtgtggagctgggtacggttattttttccatcttatgaccaatcagaccagccaagcaccactgttgtcatttacacagaatatagctcacagctgtactcggtatgggctctttgtgtaccccaaattccagcccccatgggataacgttactggcacgaccctgttccagagctttacggtctgggagagtgcaggaggcgcccagatctttcggtccagcaacctccgcctgaaaaactttaaagtctatagttgccgcgattttggcatcgacgtactggaatccgacgccaacacaagcgtaacagattccctgctcctcggccattttgcacacaagggcagcttatgtatgagtagcgggataaagaccccaaaacggtgggaactgatggtctccaacaccaccttcgttaacttcgatctgataaattgcgtggcaatccggacctgtagcgattgcagccagggccaaggcggatttaccgtaaaaacatcccagttaaaattcacgaactccagtaacttggtcgcttttccttttcctcacgccgcaattctcgaggatcttgacgggtccctgtctggaaagaaccggtctcacatccttgcgtccatggaaactctctcagcctcctgcctcgtgaacagttccttcgggcgcgttgtgcacggaagcgcctgcggcgggggcgtcctctttcatcggatgtctatcggactggcgaatacccctgaagttagctatgatctgaccatgacggacagcaggaataaaactaccaccgtcaactatgtccgtgacaccttgagtaatcctagaggctggatggccctgttgctcgaccaggaaacatacagcctccagagcgagaatctgtggattaacaggtcgctgcaatacagtgcgacctttgataactttgcccccggaaactacttactgctcgtgcacactgatctgcccccctatccagatattcttctgcgttgcggctcacgagtgggtctgagcttcccctttcttccgtctcccggacaaaaccagggctgcgattggttttttaattctcagttacgtcagctgacctacctggtatccggcgaaggtcaggttcaggtgatcttacgcgtaaaggaaggtatgccgcctaccatttccgcatcaacaagcgcaccagagagtgcactaaaatggagtttaccagaaacctggcagggggtggaagaggggtggggcggttacaacaatacaatccccgggcctggggatgacgtcttaatccttcctaatcgaaccgtattggtggatacggatctgccgtttttcaagggcctgtacgttatgggaaccctcgacttccctgtagatcggagtaacgtgttatcagtcgcttgcatggtgatcgctgggggagagctcaaggttggaactcttgagaaccctcttgaaaaggagcagaagctgcttattctactgcgggctagcgaaggcgtgttctgtgataggatgaacggaattcatatcgatccaggtacaataggggtgtatggcaaagtccatctgtacagcgcatatcctaaaaacagttggacccacttaggtgcagacatcgcttcaggtaacgaacgaatcatcgtcgaggatgccgtcgattggagacctcatgataaaatcgtgttgagctccagctcctacgaacctcacgaggccgaagtgctgaccgtaaaggaggtcaaaggccaccacgtgcgtatctatgaaagactgaaacaccgacacattgggtccgttcatgtgacggaggacggtcgccatatcagattagcagccgaggtcggactactgacacgaaacatacagatccagcctgacgtgtcttgtcgagggcggctgtttgtagggagctttcgtaagtcctcaagggaggagtttagcggcgtcctccagctccttaatgtggaaatccagaacttcggttcgcccctgtactcgagtgttgaattctctaatgtgtctgccggaagctggatcatctcgtcaacgttacatcagtcctgtggcgggggcatccatgcggcagcctcacacggcgtgctcctgaacgacaatatcgtttttggtaccgctggtcacggcatcgacctcgagggtcaagcttacacggtcacaaacaatctggtggttttgatgacacagcccgcatggtcaacgatttgggtcgctggaataaaagtaaaccaggtgaaggatatcaatctacatggaaacgttgtcgcaggctctgagcggcttggatttcatatcagaggtcataaatgctcctcttgcgaactactttggagcgacaatgtggcccattccagcctgcacggcctacacctgtataaggagagtggactagacaattgcaccagaatcagtggtttcctcgccttcaaaaatttcgattacggggccatgcttcatgttgagaactcagtcgaaattgagaatattactctggtcgataatacgattgggctgctcgcagttgtgtacgtttttagcgccccgcagaatagtgtgaagaaggtgcagattgtcttacgcaacagcgtcattgtcgcaacatcctcaagcttcgattgcatccaagataaggttaagcctcatagtgccaacctgacatcaaccgatcgtgccccgtcaaaccctcgcggaggcaggattggcattctgtggccagtgttcacaagtgaacccaatcagtggccgcaggaaccatggcacaaggtgagaaatgatcatagcatcagcggcattatgaaattgcaggatgtcaccttctcttcatttgtgaaatcgtgctactctgacgatttagacgtgtgcatcctgcccaatgcagagaattcaggcattatgcatcccattaccgcagagcgtaccaggatgctgaaaattaaggacaagaacaagttctatttcccgagtctgcaaccaagaaaagatctgggcaaagtagtgtgccctgagctggactgtgcttctcctcggaagtatctgtttaaagacttggacgggagagcactcggtttacctcccccagtgtcagtattccccaagaccgaagccgaatggacagcttcattcttcaacgcaggcaccaaagagcaatctatcgagatcaatgtatag

SEQ ID NO: 247236 - DNA, 10191 bp, Artificial Sequence
  derived and/or modified sequence
atgacagcctggctgatcagcctgatgagcattgaggtgctgctgctggccgtgcgccacctgagcctgcacatcgagcctgaggagggcagcctggccggcggcacctggatcaccgtcatctttgatggcctggagctgggcgtgctgtaccccaacaacggcagccagctggagatccacctggtgaatgtgaacatggtggtgcctgccctgcggtctgtgccctgtgatgtgtttcctgtgttcctggacctgcctgtggtgacctgcaggaccaggtctgtgctgtctgaggcccacgagggcctgtacttcctggaggcctactttggaggccagctggtgagcagccccaaccctggcccccgggacagctgcaccttcaagttcagcaaggcccagacccccatcgtgcaccaggtgtacccacccagcggcgtgcctgggaagctgatccacgtgtatggctggatcatcaccggccgcctggagacctttgattttgatgctgagtacatcgacagccctgtgatcctggaggcccagggcgacaagtgggtgaccccctgcagcctcatcaaccggcagatgggcagctgctaccccatccaggaggaccacggcctgggcaccctgcagtgccacgtggagggggactacatcggcagccagaatgtgtccttcagcgtcttcaacaagggcaagtccatggtgcacaagaaggcctggctgatcagcgccaagcaggacctcttcctgtaccagacccacagcgagatcctgtctgtgtttcctgagaccggcagcctgggcggccgcaccaacatcaccatcaccggggacttctttgacaacagcgcccaggtgaccatcgccggcatcccctgtgacatcagacatgtgagccccaggaagattgagtgcaccacccgggcccctgggaaggatgtgcggctgaccaccccccagcccggcaacagaggcctgctgtttgaggtgggagatgctgtggagggcctggagctgacagaggccaccccaggctaccgctggcagatcgtgcccaatgccagcagccccttcggcttctggagccaggagggccagcccttccgggcccggctgagcggcttctttgtggcccctgagaccaacaactacaccttctggatccaggccgacagccaggccagcctgcacttctcctggagcgaggagcccaggaccaaggtgaaggtggccagcatctctgtgggcacagctgactggtttgacagctgggagcagaacagagatgagggcacctggcagcagaagacccccaagctggagctgctgggcggggccatgtactacctggaggccgagcaccacggcatcgcccccagccggggcatgagaattggagtgcagatccacaacacctggctgaacccagatgtggtgaccacctacctgcgggagaagcaccagatccgggtgcgggcccagaggctgcctgaggtgcaggtgctgaatgtgtctggccggggcaacttcttcctgacctgggacaacgtgagcagccagcccatcccagccaatgccacagcccacctgatccagaccaccatcgaggagctgctggccgtgaagtgcaagctggagcccctgtggagcaacatcctgctgcggctgggctttgagcggggccctgaggtgagcaacagtgatggagacctgaccagcggcacagagcccttctgtggccgcttcagcctgcggcagcccaggcacctggtgctgaccccacctgctgcccagaagggctaccgcctggaccagtacacccacctgtgcctggcctacaagggccacatgaacaagatcctgaagatgattgtgtccttcaccatcggcttccagaacatggtgaagaacaccacctgtgactggagcctgaccaggaccagccctgagagctggcagtttgactgcacagacctgtgggagacctgtgtgcgctgctttggagacctgcagcccccaccagccaacagccctgtgctggtgcaccagatcaacctgctgcccctggcccaggagaccggcctcttctacgtggatgagatcatcatcgctgacaccaacgtgacagtgtcccaggccgacagcggcacagcccggcctgggggcaacctggtggagagcgtgtctgtggtgggcagcccccctgtgtacagcgtgacctcctggctggccggctgcggcacagagctgcccctcatcacagcccggtctgtgcccacagagggcacagaggagggcagcggcctggtgctggtgaccacccagaggcggcagaggaccagcccccccctgggcggccacttccgcatccagctgcccaacacagtcatcagtgatgtgcctgtgcagatcagcgcccaccacctgcaccagctgctgcagaacaatgctgatgacttcaccagccgctacctgaatgccagtgacttcaccgtgaaggaggacctgtacacctgctatgagcacgtgtggaccctgtcctggagcacccagatcggggacctgcccaacttcatccgggtgtctgatgagaacctgactggagtgaacccagctgctgccaccagggtggtgtatgatggcggcgtcttcctgggccccatctttggagacatgctggccacagccaaccagcacacccaggtggtggtgcgggtgaatgatgtgcctgcccactgccccggcagctgcagcttccagtacctgcagggcagcaccccctgtgtgcacagcgtgtggtacagcattgatggagacatcaacctgatgatctacatcactggaacaggcttcagcggggacagccagttcctgcaggtgacagtgaacaagaccagctgcaaggtgatcttcagcaaccagaccaacgtggtgtgccagacagacctgctgcctgtgggcatgcaccgcatcctgatgctggtgcggcccagcggcctggccatcagcgccactggagaagatctcttcctgaatgtgaagccccggctggacatggtggagcccagcagagctgctgacatcggcggcctgtgggccaccatccggggcagcagcctggagggcgtgtccctcatcctgtttggcagctacagctgtgccatcaacgtggccaccagcaacagcagccgcatccagtgcaaggtgcccccccggggcaaggatggccgcatcgtgaatgtgaccgtcatccggggggactacagcgctgtgctgccccgggccttcacctacgtgagcagcctgaaccctgtgattgtgaccctgagcaggaacatcagcaacattgctggaggagagaccctggtgattggagtggcccggctgatgaactacacagacctggatgtggaggtgcacgtgcaggatgccctggcccctgtgcacacccagagcgcctggggcctggaggtggccctgccccccctgcctgctggcctgcaccgcatctctgtgtccatcaatggagtgtccatccacagccagggcgtggacctgcacatccagtacctgacagaggtgttcagcattgagccctgctgcggcagcctgctgggcggcaccatcctgagcatctctggaattggcttcagccgggaccctgccctggtgtgggtgctggtgggcaacagaagctgtgacatcgtgaacctgacagaggccagcatctggtgtgagaccctgcctgccccccagatcccagatgctggggcccccaccgtgcctgctgctgtggaggtgtgggccggcaaccgcttctttgcccggggccccagccccagcctggtgggcaagggcttcaccttcatgtatgaagctgctgccacccctgtggtgacagccatgcagggcgagatcaccaacagcagcctgagcctgcacgtgggcggcagcaacctgagcaacagcgtcatcctgctgggcaacctgaactgtgatgtggagacccagagcttccagggcaatgtgtccctgagcggctgcagcatccccctgcacagcctggaggccggcatctaccccctgcaggtgcggcagaagcagatgggctttgccaacatgtctgtggtgctgcagcagtttgctgtgatgccccgcatcatggccatcttccccagccagggcagcgcctgtggcggcaccatcctgactgtgcggggcctgctgctgaacagcagaagaagatctgtgcgggtggacctgagcggccccttcacctgtgtgatcctgagcctgggggaccacaccatcctgtgccaggtgtccctggagggggaccccctgcccggggccagcttcagcctgaatgtgacagtgctggtgaatggcctgaccagcgagtgccagggcaactgcaccctcttcatccgggaggaggccagccctgtgatggatgccctgagcaccaacaccagcggcagcctgaccaccgtgctgatccggggccagaggctggccaccacagcagatgagcccatggtgtttgtggatgaccagctgccctgcaatgtgaccttcttcaatgccagccacgtggtgtgccagacccgggacctggcccctggcccccactacctgtctgtgttctacaccagaaatggctacgcctgcagcggaaatgtgagccgccacttctacatcatgccccaggtgttccactacttccccaagaacttcagcctgcacggcggcagcctgctgaccatcgagggcaccggcctgcggggccagaacaccacctctgtgtacatcgaccagcagacctgcctgactgtgaacatcggggctgagctgatccgctgcatcgtgcccactggaaatggatctgtggccctggagattgaggtggatggcctgtggtaccacatcggggtcatcggctacaacaaggccttcaccccagagctgatcagcatcagccagagtgatgacatcctgacctttgctgtggcccagatcagcggggccgccaacatcgacatcttcatcggcatgagcccctgtgtgggcgtgtctggcaaccacacagtgctgcagtgtgtggtgcccagcctgcctgctggggagtaccacgtgcggggctatgactgcatccggggctgggccagcagcgccctggtgttcaccagcagggtcatcatcacagctgtgacagaaaattttggctgcctgggcggccgcctggtgcacgtgtttggagctggcttcagccctggaaatgtgtctgctgctgtgtgtggggccccctgccgggtgctggccaatgccaccgtgtctgccttcagctgcctggtgctgcccctggatgtgtccctggccttcctgtgtggcctgaagcgggaggaggacagctgtgaggccgcccggcacacctacgtgcagtgtgacctgactgtggccatggccacagagcagctgctggagagctggccctacctgtacatctgtgaggagagcagccagtgcctgtttgtgcctgaccactgggccgagagcatgttccccagcttcagcggcctcttcatcagccccaagctggagagagatgaggtgctgatctacaacagcagctgcaacatcaccatggagacagaggccgagatggagtgtgagacccccaaccagcccatcaccgtgaagatcacagagatcaggaagcgctggggccagaacacccagggcaacttcagcctgcagttctgccgccgctggagcaggacccacagctggttccctgagcggctgccccaggatggagacaacgtgacagtggagaatggccagctgctgctgctggacaccaacaccagcatcctgaacctgctgcacatcaagggcggcaagctgatcttcatggcccctggccccatcgagctgcgggcccacgccatcctggtgtctgatggaggagagctgcgcatcggcagcgaggacaagcccttccagggccgggcccagatcaccctgtatggcagcagctacagcacccccttcttcccctatggagtgaagttcctggccgtgagaaatggcaccctgagcctgcacggcagcctgcctgaggtgattgtgacctgcctgcgggccacagcccacgccctggacacagtgctggccctggaggatgctgtggactggaaccctggagatgaggtggtgatcatcagcggcaccggggtgaagggggccaagcccatggaggagatcgtgacagtggagaccgtgcaggacacagacctgtacctgaagagccccctgcgctacagccacaacttcacagagaactgggtggccggggagcaccacatcctgaaggccaccgtggccctgctgagccgcagcatcaccatccagggcaacctgaccaatgaaagagagaagctgctggtgtcctgccaggaggccaatgcccctgagggcaacctgcagcactgcctgtacagcatgtctgagaagatgctgggcagccgggacatgggcgcccgggtcatcgtgcagagcttccctgaggagcccagccaggtgcagctgaagggcgtgcagttccaggtgctgggccaggccttccacaagcacctgagcagcctgaccctggtgggcgccatgagggagagcttcatccagggctgcaccgtgagaaattccttcagccggggcctgtccatgtgtggcaccctgggcctgaaggtggacagcaatgtgttctacaacatcctgggccacgccctgctggtgggcacctgcacagagatgagatacatctcctgggaggccatccacggcaggaaggatgactggagcggccacggcaacatcatccggaacaacgtcatcatccaggtgtctggagctgagggcctgagcaaccctgagatgctgacccccagcggcatctacatctgcagccccaccaacgtgattgagggcaacagagtgtgtggggccggctacggctacttcttccacctgatgaccaaccagaccagccaggcccccctgctgtccttcacccagaacatcgcccacagctgcaccaggtatggcctgtttgtgtaccccaagttccagcccccctgggacaacgtgacaggcaccaccctcttccagagcttcaccgtgtgggagagcgctggaggagcccagatcttccgcagcagcaacctgcggctgaagaacttcaaggtgtacagctgccgggactttggaattgatgtgctggagagtgatgccaacacctctgtgacagacagcctgctgctgggccactttgcccacaagggcagcctgtgcatgagcagcggcatcaagacccccaagcgctgggagctgatggtgagcaacaccacctttgtgaactttgacctgatcaactgtgtggccatccgcacctgcagcgactgcagccagggccagggcggcttcaccgtgaagaccagccagctgaagttcaccaacagcagcaacctggtggccttccccttcccccatgctgccatcctggaggacctggatggcagcctgagcggcaagaacagaagccacatcctggcctccatggagaccctgagcgccagctgcctggtgaacagcagctttggccgggtggtgcacggcagcgcctgtggcggcggcgtgctcttccacaggatgagcatcggcctggccaacaccccagaggtgtcctatgacctgaccatgacagacagcaggaacaagaccaccaccgtgaactacgtgcgggacaccctgagcaacccccggggctggatggccctgctgctggaccaggagacctacagcctgcagagcgagaacctgtggatcaacagaagcctgcagtacagcgccacctttgacaactttgcccctggcaactacctgctgctggtgcacacagacctgcccccctacccagacatcctgctgcgctgtggcagccgggtgggcctgtccttccccttcctgcccagccctggccagaaccagggctgtgactggttcttcaacagccagctgcggcagctgacctacctggtgtctggagagggccaggtgcaggtgatcctgcgggtgaaggagggcatgccacccaccatcagcgccagcaccagcgcccctgagagcgccctgaagtggagcctgcctgagacctggcagggcgtggaggagggctggggcggctacaacaacaccatccctggccctggagatgatgtgctgatcctgcccaacagaacagtgctggtggacacagacctgcccttcttcaagggcctgtatgtgatgggcaccctggacttccctgtggacaggagcaatgtgctgtctgtggcctgcatggtgattgctggaggagagctgaaggtgggcaccctggagaaccccctggagaaggagcagaagctgctgatcctgctgcgggccagcgagggcgtcttctgtgacaggatgaatggcatccacatcgaccccggcaccatcggcgtgtatggcaaggtgcacctgtacagcgcctaccccaagaacagctggacccacctgggcgctgacatcgccagcggaaatgaaagaatcatcgtggaggatgctgtggactggaggcctcatgacaagatcgtgctgagcagcagcagctatgagccccatgaggccgaggtgctgactgtgaaggaggtgaagggccaccacgtgcgcatctatgaaaggctgaagcaccgccacatcggctctgtgcacgtgacagaagatggccgccacatccggctggccgctgaggtgggcctgctgaccaggaacatccagatccagccagatgtgtcctgccggggccgcctgtttgtgggcagcttcaggaagagcagccgggaggagttctctggagtgctgcagctgctgaatgtggagatccagaactttggcagccccctgtacagctctgtggagttcagcaatgtgtctgctggctcctggatcatcagcagcaccctgcaccagagctgtggcggcggcatccacgccgccgccagccacggcgtgctgctgaatgacaacatcgtgtttggaacagctggccatggaattgacctggagggccaggcctacacagtgaccaacaacctggtggtgctgatgacccagcctgcctggagcaccatctgggtggccggcatcaaggtgaaccaggtgaaggacatcaacctgcacggcaatgtggtggccggcagcgagcggctgggcttccacatccggggccacaagtgcagcagctgtgagctgctgtggagcgacaacgtggcccacagcagcctgcacggcctgcacctgtacaaggagagcggcctggacaactgcacccgcatcagcggcttcctggccttcaagaactttgattatggagccatgctgcacgtggagaacagcgtggagattgagaacatcaccctggtggacaacaccatcggcctgctggccgtggtgtatgtgttttctgccccccagaacagcgtgaagaaggtgcagatcgtgctgagaaattctgtgattgtggccaccagcagcagctttgactgcatccaggacaaggtgaagccccacagcgccaacctgaccagcacagaccgggcccccagcaacccccggggcggcagaattggcatcctgtggcctgtgttcaccagcgagcccaaccagtggccccaggagccctggcacaaggtgagaaatgaccacagcatcagcggcatcatgaagctgcaggatgtgaccttcagcagctttgtgaagagctgctacagtgatgacctggatgtgtgcatcctgcccaatgcagaaaattctggcatcatgcaccccatcacagctgagaggaccaggatgctgaagatcaaggacaagaacaagttctacttccccagcctgcagcccaggaaggacctgggcaaggtggtgtgcccagagctggactgtgccagccccaggaagtacctgttcaaggacctggatggccgggccctgggcctgcccccacctgtgtctgtgttccccaagacagaggccgagtggacagccagcttcttcaatgctgtgaccacagagcaggccctgaagatcagcgagtag

SEQ ID NO: 247237 - DNA, 10191 bp, Artificial Sequence
  derived and/or modified sequence
atgacagcctggctgatcagcctgatgagcattgaggtgctgctgctggccgtgcgccacctgagcctgcacatcgagcctgaggagggcagcctggccggcggcacctggatcaccgtcatctttgatggcctggagctgggcgtgctgtaccccaacaacggcagccagctggagatccacctggtgaatgtgaacatggtggtgcctgccctgcggtctgtgccctgtgatgtgtttcctgtgttcctggacctgcctgtggtgacctgcaggaccaggtctgtgctgtctgaggcccacgagggcctgtacttcctggaggcctactttggaggccagctggtgagcagccccaaccctggcccccgggacagctgcaccttcaagttcagcaaggcccagacccccatcgtgcaccaggtgtacccacccagcggcgtgcctgggaagctgatccacgtgtatggctggatcatcaccggccgcctggagacctttgattttgatgctgagtacatcgacagccctgtgatcctggaggcccagggcgacaagtgggtgaccccctgcagcctcatcaaccggcagatgggcagctgctaccccatccaggaggaccacggcctgggcaccctgcagtgccacgtggagggggactacatcggcagccagaatgtgtccttcagcgtcttcaacaagggcaagtccatggtgcacaagaaggcctggctgatcagcgccaagcaggacctcttcctgtaccagacccacagcgagatcctgtctgtgtttcctgagaccggcagcctgggcggccgcaccaacatcaccatcaccggggacttctttgacaacagcgcccaggtgaccatcgccggcatcccctgtgacatcagacatgtgagccccaggaagattgagtgcaccacccgggcccctgggaaggatgtgcggctgaccaccccccagcccggcaacagaggcctgctgtttgaggtgggagatgctgtggagggcctggagctgacagaggccaccccaggctaccgctggcagatcgtgcccaatgccagcagccccttcggcttctggagccaggagggccagcccttccgggcccggctgagcggcttctttgtggcccctgagaccaacaactacaccttctggatccaggccgacagccaggccagcctgcacttctcctggagcgaggagcccaggaccaaggtgaaggtggccagcatctctgtgggcacagctgactggtttgacagctgggagcagaacagagatgagggcacctggcagcagaagacccccaagctggagctgctgggcggggccatgtactacctggaggccgagcaccacggcatcgcccccagccggggcatgagaattggagtgcagatccacaacacctggctgaacccagatgtggtgaccacctacctgcgggagaagcaccagatccgggtgcgggcccagaggctgcctgaggtgcaggtgctgaatgtgtctggccggggcaacttcttcctgacctgggacaacgtgagcagccagcccatcccagccaatgccacagcccacctgatccagaccaccatcgaggagctgctggccgtgaagtgcaagctggagcccctgtggagcaacatcctgctgcggctgggctttgagcggggccctgaggtgagcaacagtgatggagacctgaccagcggcacagagcccttctgtggccgcttcagcctgcggcagcccaggcacctggtgctgaccccacctgctgcccagaagggctaccgcctggaccagtacacccacctgtgcctggcctacaagggccacatgaacaagatcctgaagatgattgtgtccttcaccatcggcttccagaacatggtgaagaacaccacctgtgactggagcctgaccaggaccagccctgagagctggcagtttgactgcacagacctgtgggagacctgtgtgcgctgctttggagacctgcagcccccaccagccaacagccctgtgctggtgcaccagatcaacctgctgcccctggcccaggagaccggcctcttctacgtggatgagatcatcatcgctgacaccaacgtgacagtgtcccaggccgacagcggcacagcccggcctgggggcaacctggtggagagcgtgtctgtggtgggcagcccccctgtgtacagcgtgacctcctggctggccggctgcggcacagagctgcccctcatcacagcccggtctgtgcccacagagggcacagaggagggcagcggcctggtgctggtgaccacccagaggcggcagaggaccagcccccccctgggcggccacttccgcatccagctgcccaacacagtcatcagtgatgtgcctgtgcagatcagcgcccaccacctgcaccagctgctgcagaacaatgctgatgacttcaccagccgctacctgaatgccagtgacttcaccgtgaaggaggacctgtacacctgctatgagcacgtgtggaccctgtcctggagcacccagatcggggacctgcccaacttcatccgggtgtctgatgagaacctgactggagtgaacccagctgctgccaccagggtggtgtatgatggcggcgtcttcctgggccccatctttggagacatgctggccacagccaaccagcacacccaggtggtggtgcgggtgaatgatgtgcctgcccactgccccggcagctgcagcttccagtacctgcagggcagcaccccctgtgtgcacagcgtgtggtacagcattgatggagacatcaacctgatgatctacatcactggaacaggcttcagcggggacagccagttcctgcaggtgacagtgaacaagaccagctgcaaggtgatcttcagcaaccagaccaacgtggtgtgccagacagacctgctgcctgtgggcatgcaccgcatcctgatgctggtgcggcccagcggcctggccatcagcgccactggagaagatctcttcctgaatgtgaagccccggctggacatggtggagcccagcagagctgctgacatcggcggcctgtgggccaccatccggggcagcagcctggagggcgtgtccctcatcctgtttggcagctacagctgtgccatcaacgtggccaccagcaacagcagccgcatccagtgcaaggtgcccccccggggcaaggatggccgcatcgtgaatgtgaccgtcatccggggggactacagcgctgtgctgccccgggccttcacctacgtgagcagcctgaaccctgtgattgtgaccctgagcaggaacatcagcaacattgctggaggagagaccctggtgattggagtggcccggctgatgaactacacagacctggatgtggaggtgcacgtgcaggatgccctggcccctgtgcacacccagagcgcctggggcctggaggtggccctgccccccctgcctgctggcctgcaccgcatctctgtgtccatcaatggagtgtccatccacagccagggcgtggacctgcacatccagtacctgacagaggtgttcagcattgagccctgctgcggcagcctgctgggcggcaccatcctgagcatctctggaattggcttcagccgggaccctgccctggtgtgggtgctggtgggcaacagaagctgtgacatcgtgaacctgacagaggccagcatctggtgtgagaccctgcctgccccccagatcccagatgctggggcccccaccgtgcctgctgctgtggaggtgtgggccggcaaccgcttctttgcccggggccccagccccagcctggtgggcaagggcttcaccttcatgtatgaagctgctgccacccctgtggtgacagccatgcagggcgagatcaccaacagcagcctgagcctgcacgtgggcggcagcaacctgagcaacagcgtcatcctgctgggcaacctgaactgtgatgtggagacccagagcttccagggcaatgtgtccctgagcggctgcagcatccccctgcacagcctggaggccggcatctaccccctgcaggtgcggcagaagcagatgggctttgccaacatgtctgtggtgctgcagcagtttgctgtgatgccccgcatcatggccatcttccccagccagggcagcgcctgtggcggcaccatcctgactgtgcggggcctgctgctgaacagcagaagaagatctgtgcgggtggacctgagcggccccttcacctgtgtgatcctgagcctgggggaccacaccatcctgtgccaggtgtccctggagggggaccccctgcccggggccagcttcagcctgaatgtgacagtgctggtgaatggcctgaccagcgagtgccagggcaactgcaccctcttcatccgggaggaggccagccctgtgatggatgccctgagcaccaacaccagcggcagcctgaccaccgtgctgatccggggccagaggctggccaccacagcagatgagcccatggtgtttgtggatgaccagctgccctgcaatgtgaccttcttcaatgccagccacgtggtgtgccagacccgggacctggcccctggcccccactacctgtctgtgttctacaccagaaatggctacgcctgcagcggaaatgtgagccgccacttctacatcatgccccaggtgttccactacttccccaagaacttcagcctgcacggcggcagcctgctgaccatcgagggcaccggcctgcggggccagaacaccacctctgtgtacatcgaccagcagacctgcctgactgtgaacatcggggctgagctgatccgctgcatcgtgcccactggaaatggatctgtggccctggagattgaggtggatggcctgtggtaccacatcggggtcatcggctacaacaaggccttcaccccagagctgatcagcatcagccagagtgatgacatcctgacctttgctgtggcccagatcagcggggccgccaacatcgacatcttcatcggcatgagcccctgtgtgggcgtgtctggcaaccacacagtgctgcagtgtgtggtgcccagcctgcctgctggggagtaccacgtgcggggctatgactgcatccggggctgggccagcagcgccctggtgttcaccagcagggtcatcatcacagctgtgacagaaaattttggctgcctgggcggccgcctggtgcacgtgtttggagctggcttcagccctggaaatgtgtctgctgctgtgtgtggggccccctgccgggtgctggccaatgccaccgtgtctgccttcagctgcctggtgctgcccctggatgtgtccctggccttcctgtgtggcctgaagcgggaggaggacagctgtgaggccgcccggcacacctacgtgcagtgtgacctgactgtggccatggccacagagcagctgctggagagctggccctacctgtacatctgtgaggagagcagccagtgcctgtttgtgcctgaccactgggccgagagcatgttccccagcttcagcggcctcttcatcagccccaagctggagagagatgaggtgctgatctacaacagcagctgcaacatcaccatggagacagaggccgagatggagtgtgagacccccaaccagcccatcaccgtgaagatcacagagatcaggaagcgctggggccagaacacccagggcaacttcagcctgcagttctgccgccgctggagcaggacccacagctggttccctgagcggctgccccaggatggagacaacgtgacagtggagaatggccagctgctgctgctggacaccaacaccagcatcctgaacctgctgcacatcaagggcggcaagctgatcttcatggcccctggccccatcgagctgcgggcccacgccatcctggtgtctgatggaggagagctgcgcatcggcagcgaggacaagcccttccagggccgggcccagatcaccctgtatggcagcagctacagcacccccttcttcccctatggagtgaagttcctggccgtgagaaatggcaccctgagcctgcacggcagcctgcctgaggtgattgtgacctgcctgcgggccacagcccacgccctggacacagtgctggccctggaggatgctgtggactggaaccctggagatgaggtggtgatcatcagcggcaccggggtgaagggggccaagcccatggaggagatcgtgacagtggagaccgtgcaggacacagacctgtacctgaagagccccctgcgctacagccacaacttcacagagaactgggtggccggggagcaccacatcctgaaggccaccgtggccctgctgagccgcagcatcaccatccagggcaacctgaccaatgaaagagagaagctgctggtgtcctgccaggaggccaatgcccctgagggcaacctgcagcactgcctgtacagcatgtctgagaagatgctgggcagccgggacatgggcgcccgggtcatcgtgcagagcttccctgaggagcccagccaggtgcagctgaagggcgtgcagttccaggtgctgggccaggccttccacaagcacctgagcagcctgaccctggtgggcgccatgagggagagcttcatccagggctgcaccgtgagaaattccttcagccggggcctgtccatgtgtggcaccctgggcctgaaggtggacagcaatgtgttctacaacatcctgggccacgccctgctggtgggcacctgcacagagatgagatacatctcctgggaggccatccacggcaggaaggatgactggagcggccacggcaacatcatccggaacaacgtcatcatccaggtgtctggagctgagggcctgagcaaccctgagatgctgacccccagcggcatctacatctgcagccccaccaacgtgattgagggcaacagagtgtgtggggccggctacggctacttcttccacctgatgaccaaccagaccagccaggcccccctgctgtccttcacccagaacatcgcccacagctgcaccaggtatggcctgtttgtgtaccccaagttccagcccccctgggacaacgtgacaggcaccaccctcttccagagcttcaccgtgtgggagagcgctggaggagcccagatcttccgcagcagcaacctgcggctgaagaacttcaaggtgtacagctgccgggactttggaattgatgtgctggagagtgatgccaacacctctgtgacagacagcctgctgctgggccactttgcccacaagggcagcctgtgcatgagcagcggcatcaagacccccaagcgctgggagctgatggtgagcaacaccacctttgtgaactttgacctgatcaactgtgtggccatccgcacctgcagcgactgcagccagggccagggcggcttcaccgtgaagaccagccagctgaagttcaccaacagcagcaacctggtggccttccccttcccccatgctgccatcctggaggacctggatggcagcctgagcggcaagaacagaagccacatcctggcctccatggagaccctgagcgccagctgcctggtgaacagcagctttggccgggtggtgcacggcagcgcctgtggcggcggcgtgctcttccacaggatgagcatcggcctggccaacaccccagaggtgtcctatgacctgaccatgacagacagcaggaacaagaccaccaccgtgaactacgtgcgggacaccctgagcaacccccggggctggatggccctgctgctggaccaggagacctacagcctgcagagcgagaacctgtggatcaacagaagcctgcagtacagcgccacctttgacaactttgcccctggcaactacctgctgctggtgcacacagacctgcccccctacccagacatcctgctgcgctgtggcagccgggtgggcctgtccttccccttcctgcccagccctggccagaaccagggctgtgactggttcttcaacagccagctgcggcagctgacctacctggtgtctggagagggccaggtgcaggtgatcctgcgggtgaaggagggcatgccacccaccatcagcgccagcaccagcgcccctgagagcgccctgaagtggagcctgcctgagacctggcagggcgtggaggagggctggggcggctacaacaacaccatccctggccctggagatgatgtgctgatcctgcccaacagaacagtgctggtggacacagacctgcccttcttcaagggcctgtatgtgatgggcaccctggacttccctgtggacaggagcaatgtgctgtctgtggcctgcatggtgattgctggaggagagctgaaggtgggcaccctggagaaccccctggagaaggagcagaagctgctgatcctgctgcgggccagcgagggcgtcttctgtgacaggatgaatggcatccacatcgaccccggcaccatcggcgtgtatggcaaggtgcacctgtacagcgcctaccccaagaacagctggacccacctgggcgctgacatcgccagcggaaatgaaagaatcatcgtggaggatgctgtggactggaggcctcatgacaagatcgtgctgagcagcagcagctatgagccccatgaggccgaggtgctgactgtgaaggaggtgaagggccaccacgtgcgcatctatgaaaggctgaagcaccgccacatcggctctgtgcacgtgacagaagatggccgccacatccggctggccgctgaggtgggcctgctgaccaggaacatccagatccagccagatgtgtcctgccggggccgcctgtttgtgggcagcttcaggaagagcagccgggaggagttctctggagtgctgcagctgctgaatgtggagatccagaactttggcagccccctgtacagctctgtggagttcagcaatgtgtctgctggctcctggatcatcagcagcaccctgcaccagagctgtggcggcggcatccacgccgccgccagccacggcgtgctgctgaatgacaacatcgtgtttggaacagctggccatggaattgacctggagggccaggcctacacagtgaccaacaacctggtggtgctgatgacccagcctgcctggagcaccatctgggtggccggcatcaaggtgaaccaggtgaaggacatcaacctgcacggcaatgtggtggccggcagcgagcggctgggcttccacatccggggccacaagtgcagcagctgtgagctgctgtggagcgacaacgtggcccacagcagcctgcacggcctgcacctgtacaaggagagcggcctggacaactgcacccgcatcagcggcttcctggccttcaagaactttgattatggagccatgctgcacgtggagaacagcgtggagattgagaacatcaccctggtggacaacaccatcggcctgctggccgtggtgtatgtgttttctgccccccagaacagcgtgaagaaggtgcagatcgtgctgagaaattctgtgattgtggccaccagcagcagctttgactgcatccaggacaaggtgaagccccacagcgccaacctgaccagcacagaccgggcccccagcaacccccggggcggcagaattggcatcctgtggcctgtgttcaccagcgagcccaaccagtggccccaggagccctggcacaaggtgagaaatgaccacagcatcagcggcatcatgaagctgcaggatgtgaccttcagcagctttgtgaagagctgctacagtgatgacctggatgtgtgcatcctgcccaatgcagaaaattctggcatcatgcaccccatcacagctgagaggaccaggatgctgaagatcaaggacaagaacaagttctacttccccagcctgcagcccaggaaggacctgggcaaggtggtgtgcccagagctggactgtgccagccccaggaagtacctgttcaaggacctggatggccgggccctgggcctgcccccacctgtgtctgtgttccccaagacagaggccgagtggacagccagcttcttcaatgccggcaccaaggagcagagcattgagatcaacgtgtag

SEQ ID NO: 247238 - DNA, 10191 bp, Artificial Sequence
  derived and/or modified sequence
atgaccgcctggctgatcagcctgatgagcatcgaggtgctgctgctggcggtccggcatctctccctccatattgaaccagaagaaggctctcttgcagggggcacctggatcacggtgatctttgacgggttggagttgggggtgctctaccctaataacggctcccaactggaaatacatttggtgaacgtgaacatggtcgtgcccgcactgcggtccgtgccgtgcgatgtgttcccagtcttcctcgacctgcccgtggtgacctgccgcacccggtccgtactttcagaggcgcatgaagggctgtatttcctcgaagcgtacttcggaggacaactggtgagctcacctaatcctggacctcgtgactcctgtacatttaaattctccaaagcccagacgccaattgtgcaccaagtgtatcccccaagtggtgtgcctggaaaattgatacacgtttacggatggatcatcactggaaggctggagactttcgatttcgatgcagagtacattgacagtcctgtgattcttgaggcccagggtgacaaatgggtgaccccttgtagcttgatcaatcgacagatgggaagctgctaccccatccaggaagaccacggcctgggcaccctgcagtgtcacgtggaaggtgactatattggctcccagaacgtgtcattttcggtattcaacaagggtaaatccatggtgcacaagaaggcctggctcatttccgccaaacaggatctgttcctgtaccaaacccactccgaaatcttatccgtgttccccgaaactggctccctgggcggacgaaccaatatcactatcacaggcgatttctttgacaattctgcccaggtaactatagcggggatcccttgcgatatccgtcacgtgtccccaagaaaaatcgaatgtaccactagggcaccgggcaaagatgtgcgcctgaccaccccccagcccgggaatcgcggcctgctttttgaagtgggtgacgctgtggaaggactcgagcttaccgaagctacccctggttatagatggcaaattgtgccaaacgctagctcccccttcggcttctggtctcaggaaggtcagcccttcagggcccggctcagtggcttttttgtggccccagaaactaataactacaccttttggatccaagccgacagccaagctagcctccactttagctggtcggaggaacctagaacaaaagtgaaagtcgcgtctatttccgtcgggacggcagactggtttgatagctgggagcaaaaccgcgatgaaggtacatggcagcagaagaccccaaagctggaattactgggcggcgcgatgtactatttggaagcagaacatcatggaattgcaccctcccgcgggatgagaatcggcgtccagattcacaacacctggctgaaccccgatgtcgtgaccacataccttcgcgaaaagcaccagatccgggtccgggctcaaaggctgcctgaagtgcaagtgcttaatgtgtccggacgcggtaacttttttcttacttgggataacgtgtcatcgcaacctattccagcaaacgccaccgctcacctaatccagaccaccatcgaagagctgctcgcggttaaatgcaaactggaacccctttggagcaacatcttgttgcggttgggcttcgagcgcggacccgaagtttctaattctgacggggaccttactagcggaaccgaacctttttgcgggcggtttagtctaaggcagccacggcacttggttctcacacctccagcggcccagaagggctatcggctggaccagtacacccacctttgcctggcatacaagggtcacatgaataaaatactcaaaatgatcgtgtcattcacaatcggttttcagaacatggtcaagaatactacctgtgattggtcactgacccggacttctcccgagtcatggcagtttgattgcacagatctgtgggagacctgcgtcagatgttttggcgacttacagccgccccccgctaactcccctgtgttggtccaccagataaatctgctgcccctggcccaggagaccggactgttttatgtggatgaaattataattgccgatacgaatgtcactgtatctcaggctgattctgggacggctcgaccaggaggcaatctggtggaaagtgtctctgtcgttgggagcccacccgtgtactctgtgacctcttggctggcaggttgtggcaccgaactccctctcataaccgctcggtctgtgcccaccgaagggacagaggaggggtctggactggtcctcgttaccactcagcggaggcaaagaacgtctcctcctcttggagggcactttcgtatacagctgccgaataccgtcatctcagacgttcctgtgcagatcagtgcccatcacctgcatcagcttcttcagaacaatgcagacgacttcacatctaggtacctgaatgcctccgatttcactgtgaaagaggacctgtacacctgctacgaacacgtgtggaccttaagttggtcaacacaaattggtgacttacctaatttcattcgggtgtccgacgagaatcttaccggcgtcaacccagctgccgctaccagagtggtatatgatggaggggtgtttctgggcccgatttttggtgacatgctggctaccgccaaccaacatacccaggtcgttgtcagagtaaatgatgtaccagctcactgtcccggaagttgctctttccagtacctgcagggcagcactccctgcgtccacagcgtgtggtatagcatcgacggcgatattaacctcatgatttatataacaggtacgggcttttctggggacagccagtttttacaagtgacagtcaataaaaccagttgcaaggtcatctttagtaatcagacaaacgtcgtttgccaaacagacctcctacccgtaggaatgcatagaattctgatgctggtcagacccagtggactagccatcagcgccactggcgaggacctctttctcaatgtgaaacccaggttagacatggtggaaccttctcgcgctgccgatatcggcggactatgggcgacaattaggggtagctcactggaaggagtatccctgattttgtttggctcctacagttgcgcaatcaacgtggccaccagtaatagctcccgcatccaatgcaaggtcccgcctagaggaaaagacggccgcatagtgaacgtgacggtgatccgtggggactactccgctgttctgccccgggcttttacctacgtgagcagcctgaatcccgtgattgtgaccttaagtcgtaatatctccaatatcgcggggggggagactcttgtgataggcgtcgcccgcctgatgaactacaccgacctggatgttgaggttcacgttcaagatgccctggctccagtacacactcagtcggcctggggattagaggtggcactgccccctctccctgcaggcctgcaccggatttcagtttccattaatggggtgtccatacatagccagggcgttgaccttcatattcaatacctgacggaggtcttctctattgagccctgctgcggctctctgctgggcggcacaattctttcaattagcgggataggtttttccagagaccccgctctggtctgggtgctcgtgggcaaccggtcctgcgacattgtgaatcttactgaggcaagcatctggtgtgagacgctgcccgctccccaaattcccgacgccggcgcaccaacagtgcctgcagcagtagaggtctgggcaggtaaccgatttttcgccaggggcccatctccctcgctggtggggaaaggctttacgtttatgtacgaagccgctgcgacgcctgtcgttaccgccatgcagggggagatcacaaatagtagtctctcactgcatgtaggagggagtaatctgtccaattcagtgattctattgggcaaccttaactgcgacgttgagactcagtctttccaggggaatgtgtcgctctccggttgctcaatccccctccatagccttgaagcggggatatacccactccaggtgagacagaaacagatgggattcgccaatatgtccgtggtgttacaacagttcgccgtgatgccgcggattatggctatcttcccatctcagggcagtgcctgtggcgggactatcctcactgtcaggggcctgctcttgaattcccgacgaagatcagtgcgagtagatctttcaggcccattcacttgcgtaattctctcgctgggggatcacacgatcctttgccaggtcagtttggagggtgatcctctccccggtgcctcgttcagtttaaacgtcactgttctagttaatggcctcacttccgaatgtcaagggaactgtacactttttatacgagaggaggccagccctgtgatggatgcactgtctaccaatacgtcaggctcactgacgacggttctgatcagggggcaacgacttgcaactaccgccgacgagcccatggttttcgttgatgatcagctgccttgtaacgtgacctttttcaatgcgagccacgtagtgtgtcagacacgggaccttgcccccgggccccactacctgagtgtgttttatactcgcaatggatacgcctgctcagggaacgtgagcaggcacttctacatcatgcctcaggtgtttcactacttccctaagaactttagccttcacggaggttcacttcttacaatagagggcactggcctgagaggccaaaatacgacaagcgtgtatattgatcagcaaacctgcctcaccgtgaatatcggggcagagctgattcgctgcatcgtcccgaccggtaacggatccgtggcactggagattgaggtggacgggctctggtatcatatcggcgtgattggttacaacaaggcttttacgcctgagctgattagcatctctcaaagcgacgatatcctgaccttcgctgtggcgcagatcagcggcgccgctaatattgacattttcattggtatgtctccatgcgtgggcgtttcaggtaatcacaccgtgctgcagtgtgttgtaccatccctgcccgcaggtgagtatcatgtgagggggtatgactgtatccgcggttgggcatcctcagcactggttttcactagtcgagtcatcatcaccgctgtaacagagaattttgggtgccttggaggaaggctcgtgcacgtgtttggggccggcttctccccaggcaatgtgtcagctgccgtgtgtggagctccttgccgcgtgttggcaaatgctactgtaagcgcgttcagctgcttagttctgcccctggatgtctctctcgcttttctctgcggtctgaagcgcgaagaggatagctgcgaagcagccagacatacctatgtgcaatgcgacctgactgtggccatggccacagagcaattgctggagagttggccttacttgtacatctgcgaggaatctagtcagtgcctcttcgtgccagaccattgggcagagtcgatgttccccagcttcagtggcctatttatctctcctaagctggaacgtgatgaagtcctaatatacaattcttcttgcaacattacgatggaaacagaggcagaaatggaatgtgagacccccaaccagcctatcaccgtgaagatcacggagatacggaaacgctggggccaaaacactcaaggaaatttctcactgcagttttgccggagatggtcaagaacacactcatggtttcccgagaggctcccgcaagacggcgacaacgtgaccgtggagaacggccagctcttgctgttggacaccaacacaagcatcctaaacctgctgcatatcaagggaggaaaacttatatttatggcccccggaccgatcgaacttagggctcacgccatccttgtttcagatggcggagagttgcgcatagggtccgaagataaacccttccaagggcgagctcagattaccctgtatgggagcagttactcaaccccattctttccttacggcgtgaaattcttggccgtgagaaatggtaccctgtcactgcacggcagcttacctgaggtcattgtgacctgtctgcgggctacagcccacgcgttggacactgtgttggccctcgaagacgccgtggactggaacccaggcgatgaggtggtcatcatcagcggcacaggcgttaagggggccaaacctatggaggaaatcgtgacagtcgagacggtccaggacaccgatctatacttgaagtcccccctgcgatatagtcataacttcacggaaaattgggtcgcaggagagcaccacatcctgaaggccaccgtggcgctgctctcaaggagcatcacaatacaggggaacctcaccaacgaacgagagaaattattggttagttgtcaggaggccaacgcccctgaagggaatttgcagcattgcctgtactctatgtccgaaaaaatgctcggatccagagatatgggagctcgcgttattgtccagtcctttcccgaggagccaagtcaggtgcagctgaaaggcgtgcaattccaggtgctggggcaggcgttccacaagcacctgagctcattgacattggtgggggcgatgcgagagagttttatccaaggatgtaccgtcagaaacagctttagccgtgggctcagcatgtgcggtactctggggctgaaggtggattctaatgtgttttacaacatcctcggccacgccctgctagttggcacctgtacggaaatgcgctatatcagttgggaggctatacacgggcggaaggacgattggtccggtcacggcaacatcattaggaacaacgtcatcattcaagtgtccggcgctgaaggattgagtaatccagagatgctcaccccttccggtatttatatatgttcacccacgaatgtcatcgaaggcaatagagtgtgcggggccggctacggttattttttccatctgatgaccaaccagactagtcaagcgccactgttgtctttcacccagaacatcgctcattcttgtaccagatacgggctgtttgtctaccccaagttccagcctccttgggataacgtcacaggcactaccctgttccagtctttcacagtttgggagagtgctggcggggcgcaaatatttcgcagttccaatcttcgtttaaaaaattttaaagtatactcctgccgggactttggcattgacgttttggagagtgatgctaatacgtccgtgacagactccctgcttctggggcactttgctcacaaagggtccctctgtatgagctcgggcatcaagacccctaagaggtgggaactgatggtttcaaacaccaccttcgttaactttgatttaatcaactgtgttgccatacggacctgttccgattgctcccaaggccagggtgggtttacagtgaagacgtcacagctgaagttcaccaattcatctaacctcgtggctttccccttcccccatgccgccattctcgaagacctggatggctctctcagtggcaagaataggtctcatatcctggcctctatggagacgttgagtgcctcttgcctcgtgaactccagcttcggcagagtcgtgcacggaagtgcctgcggtggtggggtccttttccatagaatgtcaatcggattggcaaacactcctgaggtaagctacgacctgacaatgacggattcacgtaataagaccaccacagtgaattatgtgagagatacactgtccaatcctcgcgggtggatggctttgctgctcgatcaggaaacctattctctgcagtccgagaacctgtggatcaatagaagccttcagtattcagcaacatttgacaacttcgcacccggcaactatttgctcctcgtgcacactgatctgcctccgtatcccgatattctgctgcgctgcggctccagggtgggactgtcgtttcctttccttcctagccctggccagaatcagggctgtgactggttcttcaatagccaattgcgccagctgacctatctagtctcgggagaagggcaggtgcaggtcatcctgagggtgaaagaagggatgccacccacgatcagcgcatctacatccgcacctgagagcgcattgaaatggagcctgccagagacttggcagggcgtggaggaaggttggggtggatacaacaacacaataccaggaccaggagatgacgtcctgatcctgccaaaccggaccgtcttagtggacactgatctgcccttcttcaagggactgtatgtcatgggaaccctcgattttcccgtcgaccgttcaaacgtgctaagcgtggcttgcatggtgatagctgggggggagctcaaggtggggactctagagaacccattggagaaggagcaaaagctgctaatcctcctacgggcctctgaaggcgtcttttgtgaccgcatgaatggtatccacattgatcctggaacaatcggggtctatggaaaggtccacctatactctgcctatccaaagaattcgtggacccatctgggcgccgatattgcatctggaaatgagagaatcattgtcgaggatgctgtggactggaggcctcacgataagatcgtactgagctctagcagctacgagccccacgaagctgaggtacttaccgtgaaggaggtgaagggtcaccatgtgaggatctatgaaaggcttaaacacaggcacattggtagcgtccacgtcaccgaggatggcaggcatattcggctcgcagcggaggtaggcctattgacacgcaatatacagatccagccagatgtttcatgccgcggcagactctttgtggggtcattccggaagagttcccgggaagaattctcgggagtgctgcagctgcttaacgtggagatacagaattttggaagccccctttactcaagcgtagaattctccaatgtgagtgccggctcttggatcatctcctcaaccttacaccagtcatgtggtggtgggatccacgcagccgcctctcacggggttctgctgaacgacaacatcgttttcggcacagccggccatggcatagatttagagggccaggcgtacactgtgactaacaacctcgtagtccttatgactcaacccgcctggagcacaatctgggtggctgggataaaggtaaaccaggtaaaggatatcaacttgcacggaaacgtggttgctggcagtgagcgcctggggttccacattcgcggccataaatgttcgagttgcgagttattgtggtcggacaacgtggcccactcaagtctccatggcctacatctctacaaggagagcggtctcgacaactgcacccgaatatctggctttcttgccttcaaaaatttcgattatggggctatgttacatgtggagaactcggtggagatcgagaacatcactcttgtggacaacacaattggtctgctggccgtcgtatatgtattctcagctccgcaaaacagcgtcaagaaggtgcaaattgtgttgaggaactccgttattgtagccacatcatcttccttcgattgcattcaggacaaggtcaagccccacagtgccaacctgactagcaccgatagggccccatccaatccccgaggggggcgtataggcattctctggcccgtcttcacaagtgaacccaatcaatggcctcaagaaccatggcacaaagtgagaaacgatcactcgatcagcggaatcatgaagttgcaggacgtcacattcagtagcttcgtgaaatcctgctattcggatgacctggacgtgtgcatcctcccaaatgcggagaattctgggattatgcacccaatcacagctgaacggacacggatgctcaagataaaagataagaacaagttctatttccctagtctgcagcctagaaaagatctgggcaaggtcgtgtgccccgaactcgactgcgcgtctcccagaaaatacttatttaaagacctcgacggccgtgcactgggacttccgcctccagtttcggtgttccccaagacagaagccgaatggacagcctcattctttaatgccgttacgactgaacaggctttaaagatttccgagtag

SEQ ID NO: 247239 - DNA, 10191 bp, Artificial Sequence
  derived and/or modified sequence
atgaccgcctggctgatcagcctgatgagcatcgaggtgctgctgcttgccgtcaggcacctctctctgcatatagagccagaggagggatccctcgcagggggcacctggatcaccgtcattttcgacggactggaactcggcgtcctgtaccccaataatggctcgcaacttgagatacacctcgtcaacgttaacatggttgtcccagcgctgagatcagtgccctgcgatgtgtttccggtgttcctcgatctcccagtggtaacctgccggaccagatctgtgctctccgaggcccacgagggtctctattttctggaggcctattttgggggtcaactggtgtcaagccctaaccccggtcctcgggattcttgtactttcaaattctccaaagcgcagacacccattgtgcaccaagtgtacccaccaagcggtgtccccggaaaactcattcacgtgtatggatggattatcaccgggcgcctcgagacatttgattttgatgcagaatatattgactcaccggtaattctggaagcccaaggcgacaagtgggtcactccctgctcactaattaatcggcaaatgggcagctgctatcccatccaggaggatcatggactggggacactccagtgccatgtggagggagattacatcggctcacagaatgtgagtttttcagtcttcaataagggcaaatccatggtgcacaagaaggcttggctcatatctgctaagcaagaccttttcctgtatcagacacactcagagatcttgagtgtgttcccggagacaggaagccttggagggagaaccaacataacgataacaggtgacttttttgacaattccgcccaggtgaccattgctggtatcccctgcgacattcgacacgtgtcccctcgcaaaattgagtgcacaactcgcgctcctggaaaggatgttcggctgactactccccagcccggcaatcgcggcctgctttttgaggtgggcgacgcagtagaaggcctcgagttaaccgaagccaccccgggctaccgctggcaaatcgtccctaatgcttcctcaccctttgggttctggtctcaagaagggcagccttttcgcgcgagactgtctgggttttttgtggctccagagacaaataactacacgttttggatacaggccgatagccaagctagtctccactttagctggtccgaagaacctaggacaaaggtgaaggtggcaagcatctctgtcggcacggctgattggtttgatagctgggagcaaaacagagacgaaggcacttggcagcaaaaaacccccaaattagagttgctgggaggcgcaatgtactacctagaagccgaacatcacgggattgccccctctcgcggaatgagaataggcgtgcagatccacaatacctggctgaaccctgacgtcgtgaccacttacctacgagagaaacatcagataagagttcgggcccagcggctgccggaagtccaggtcctcaatgtgagcggccgcgggaacttcttcctgacctgggacaatgttagctctcagccaattcccgcgaacgccaccgctcacctaatacaaacaactatcgaggagctgctagcagtgaaatgcaagcttgaacctttgtggtctaacattctgcttagactgggctttgagcgcggacctgaggtgagcaattcagacggggacctcacaagcggcaccgaacctttttgcggaaggttctccctccgacagccacggcatctcgttctgaccccacccgccgcacaaaaaggctaccggttggatcaatatacacatctgtgtttggcctacaagggccacatgaacaagatcttaaagatgatcgtgagtttcactattgggttccagaatatggtgaagaatacgacgtgcgattggagtttgactcggacgtctcccgagtcttggcagttcgattgcacggatctgtgggaaacgtgtgttcgttgttttggggatttgcagcctccccccgccaactccccggtgctcgtgcatcaaattaatctgctacccctggcccaggaaactggactgttttacgtggacgaaatcatcatcgccgacactaacgtgacagtgagtcaggccgatagtggcacagcgcggcctggtggcaatttggtagaatccgtttccgttgttggatccccaccggtgtattctgttacctcctggctggcgggctgcggcacagagctgccgttaatcacagctaggagcgtgccaactgagggcacggaagagggaagtggcctagtactggtgactacacagcggcggcagagaacatcgccccccctgggaggacacttcagaatacagctcccaaatactgtgattagtgacgtaccagtgcagatttccgcccatcatctccaccagctgctccagaacaacgcagacgacttcaccagccgttacctgaacgcatctgacttcaccgtgaaggaggacctgtacacctgctatgaacacgtgtggacactgtcatggtctacccagatcggagatctccccaattttattcgggtgtccgacgaaaaccttacaggcgtaaaccccgctgccgcgacccgcgtggtatacgacggtggagtatttcttgggccgatctttggagacatgctcgccacagccaaccaacatactcaggtcgtcgtgagggtcaatgacgtgcctgcacattgtccaggctcttgtagcttccagtacctccaggggagtactccctgcgtccacagtgtatggtactctatcgacggagacataaacctgatgatctatattacaggcacaggattcagcggcgattcccagttcctacaagttacggtaaataagacctcttgtaaggttatctttagcaatcagacgaacgtcgtatgccagaccgatctcctgcctgtagggatgcaccggattctaatgcttgtccgaccctctggccttgctatctccgccaccggggaggacctgttcctcaatgtaaaaccaagactggatatggtggagccctccagagctgccgatatcggcggactgtgggcaacaataagaggttcaagcctggagggcgtcagcctgatcctgttcggctcatactcttgtgctattaatgtggcgacatccaacagtagtcggattcagtgcaaggttcctccacgaggcaaggatggacgcatagtaaatgttactgtaatccgtggagattactctgcagtgctaccacgggccttcacatatgtgtcttcactgaaccctgtgattgtgaccctgtccagaaacatctctaacatagctggcggagaaacccttgtcatcggcgtagctaggcttatgaattatacagacttagacgtggaggttcacgtgcaggacgccctggcgccagtccacacgcaatcagcttggggtttagaagtcgcattaccacctttgcccgccggcctgcatagaatcagtgtaagcatcaatggggtgagcatccatagccagggcgtcgatcttcatatccagtatttgactgaggtcttcagtattgagccctgttgtggctcactacttggggggaccattttgtcaatttctgggatcggattcagtagggatcccgctctcgtgtgggtgcttgtcggaaatcggagttgcgatattgttaatctcacagaggcgtctatttggtgcgaaacccttccggccccccagatcccagatgccggcgcgccgacggtgccagccgccgtggaggtctgggcaggtaacaggttttttgctagggggccgtcccctagtctcgttggtaagggtttcaccttcatgtacgaggcagctgccactcctgttgtgactgcaatgcaaggcgagatcacgaactcctccctgtcactccatgttggagggtcgaacctaagcaactctgtcatcctgttaggaaacctgaactgtgacgtcgagacccagtcattccaaggcaatgtctccctgtcaggctgttctatccccctccatagtctcgaagccggcatatatcctctgcaagtccgccaaaaacagatgggctttgcaaatatgtctgtcgtgctgcagcaattcgctgtgatgccaagaattatggccatcttcccctctcagggctccgcatgcgggggcaccattcttaccgtgaggggcctcctcctgaatagccgtcgccgcagcgtacgggtggacttaagcgggccatttacttgcgtgattctctcactaggcgatcacaccatactgtgccaagtcagtcttgagggcgatccacttcctggcgcctccttttccctgaacgtgactgtgctcgttaatggattgacctctgagtgtcagggtaactgtacactgttcatccgagaggaggcaagtcctgtgatggacgccctgtccaccaatacgagtggtagcctgacgacagtgctgatcagaggtcagaggctcgccactactgccgatgagccaatggtctttgttgatgatcaactgccttgcaatgttacatttttcaacgccagtcacgtcgtgtgtcaaactcgcgatctggcccctgggccccactatctctcggtcttctacacacgcaacggctatgcttgcagcgggaacgtctcgaggcatttttacattatgccacaggtttttcattacttccccaagaatttcagtctccacgggggatcgctactaaccatagagggtactgggctgcggggacagaacacaactagtgtctacatcgaccaacagacctgcctgacagtgaatatcggggctgagctgattcgctgcattgttccaactgggaacggctccgtcgctttggagatcgaagtcgacggtctgtggtatcacattggcgtgataggttataataaggccttcacccctgaattaatctccatctcgcagagcgacgacatcctgacttttgcagttgcccaaatatctggggcagccaacattgatattttcattggaatgagcccctgtgtcggggtctcgggaaatcacacagtgctacagtgtgtggtgccatctttacctgccggcgagtaccatgtcaggggatatgattgcataaggggatgggctagctccgccctggtcttcacctccagggtgattataacagctgtgaccgaaaatttcgggtgcttgggaggccgcctcgttcacgtctttggcgccgggttctcgccagggaacgtttcagcggcagtttgcggggctccctgcagagtcctcgcgaacgctaccgttagcgcattttcctgcctagtattaccactcgacgtcagtctcgcgtttctctgcgggcttaaacgggaagaggacagctgtgaggctgcacggcatacctacgtgcagtgtgatctcacagtggctatggctacggaacagctattagagtcatggccatatctgtatatttgtgaggagagctctcagtgccttttcgtcccggaccactgggcagagtccatgtttccctctttctccgggctgtttattagtcccaaattggagagggatgaggtcctgatctacaattcttcctgcaacatcacaatggaaacggaggcagaaatggaatgcgaaactccaaatcagcccatcactgtgaagatcaccgaaatccgaaaaaggtggggacagaatacccagggaaacttttccctgcaattctgcagacgttggagccgcacacattcctggtttcccgaacgcctaccccaagatggggacaatgtgactgtggagaacggacagctcctcctgctggacaccaatactagcatcctgaatctcctgcacataaaaggaggcaaacttatttttatggccccagggcccatcgaacttagggctcacgcaatcctagtttctgacggaggggagctcaggatcgggagcgaagacaaacccttccaaggaagagcacagataactctgtacgggagtagttatagcactccgttttttccgtatggggtgaagttcttggccgttcgcaacgggacgctaagtttacacgggtcacttcctgaggtcattgtgacctgtctgcgggccacagcgcacgcactggacactgttctggcattagaagacgccgtcgattggaaccccggcgatgaagttgttattatttcagggaccggcgtaaaaggtgctaagcctatggaggagatcgtgacggtggaaaccgtccaggacactgacctgtacctgaagtccccactgcggtattcgcacaattttactgaaaattgggtggcgggcgaacaccacattctgaaagctaccgtggcgctgctgtcccgttccattactattcaagggaacctgactaatgaacgagagaagctcctagtctcgtgtcaggaggctaatgcacctgaggggaatttacagcactgcctttactcgatgagtgaaaagatgctcggatcacgggatatgggtgcaagagttatagtgcagtcttttcctgaagagccaagccaggtgcagttaaaaggtgtgcagtttcaagtcctgggtcaagcttttcataagcatctcagcagcctaaccctggtgggagctatgcgagagtcattcatacagggctgtacagtgagaaattctttctctaggggactgagcatgtgtgggacacttggtctgaaagttgatagtaatgtattctacaatattctggggcatgccctcctcgtgggaacgtgcactgaaatgcgatatattagttgggaagcaatccatgggagaaaggacgattggagcggccacggcaacatcattaggaacaacgtcatcatccaagtctcaggggcagaagggctgtctaaccccgaaatgctgacaccaagtggaatatacatatgctctcccacaaatgtaatcgagggtaaccgcgtttgcggagcaggatacgggtactttttccatctcatgaccaaccagacatcacaagctcctctgctgagtttcacacagaatattgcccacagctgtacacggtacggactattcgtttatcccaagtttcaacctccctgggacaatgtcacagggacaacgctgttccagagtttcaccgtctgggaaagtgccggaggagctcagatattcagatcaagcaacttgcgactgaagaactttaaagtttactcgtgcagagattttgggatcgacgttctggagtcagacgctaacaccagtgttaccgattcacttctgcttggccactttgctcacaaggggtcattatgcatgtcttccggcattaagacgcctaagcggtgggagttgatggtctctaatactacgttcgtcaattttgatctcattaactgtgtggcaattcgaacctgctcagactgtagccagggccaaggaggttttaccgtcaaaacttcccagcttaagttcactaattcatccaacctggtggcctttcctttcccccatgccgccatactggaagacctcgacggttccctgtctggcaagaaccgatcacatatcttagccagtatggaaacactgtccgcgagctgtttggttaatagcagttttggccgagttgtgcacggcagtgcctgcggagggggggttctgtttcaccgcatgtcaatagggctggcaaacacccctgaggtgagctatgatttgacgatgactgattcaagaaacaaaacaaccactgtgaattatgtacgagacacgcttagcaacccgagaggctggatggcactgctcctggaccaggagacttatagtttacagagcgagaacctgtggattaacagaagcctgcagtatagtgctacctttgacaactttgcgcctggaaattacctgctgctagtgcacacggacctgccaccttatccagacatcctccttaggtgcggatcacgagtcggcctctcttttccctttcttcccagccccggccagaaccaagggtgcgactggtttttcaatagccagctgaggcaactcacctatctcgtctccggggaaggtcaggtgcaggtcatattacgggtcaaggagggaatgccccccaccattagtgcttccacttctgctccagagtcagcactaaaatggtccttgcccgaaacttggcagggcgttgaagaggggtggggcggctataacaacacaatacccggtccgggagacgacgtgctgattttaccgaatcggaccgtcttagtagacaccgacctgccatttttcaaaggactatacgtaatgggaacgctggacttcccagtggacagatctaacgttctaagtgttgcctgtatggtcatagccggcggggagttgaaggtgggtactctggaaaatcctttagaaaaagagcaaaagctgctgattctcctccgggcatccgaaggggttttctgtgatagaatgaacggaatacatattgatcccgggaccataggggtttatgggaaagtgcatctgtattccgcttatcctaaaaacagttggacgcacctgggagccgacattgcttccgggaatgaacggattattgtggaagacgccgtggactggcgcccacacgacaagattgtgctttcctcatcatcctacgagccacatgaggctgaagtgcttaccgtgaaggaggtcaaggggcaccatgtccgcatctatgaaaggttaaagcataggcacatcgggtcagtacacgtcaccgaagacggcagacacattcgtctggcggcagaagtgggcttgctgactagaaatatccagatccagccagacgtgtcttgcagaggaagactctttgtaggttcctttcgaaagtccagccgggaggagttctcgggagtgctccagctgctgaatgtggaaatacagaatttcgggtctcccttgtattcaagcgtcgagttctcaaacgtatccgcggggagctggattatcagttccactctgcatcagtcctgtgggggggggatacatgctgcagcatcacatggtgtcttgttgaacgataatatcgtattcggtactgccgggcacgggatcgatctcgagggccaggcgtataccgttaccaacaatctggtggtgctcatgacccagccagcctggtcaactatctgggtcgctgggatcaaagtcaatcaggttaaggatattaacctgcatggaaacgtcgtggctgggagtgaacggctcggcttccatatcagggggcataagtgttccagttgtgagctgttgtggtcagacaacgtggcccactcaagcctccatgggctgcacctgtataaagagtcaggtctggataattgtacccgtatcagcggcttcctcgctttcaagaacttcgactacggagccatgctccacgtggaaaactcggtcgaaatcgagaatattacccttgtcgacaacaccatcgggctgctcgctgtggtctacgtcttttcggcaccacagaacagcgtgaaaaaagtgcaaatcgttttgcgcaacagcgtgatcgttgctacttcctccagctttgactgtattcaggacaaggtcaagccccacagtgccaatctgaccagtacagatagggcaccctcaaacccacgcgggggtagaataggcatactgtggcctgtttttacgtccgagcctaatcagtggccccaggaaccctggcataaagttcgtaatgatcactccatttcgggcataatgaaactccaggatgtgaccttcagctctttcgttaagagctgctatagtgatgatttggacgtctgtatcctgcccaacgccgagaactcaggaatcatgcacccaatcacggccgagcggacacgtatgctcaagatcaaggataaaaacaaattttattttccatcactgcagcccaggaaagatctcggcaaggtcgtgtgccccgagttggattgcgcaagccccagaaaatatctgtttaaagatctggacgggcgagcgctcggtctgccacccccggtgagcgttttccctaaaactgaggcagaatggactgctagtttctttaacgccggtactaaagaacagagtattgagattaacgtatag

SEQ ID NO: 247240 - DNA, 11589 bp, Artificial Sequence
  derived and/or modified sequence
acaaacgagttaggtgagttatagtctaacgtgagtgagttacctgcgtggtggctgcaggctgagctctaaccagataacatgtccacggattcttgacagagagaaataagatcacttagaaagaaaggatcatttctcccttgagtcacaaggagacagaaacagaaaaaaaagcacaaaagctatgctgctccaatcaaaactgaaaatgcttttaatgtctgagcaatcttaagagtattgatttaagtggacagaatgactgcctggctgatctctctgatgagtattgaagtactacttttggcagtacgtcacctgagtttacatattgaacctgaagaaggtagccttgcagggggaacgtggatcacagtcatttttgatggtttggagttgggtgttctttaccccaacaatggctctcaattggagatacacctggtgaacgtgaacatggtggtgcccgcactgcggagtgttccctgtgacgtctttcctgttttcttggatttgcctgtggtgacatgccggaccagatctgtgctgtctgaagcacatgagggtctgtacttcctggaagcatacttcgggggacagctggtaagcagtccaaatccaggaccacgagatagctgtactttcaagttttccaaggcgcagacacccatcgttcaccaagtttatccaccaagtggtgttccaggaaaactaatacatgtatatggctggattatcactggaagattggaaacttttgattttgatgctgagtacattgatagcccagtgatcttggaagctcaaggagacaaatgggttactccttgctctcttataaataggcagatgggaagctgttatcctattcaggaggaccatggtcttgggactctgcagtgccatgtggaaggcgactacatcggctcccagaatgttagcttctcagtatttaacaaaggaaagtcaatggtccacaagaaggcatggctgatcagtgctaaacaggatcttttcctataccagacacactcagaaatattatctgtgtttccagaaactgggagccttgggggaagaacaaacatcacaattacaggagacttttttgacaattctgcccaggttaccattgcaggcattccatgtgatattagacacgtgtctcccaggaagattgagtgcaccactcgggctccaggaaaagatgtgaggctcaccacccctcagccaggcaatcgagggcttctttttgaagttggagatgctgttgagggactggaactgactgaagccaccccagggtacaggtggcagattgtccctaatgccagttctccatttgggttttggtcacaggaaggacaacctttcagagcacggctcagtgggttctttgtggctccagagacaaataattacactttctggattcaggcagatagccaagcttccttgcatttcagttggtcagaggaaccaaggactaaggtgaaagtggcctccatcagcgtcggcactgctgactggtttgactcctgggagcagaatagggatgaagggacctggcagcagaagactcccaagttggagctgttgggtggagccatgtactacctggaagcagagcatcatgggatagccccaagcagggggatgaggattggtgtccagattcacaacacctggctgaatcctgatgtggtcaccacttacctacgggagaagcaccagatccgagtccgagcccagaggcttccagaagtacaggtgctgaatgtatcaggcagaggaaacttcttccttacttgggacaatgtctctagtcagccaatccctgcaaatgccacagcccatctgattcaaacaaccattgaggagttacttgcagtaaaatgcaaactggaacccctttggtctaacatccttctccggcttggatttgaacgaggcccagaagtttccaactctgatggggacctcaccagtgggacggagcccttctgtggcaggttcagcctccgtcagcctcgacaccttgtccttactcccccggctgcccagaagggctatcggctagatcagtatacacacctgtgtcttgcatacaaaggccacatgaacaagatcctgaagatgattgtgtccttcacaatcggctttcaaaacatggtaaagaataccacctgtgactggagtctcacgaggaccagccccgagagctggcagttcgattgcactgacctctgggagacttgtgtgcgttgcttcggggatctccagccccctccggcaaactccccagtgctggttcatcagatcaaccttctccctctggcccaggagacgggcctgttctatgtggatgaaattattattgcagacacaaacgtaacagtttctcaagctgattctggaacggctcgcccagggggcaatctggtggaatcagtctctgtggtgggatcccctccggtctacagtgtcacctcctggctggcggggtgtggcacggagctcccgctcatcactgcacgctctgtgcccactgaaggaacagaagagggatctggactggtcctggtgacgacacagagacgacagcggacaagtccacctctaggaggacactttcgcatccagcttcctaatacagtgatttctgatgtccctgtacaaatttctgctcatcaccttcaccagctcttacagaataatgccgatgacttcacatccaggtacctcaatgccagtgacttcactgtgaaggaggatctatacacttgctacgaacacgtgtggaccttgtcctggtccactcagattggggatttgcccaattttatcagggtctctgatgaaaaccttactggagtgaatcctgctgcagccacgcgtgtggtatatgatggtggagtttttcttggacccatatttggagacatgttggctactgccaaccagcatactcaggtggttgtgcgagtgaatgatgtaccagctcattgcccaggttcctgctctttccagtacctccaagggtcaactccctgtgtccattctgtgtggtactccattgatggtgacatcaacctaatgatttacattaccggaactggtttctctggtgactcccagttcttgcaggttacagtgaacaaaacgagttgcaaagttattttctcaaaccagaccaatgtagtctgtcagacagatttgctacctgttggaatgcatcggatcttgatgttggtgagaccctctggtcttgccatcagtgccactggagaagacctcttcctaaatgtgaaacctagactggatatggtggagccttccagagctgcggatattggagggctctgggccaccatccgaggctctagtttggaaggtgttagcctgatattatttggatcttactcgtgtgccatcaatgtcgctacaagcaattcaagcagaattcagtgcaaagttccacccagggggaaagatggacgcattgtgaatgtgactgtgatcagaggggactattctgcagttcttcccagagcatttacatatgtctcttccttaaatccagttattgtgactctgagcagaaacataagcaatatagcaggcggtgagaccctggtcattggagtggcgaggctgatgaactatacggatttggatgtggaagtccacgtccaggatgccttggctccggttcacacacagtcggcttggggcctggaggtggcactgcccccactgccagctggtctccacagaatttccgtctctatcaatggggtcagcattcactcacaaggggttgatctccacatccagtacctcacagaagttttcagcatcgagccttgctgtgggtccctgctgggagggaccatcctcagcatctcaggaataggcttcagcagggacccagctttggtttgggtacttgtgggcaatcggtcctgtgacattgtgaacttaacggaggcgagcatctggtgtgaaaccctgccagccccccagatacccgatgcgggcgctcccactgttccagctgccgtggaggtctgggctggcaacaggttcttcgcccgtggtccttcaccaagcttggtggggaaaggcttcaccttcatgtatgaagcggcagcaacaccagtagtcactgccatgcaaggagaaatcacaaatagcagcctgagcctgcatgtgggaggaagtaacctctccaactcagtcatccttctggggaacctgaactgtgatgttgagacacagtccttccagggcaacgtgagcctgtctggatgctccatccctcttcacagtctggaggctggcatctatcctctccaagtacgtcagaagcagatgggatttgctaatatgtctgtggtgctccagcaatttgcagtgatgcctcggataatggccatcttcccatcgcagggttcggcatgtggtgggaccatacttactgtgagggggttgcttcttaactctagaaggaggtcagttcgggttgacctctcgggtccttttacttgtgtgattttgagtttgggagaccacaccattctctgccaggttagcctggagggtgaccccttgcctggagcttccttctccctgaacgtcacagtcctggtcaatgggctaaccagcgagtgtcaggggaattgcactcttttcataagggaagaggcaagtcctgtcatggatgccttgtccacaaacaccagtgggtctctgaccactgtgctgattaggggtcagaggttagccaccacagctgatgagccgatggtatttgtggatgatcaacttccttgcaatgtaactttttttaatgcaagccacgttgtgtgccagacaagagacttggccccaggaccccactacctgtcagttttttatacaagaaatgggtatgcttgttctggtaatgtttccagacacttctacattatgccccaagtgtttcattattttcctaagaatttcagcttacatggtggaagcctcttgaccatagagggcacaggcctgagaggacagaacaccacgtcagtctatattgaccagcagacctgcctgacggtgaacatcggtgctgagctcatccggtgcattgttcccacagggaatggctctgttgccctggaaatagaggtagatggactttggtatcacataggagtcattggttataacaaggcctttaccccagaattgatctctatttctcagagcgatgacatcttaacctttgcagtggcccagatctcaggagctgcaaacattgacatttttataggaatgtcaccctgtgtgggtgtctctggtaaccacaccgttcttcagtgcgtggtcccttcccttccggccggggagtaccacgtcagaggctatgactgcatcagagggtgggcctcatctgccctggtgttcacctcaagagttattattacagcagtgacggagaacttcggctgcctgggtggaaggctggtgcatgtgtttggagcgggattttctccagggaatgtctcagctgctgtgtgtggtgctccctgccgagtcctggctaatgctacagtgtctgccttcagctgcttggttctgcccctggatgtgtccttggccttcctgtgtggcctgaagcgtgaggaggacagctgtgaggctgccagacacacctatgtgcagtgtgatttgacagttgccatggcgacagagcaactgcttgaatcgtggccttacctctacatttgcgaggaaagttcccaatgcctctttgtgccagatcattgggcagagtcaatgtttccatcattctcgggcctctttatcagccctaaattggaaagagatgaagttctcatctataatagctcctgtaacattaccatggaaactgaggcagagatggagtgtgagacgcccaatcagccaattaccgtcaagattactgagatacggaaacgctggggccagaacactcagggcaacttttctttacagttctgccggagatggtccaggactcacagctggtttcctgaaaggctgccacaagatggcgacaacgtcacagtggagaatggccaattgcttctgctggacactaacacaagcatcctcaacttactgcacattaaagggggcaagctgattttcatggccccaggacccatcgagctcagggcacacgccatccttgtttctgatggtggagagctccggattggatccgaagacaagcccttccaaggcagagctcagatcacactctacgggagttcctactcaactcccttctttccctatggagtcaagttcctggctgtgaggaatggaactctttctctgcacggttcactaccagaagtaattgtcacctgtcttagagcaactgcccatgccctagacacagtgctggctttagaagatgctgtggactggaaccctggggatgaagttgtcatcatcagtggaacaggtgttaaaggtgccaaaccgatggaagagattgtcactgtggaaactgtgcaggatacagacctctatcttaagtcacctttgagatattctcacaactttacagagaattgggtggctggagagcaccatattttaaaggccactgtggctctgctcagcaggagtattaccatacaaggaaatctcactaatgagagggagaagctgcttgtttcatgccaggaggccaatgctccagaaggtaatctgcagcactgtttgtattccatgagtgagaagatgctaggatccagggatatgggagccagagtgatcgttcagtccttcccagaagagcccagccaggtccagttgaagggagtgcagtttcaagtcttggggcaagccttccataagcatctgagctcactcactctggtgggagctatgagagagtctttcatacagggctgcacagtgaggaactccttcagtagaggcctcagcatgtgcgggaccttgggcctgaaggtggacagtaatgtattctacaatattttaggtcatgcgctgctagttgggacatgcacggagatgagatatatctcctgggaggcaattcatggaaggaaagatgactggtcaggacatggaaatataataagaaacaacgtgatcatccaggtttctggtgccgagggactctccaatcctgaaatgttgacaccatctggcatctatatctgcagtcccaccaatgttatagaggggaacagagtgtgtggtgctggctatggctactttttccatctcatgaccaaccaaacatcacaagctccgcttctttccttcactcagaacattgcacattcttgtaccaggtatggtctctttgtataccctaaatttcagccaccttgggataatgtcactggcaccactctgttccagagcttcacagtttgggaaagtgcaggtggtgcccagatttttagaagtagcaatcttcgcctgaaaaacttcaaagtttattcatgcagagattttggaattgacgtcttggaaagtgatgcaaatacttcagttactgacagcttattacttggtcattttgcccacaagggaagtctgtgtatgtcatctgggattaaaactcctaaaagatgggaactgatggtgtctaacacaacctttgttaattttgatctcatcaactgtgtggccattagaacctgttcagactgttcccaaggacaaggtggatttactgtgaagaccagccagttgaagtttacaaactcttcaaacttagtggcatttccatttcctcatgcagcaattttggaagacttggatgggtctctgtctgggaaaaacagaagtcacattcttgcttctatggaaaccctttcagcttcttgtttggtcaattcaagctttggtcgggttgtccatggcagtgcctgtggaggaggtgttctttttcatcgtatgtctattggtttagcgaatactcctgaagtttcttatgatttaaccatgactgacagcagaaataaaacaaccactgtcaattatgtacgtgatacattgtctaaccctcgtggctggatggctctgctcttggaccaagagacctactcattgcaatctgagaacctttggatcaacagatctctgcagtactcagcaacctttgacaactttgctcctggtaattacctactgctggtgcacacagatttgccgccttaccctgacatcctcctaagatgtgggagtcgagtgggtctgtcttttccatttcttccatcaccaggtcagaaccaaggctgtgactggttcttcaatagccagctgaggcaactcacctatctggtttcaggtgaaggccaagttcaagtcattctccgggtgaaggaaggtatgcccccaactatttcagcttctacctctgcccctgaatcagctttaaaatggtccctccctgaaacatggcaaggtgttgaagaaggctggggaggatacaacaataccattccaggccctggggatgacgttctcattttacccaacagaactgtccttgtggatacagatcttccattcttcaaagggctgtatgtgatggggaccttagacttccctgtggacagaagcaatgttctgagtgtggcatgcatggtcattgcaggcggggagctgaaagttggtactttagaaaatcccttagaaaaggaacaaaagcttctgattctccttagagcctcagagggagtcttttgtgaccgtatgaatggaattcatattgacccaggaacaattggggtttatgggaaagttcatctttacagtgcttatcctaagaactcctggacacatcttggagctgatattgcctcaggaaatgagagaattatagtagaagatgcagtggattggcgcccccatgacaaaatagtccttagctcctcttcttatgagcctcatgaagcagaggtcctcactgtgaaagaagtcaagggccaccatgtgaggatctatgaacggctcaaacaccggcatattggaagtgtacatgtcacggaggatggccgacacattcgtttggctgctgaggttggactgttgacccgaaatatacaaattcagcctgacgtatcatgtagggggagactgtttgtggggtccttcaggaagtccagccgagaagaattttcaggtgtccttcaacttcttaatgtggaaattcagaacttcgggtcaccattgtactcatctgttgaattcagtaatgtgtcagcaggatcctggatcatatcatctactctgcaccagagctgtggcgggggcattcatgcagctgccagtcatggagtacttttaaatgacaatattgtgtttggcacagctggccatggcatagatttagagggtcaggcctatactgtcactaataaccttgtggttctgatgacacagccagcgtggtccaccatttgggtggcgggaatcaaagtgaaccaggtaaaggacatcaacctccatggcaacgttgtggcaggatcagagagacttggctttcacatccgaggccacaagtgctcctcttgtgaactgctttggtctgacaatgtggcgcattcaagtcttcatggccttcatctctataaggaaagtggacttgacaactgtaccagaatctctggcttcttggctttcaagaactttgactatggtgccatgttacatgtagagaacagcgtggagatagagaacattactctggtagacaatactattggtcttttggcagtagtgtatgtattttctgctccacaaaattccgtcaaaaaagtgcagattgtgcttaggaattcagtcattgtggccaccagctcttcttttgactgcattcaggacaaagtgaagccgcactcagccaacttgacatcaacagatagagctccctccaatccaagaggaggtcgaattggtattctgtggcctgtattcacctcagaaccaaatcagtggcctcaggagccatggcacaaagtgaggaatgatcattcaatttcaggaatcatgaaacttcaagatgttaccttttctagttttgtgaagagttgctatagcgatgacctggatgtctgcattctaccaaatgcagagaacagtggaattatgcacccaataacagcagagaggaccaggatgctaaagataaaagataaaaacaagttctactttccttcattacaacccaggaaagatttaggaaaagtagtctgtcctgaattagactgtgcaagtccaagaaaatatctcttcaaggatctggatgggagagccctgggtctgcctccaccagtttctgtatttcctaaaacagaggcagaatggactgcatccttcttcaacgcagtaaccactgagcaggctttgaagatttcagaatagaggaggagcctgcaggaagctgaactttgaaagattaatgaggcagcaggaagcagggtgaagaatgggttggagcatggaccaaatggaaagacttgttaagacactgtttcaattgttcaaattgagaagaaattgattgaggactgggaggagattgatggcagccagaatggagaggatggtacagatcaaagaaatacaaaagagaggaaatagagtttgcttactcctgactttggggactgtggagagggtgtcaacagtgacaccattgtccgtagtcaggatatctttgggaatggaagttccagtagcagatatgggggagtaggaaagaagaggatggttgcttaagctttgcctttagtgagtttggggtacccactatatgagagaggagcaattcagatattaaattggtggtgttgaaatctttggaattagagctttggagataaattgcagctagatataaattatctggaataaagtgataggtgaaataatatggtagagaagccttattttatttctctcttctttaccaattatattgagatattattattattggcatattaatatattattattggtatattaataatataataatataggtatattatcaataatatactaatactaatataccaataatagtgggttattgttaataatattggtaaagaaagaacataaatgtaagtttattaccaagaatattggtgtggtaaagataacccatttatgctggaggttgcaattttttgaattgcaaaatcagaccttggccatgaccttaagcagtaggatataaataactcccatgtgcccagtgttccattattggaacagtgtgccattcttgtgcactgatggaggaaatagttacagatacagtgtgatttgaggaattggttcccccagagccttattgaccctcaaatacttcccttacccatgttatcatttcctttctatcctaaaattgctacctttgctgccagatcttttccttcataaagtcaatgtgacatttactcatttattaactcatttcttcaacagatacttattgggcatttactgtatgccaagtattgtaataaatgctgtatgtacaaaatgaca

SEQ ID NO: 247241 - DNA, 10464 bp, Artificial Sequence
  derived and/or modified sequence
acatttggctgggacacaaacgagttaggtgagttatagtctaacgtgagtgagttacctgcgtggtggctgcaggctgagctctaaccagataacatgtccacggattcttgacagagagaaataagatcacttagaaagaaaggatcatttctcccttgagtcacaaggagacagaaacagaaaaaaaagcacaaaagctatgctgctccaatcaaaactgaaaatgcttttaatgtctgagcaatcttaagagtattgatttaagtggacagaatgactgcctggctgatctctctgatgagtattgaagtactacttttggcagtacgtcacctgagtttacatattgaacctgaagaaggtagccttgcagggggaacgtggatcacagtcatttttgatggtttggagttgggtgttctttaccccaacaatggctctcaattggagatacacctggtgaacgtgaacatggtggtgcccgcactgcggagtgttccctgtgacgtctttcctgttttcttggatttgcctgtggtgacatgccggaccagatctgtgctgtctgaagcacatgagggtctgtacttcctggaagcatacttcgggggacagctggtaagcagtccaaatccaggaccacgagatagctgtactttcaagttttccaaggcgcagacacccatcgttcaccaagtttatccaccaagtggtgttccaggaaaactaatacatgtatatggctggattatcactggaagattggaaacttttgattttgatgctgagtacattgatagcccagtgatcttggaagctcaaggagacaaatgggttactccttgctctcttataaataggcagatgggaagctgttatcctattcaggaggaccatggtcttgggactctgcagtgccatgtggaaggcgactacatcggctcccagaatgttagcttctcagtatttaacaaaggaaagtcaatggtccacaagaaggcatggctgatcagtgctaaacaggatcttttcctataccagacacactcagaaatattatctgtgtttccagaaactgggagccttgggggaagaacaaacatcacaattacaggagacttttttgacaattctgcccaggttaccattgcaggcattccatgtgatattagacacgtgtctcccaggaagattgagtgcaccactcgggctccaggaaaagatgtgaggctcaccacccctcagccaggcaatcgagggcttctttttgaagttggagatgctgttgagggactggaactgactgaagccaccccagggtacaggtggcagattgtccctaatgccagttctccatttgggttttggtcacaggaaggacaacctttcagagcacggctcagtgggttctttgtggctccagagacaaataattacactttctggattcaggcagatagccaagcttccttgcatttcagttggtcagaggaaccaaggactaaggtgaaagtggcctccatcagcgtcggcactgctgactggtttgactcctgggagcagaatagggatgaagggacctggcagcagaagactcccaagttggagctgttgggtggagccatgtactacctggaagcagagcatcatgggatagccccaagcagggggatgaggattggtgtccagattcacaacacctggctgaatcctgatgtggtcaccacttacctacgggagaagcaccagatccgagtccgagcccagaggcttccagaagtacaggtgctgaatgtatcaggcagaggaaacttcttccttacttgggacaatgtctctagtcagccaatccctgcaaatgccacagcccatctgattcaaacaaccattgaggagttacttgcagtaaaatgcaaactggaacccctttggtctaacatccttctccggcttggatttgaacgaggcccagaagtttccaactctgatggggacctcaccagtgggacggagcccttctgtggcaggttcagcctccgtcagcctcgacaccttgtccttactcccccggctgcccagaagggctatcggctagatcagtatacacacctgtgtcttgcatacaaaggccacatgaacaagatcctgaagatgattgtgtccttcacaatcggctttcaaaacatggtaaagaataccacctgtgactggagtctcacgaggaccagccccgagagctggcagttcgattgcactgacctctgggagacttgtgtgcgttgcttcggggatctccagccccctccggcaaactccccagtgctggttcatcagatcaaccttctccctctggcccaggagacgggcctgttctatgtggatgaaattattattgcagacacaaacgtaacagtttctcaagctgattctggaacggctcgcccagggggcaatctggtggaatcagtctctgtggtgggatcccctccggtctacagtgtcacctcctggctggcggggtgtggcacggagctcccgctcatcactgcacgctctgtgcccactgaaggaacagaagagggatctggactggtcctggtgacgacacagagacgacagcggacaagtccacctctaggaggacactttcgcatccagcttcctaatacagtgatttctgatgtccctgtacaaatttctgctcatcaccttcaccagctcttacagaataatgccgatgacttcacatccaggtacctcaatgccagtgacttcactgtgaaggaggatctatacacttgctacgaacacgtgtggaccttgtcctggtccactcagattggggatttgcccaattttatcagggtctctgatgaaaaccttactggagtgaatcctgctgcagccacgcgtgtggtatatgatggtggagtttttcttggacccatatttggagacatgttggctactgccaaccagcatactcaggtggttgtgcgagtgaatgatgtaccagctcattgcccaggttcctgctctttccagtacctccaagggtcaactccctgtgtccattctgtgtggtactccattgatggtgacatcaacctaatgatttacattaccggaactggtttctctggtgactcccagttcttgcaggttacagtgaacaaaacgagttgcaaagttattttctcaaaccagaccaatgtagtctgtcagacagatttgctacctgttggaatgcatcggatcttgatgttggtgagaccctctggtcttgccatcagtgccactggagaagacctcttcctaaatgtgaaacctagactggatatggtggagccttccagagctgcggatattggagggctctgggccaccatccgaggctctagtttggaaggtgttagcctgatattatttggatcttactcgtgtgccatcaatgtcgctacaagcaattcaagcagaattcagtgcaaagttccacccagggggaaagatggacgcattgtgaatgtgactgtgatcagaggggactattctgcagttcttcccagagcatttacatatgtctcttccttaaatccagttattgtgactctgagcagaaacataagcaatatagcaggcggtgagaccctggtcattggagtggcgaggctgatgaactatacggatttggatgtggaagtccacgtccaggatgccttggctccggttcacacacagtcggcttggggcctggaggtggcactgcccccactgccagctggtctccacagaatttccgtctctatcaatggggtcagcattcactcacaaggggttgatctccacatccagtacctcacagaagttttcagcatcgagccttgctgtgggtccctgctgggagggaccatcctcagcatctcaggaataggcttcagcagggacccagctttggtttgggtacttgtgggcaatcggtcctgtgacattgtgaacttaacggaggcgagcatctggtgtgaaaccctgccagccccccagatacccgatgcgggcgctcccactgttccagctgccgtggaggtctgggctggcaacaggttcttcgcccgtggtccttcaccaagcttggtggggaaaggcttcaccttcatgtatgaagcggcagcaacaccagtagtcactgccatgcaaggagaaatcacaaatagcagcctgagcctgcatgtgggaggaagtaacctctccaactcagtcatccttctggggaacctgaactgtgatgttgagacacagtccttccagggcaacgtgagcctgtctggatgctccatccctcttcacagtctggaggctggcatctatcctctccaagtacgtcagaagcagatgggatttgctaatatgtctgtggtgctccagcaatttgcagtgatgcctcggataatggccatcttcccatcgcagggttcggcatgtggtgggaccatacttactgtgagggggttgcttcttaactctagaaggaggtcagttcgggttgacctctcgggtccttttacttgtgtgattttgagtttgggagaccacaccattctctgccaggttagcctggagggtgaccccttgcctggagcttccttctccctgaacgtcacagtcctggtcaatgggctaaccagcgagtgtcaggggaattgcactcttttcataagggaagaggcaagtcctgtcatggatgccttgtccacaaacaccagtgggtctctgaccactgtgctgattaggggtcagaggttagccaccacagctgatgagccgatggtatttgtggatgatcaacttccttgcaatgtaactttttttaatgcaagccacgttgtgtgccagacaagagacttggccccaggaccccactacctgtcagttttttatacaagaaatgggtatgcttgttctggtaatgtttccagacacttctacattatgccccaagtgtttcattattttcctaagaatttcagcttacatggtggaagcctcttgaccatagagggcacaggcctgagaggacagaacaccacgtcagtctatattgaccagcagacctgcctgacggtgaacatcggtgctgagctcatccggtgcattgttcccacagggaatggctctgttgccctggaaatagaggtagatggactttggtatcacataggagtcattggttataacaaggcctttaccccagaattgatctctatttctcagagcgatgacatcttaacctttgcagtggcccagatctcaggagctgcaaacattgacatttttataggaatgtcaccctgtgtgggtgtctctggtaaccacaccgttcttcagtgcgtggtcccttcccttccggccggggagtaccacgtcagaggctatgactgcatcagagggtgggcctcatctgccctggtgttcacctcaagagttattattacagcagtgacggagaacttcggctgcctgggtggaaggctggtgcatgtgtttggagcgggattttctccagggaatgtctcagctgctgtgtgtggtgctccctgccgagtcctggctaatgctacagtgtctgccttcagctgcttggttctgcccctggatgtgtccttggccttcctgtgtggcctgaagcgtgaggaggacagctgtgaggctgccagacacacctatgtgcagtgtgatttgacagttgccatggcgacagagcaactgcttgaatcgtggccttacctctacatttgcgaggaaagttcccaatgcctctttgtgccagatcattgggcagagtcaatgtttccatcattctcgggcctctttatcagccctaaattggaaagagatgaagttctcatctataatagctcctgtaacattaccatggaaactgaggcagagatggagtgtgagacgcccaatcagccaattaccgtcaagattactgagatacggaaacgctggggccagaacactcagggcaacttttctttacagttctgccggagatggtccaggactcacagctggtttcctgaaaggctgccacaagatggcgacaacgtcacagtggagaatggccaattgcttctgctggacactaacacaagcatcctcaacttactgcacattaaagggggcaagctgattttcatggccccaggacccatcgagctcagggcacacgccatccttgtttctgatggtggagagctccggattggatccgaagacaagcccttccaaggcagagctcagatcacactctacgggagttcctactcaactcccttctttccctatggagtcaagttcctggctgtgaggaatggaactctttctctgcacggttcactaccagaagtaattgtcacctgtcttagagcaactgcccatgccctagacacagtgctggctttagaagatgctgtggactggaaccctggggatgaagttgtcatcatcagtggaacaggtgttaaaggtgccaaaccgatggaagagattgtcactgtggaaactgtgcaggatacagacctctatcttaagtcacctttgagatattctcacaactttacagagaattgggtggctggagagcaccatattttaaaggccactgtggctctgctcagcaggagtattaccatacaaggaaatctcactaatgagagggagaagctgcttgtttcatgccaggaggccaatgctccagaaggtaatctgcagcactgtttgtattccatgagtgagaagatgctaggatccagggatatgggagccagagtgatcgttcagtccttcccagaagagcccagccaggtccagttgaagggagtgcagtttcaagtcttggggcaagccttccataagcatctgagctcactcactctggtgggagctatgagagagtctttcatacagggctgcacagtgaggaactccttcagtagaggcctcagcatgtgcgggaccttgggcctgaaggtggacagtaatgtattctacaatattttaggtcatgcgctgctagttgggacatgcacggagatgagatatatctcctgggaggcaattcatggaaggaaagatgactggtcaggacatggaaatataataagaaacaacgtgatcatccaggtttctggtgccgagggactctccaatcctgaaatgttgacaccatctggcatctatatctgcagtcccaccaatgttatagaggggaacagagtgtgtggtgctggctatggctactttttccatctcatgaccaaccaaacatcacaagctccgcttctttccttcactcagaacattgcacattcttgtaccaggtatggtctctttgtataccctaaatttcagccaccttgggataatgtcactggcaccactctgttccagagcttcacagtttgggaaagtgcaggtggtgcccagatttttagaagtagcaatcttcgcctgaaaaacttcaaagtttattcatgcagagattttggaattgacgtcttggaaagtgatgcaaatacttcagttactgacagcttattacttggtcattttgcccacaagggaagtctgtgtatgtcatctgggattaaaactcctaaaagatgggaactgatggtgtctaacacaacctttgttaattttgatctcatcaactgtgtggccattagaacctgttcagactgttcccaaggacaaggtggatttactgtgaagaccagccagttgaagtttacaaactcttcaaacttagtggcatttccatttcctcatgcagcaattttggaagacttggatgggtctctgtctgggaaaaacagaagtcacattcttgcttctatggaaaccctttcagcttcttgtttggtcaattcaagctttggtcgggttgtccatggcagtgcctgtggaggaggtgttctttttcatcgtatgtctattggtttagcgaatactcctgaagtttcttatgatttaaccatgactgacagcagaaataaaacaaccactgtcaattatgtacgtgatacattgtctaaccctcgtggctggatggctctgctcttggaccaagagacctactcattgcaatctgagaacctttggatcaacagatctctgcagtactcagcaacctttgacaactttgctcctggtaattacctactgctggtgcacacagatttgccgccttaccctgacatcctcctaagatgtgggagtcgagtgggtctgtcttttccatttcttccatcaccaggtcagaaccaaggctgtgactggttcttcaatagccagctgaggcaactcacctatctggtttcaggtgaaggccaagttcaagtcattctccgggtgaaggaaggtatgcccccaactatttcagcttctacctctgcccctgaatcagctttaaaatggtccctccctgaaacatggcaaggtgttgaagaaggctggggaggatacaacaataccattccaggccctggggatgacgttctcattttacccaacagaactgtccttgtggatacagatcttccattcttcaaagggctgtatgtgatggggaccttagacttccctgtggacagaagcaatgttctgagtgtggcatgcatggtcattgcaggcggggagctgaaagttggtactttagaaaatcccttagaaaaggaacaaaagcttctgattctccttagagcctcagagggagtcttttgtgaccgtatgaatggaattcatattgacccaggaacaattggggtttatgggaaagttcatctttacagtgcttatcctaagaactcctggacacatcttggagctgatattgcctcaggaaatgagagaattatagtagaagatgcagtggattggcgcccccatgacaaaatagtccttagctcctcttcttatgagcctcatgaagcagaggtcctcactgtgaaagaagtcaagggccaccatgtgaggatctatgaacggctcaaacaccggcatattggaagtgtacatgtcacggaggatggccgacacattcgtttggctgctgaggttggactgttgacccgaaatatacaaattcagcctgacgtatcatgtagggggagactgtttgtggggtccttcaggaagtccagccgagaagaattttcaggtgtccttcaacttcttaatgtggaaattcagaacttcgggtcaccattgtactcatctgttgaattcagtaatgtgtcagcaggatcctggatcatatcatctactctgcaccagagctgtggcgggggcattcatgcagctgccagtcatggagtacttttaaatgacaatattgtgtttggcacagctggccatggcatagatttagagggtcaggcctatactgtcactaataaccttgtggttctgatgacacagccagcgtggtccaccatttgggtggcgggaatcaaagtgaaccaggtaaaggacatcaacctccatggcaacgttgtggcaggatcagagagacttggctttcacatccgaggccacaagtgctcctcttgtgaactgctttggtctgacaatgtggcgcattcaagtcttcatggccttcatctctataaggaaagtggacttgacaactgtaccagaatctctggcttcttggctttcaagaactttgactatggtgccatgttacatgtagagaacagcgtggagatagagaacattactctggtagacaatactattggtcttttggcagtagtgtatgtattttctgctccacaaaattccgtcaaaaaagtgcagattgtgcttaggaattcagtcattgtggccaccagctcttcttttgactgcattcaggacaaagtgaagccgcactcagccaacttgacatcaacagatagagctccctccaatccaagaggaggtcgaattggtattctgtggcctgtattcacctcagaaccaaatcagtggcctcaggagccatggcacaaagtgaggaatgatcattcaatttcaggaatcatgaaacttcaagatgttaccttttctagttttgtgaagagttgctatagcgatgacctggatgtctgcattctaccaaatgcagagaacagtggaattatgcacccaataacagcagagaggaccaggatgctaaagataaaagataaaaacaagttctactttccttcattacaacccaggaaagatttaggaaaagtagtctgtcctgaattagactgtgcaagtccaagaaaatatctcttcaaggatctggatgggagagccctgggtctgcctccaccagtttctgtatttcctaaaacagaggcagaatggactgcatccttcttcaacgcaggcacaaaagaacaaagcattgaaattaatgtc

SEQ ID NO: 247242 - DNA, 10191 bp, Artificial Sequence
  derived and/or modified sequence
atgaccgcatggttgatttctcttatgagcatcgaggtgctcctacttgccgttaggcacctctccctgcatattgagccggaggaaggaagtctcgccggaggaacctggattacagtgatctttgacggcctggaacttggcgtgttatacccaaacaatggctctcagttagagattcacctggtgaatgtcaatatggtggtaccggctctgcgatcggtcccgtgtgatgtctttcctgtttttctcgacctccccgtagtcacctgccggacccggtccgtgctcagtgaagcccacgaaggactgtattttttagaagcctattttgggggacagttggtcagtagccctaatccagggccaagagattcatgtaccttcaaattcagcaaggcccagacaccaatcgtgcaccaagtgtatccgccaagcggggtaccaggaaagctgatccacgtgtatgggtggattatcactggtaggctcgaaacattcgatttcgatgctgagtacatcgattctccagtcattctggaggcccaaggcgacaaatgggtaacgccatgctcactcatcaatcgccagatgggtagctgttatccaattcaagaagatcacggactgggtaccttgcagtgtcatgtggaaggtgactatattggatctcaaaacgtatctttctccgtcttcaataagggcaagtccatggttcacaaaaaggcctggctgattagtgctaaacaggatctcttcctttaccaaacccattccgaaattctgtctgtttttcccgaaacaggctctctgggaggaaggaccaatattactatcactggcgatttctttgataacagcgcacaagtgacaatagcgggtattccatgcgatatccgccatgtttctccacggaaaattgagtgcaccaccagagctcccggtaaggacgtgaggctgacgactcctcagcctggcaatcgcggtctgctgttcgaggtgggcgatgccgtagagggactggaacttactgaagctaccccgggatatcgctggcagatcgtgccgaatgctagtagcccttttgggttctggtcgcaggaaggccagccattccgcgctcggctgtccggcttctttgtggcacctgaaactaataactacaccttttggattcaagccgattcccaggcctctctacacttttcatggagcgaagaaccccgtaccaaggtcaaggtcgcgtctatttctgttggtactgctgactggttcgattcatgggagcagaaccgcgacgagggcacctggcagcaaaaaacaccgaaacttgaactgctgggcggtgctatgtactacttggaagccgaacatcacggtattgcccctagccggggaatgcggatcggtgtccagattcacaacacgtggctgaaccctgacgtagtgaccacttatctcagggagaaacaccagattcgcgtccgcgcacagcggctcccggaagtgcaggtgttaaatgtcagcgggagaggcaacttctttttgacatgggacaatgtctctagccagcctatccctgccaatgccaccgcccaccttatccagactaccatcgaggagttactggctgtgaaatgcaaactagaaccactgtggtcaaacattctgctcaggctgggctttgagcgaggacccgaggtgtccaattcagacggagatttaacatctgggacggaacccttttgtggccgattttctctgcgccaaccacggcacttggtgctgacaccccctgctgcacagaagggctaccggctggatcaatatacccatctctgtttagcctacaagggccacatgaataagattctcaaaatgatagttagcttcacgataggttttcagaatatggtcaagaacacaacgtgtgattggagcctcacccgcacttcacctgagtcatggcagttcgattgtactgatctgtgggagacatgcgtccggtgttttggagacctgcagccaccacctgcaaattcacctgtgctcgttcaccagatcaatctgcttcccctggcccaggagaccggccttttttatgtggacgaaatcataatcgccgacactaacgtgacagtgtctcaggcggatagcgggacggccaggcccggtgggaacttagtggagtctgttagcgtggtgggtagtccaccggtgtacagcgtgacgtcctggttggcgggttgcggaacagagctccccctgattactgcccgatctgttccaaccgaaggcacggaagaaggctcaggtttggttcttgtgacgacacagcgtagacagaggacgtcccccccactgggaggccacttccgcattcagctgcccaacacagtgatcagtgatgtacctgtgcagatctcggcccaccatttgcaccagttacttcagaacaatgccgacgacttcaccagccggtacctgaacgctagcgatttcaccgtgaaagaggacttgtacacctgctacgagcatgtttggacactttcgtggagcactcaaataggtgacctcccgaattttatcagggtatccgacgagaatctaactggtgtgaaccctgccgcagccaccagagtggtatacgacggtggagtctttttaggaccaattttcggagatatgcttgccactgctaaccagcatacccaggtcgtggtgcgggttaatgacgttccagcacattgccctgggtcttgttccttccagtacctgcaagggagcacaccttgtgtacactccgtttggtattccatcgatggggacattaacctgatgatctatattaccggcacaggcttctcaggggactctcagtttttgcaggtcaccgtgaacaagacttcatgtaaagtgatcttcagtaaccagactaatgtggtttgtcagaccgacttactgccggttgggatgcaccgaatactgatgctggtgagaccttcaggtctggcgatctccgccacgggggaagaccttttcctaaatgtgaaaccaagactggacatggtcgagccctcccgggctgcggatattgggggtctgtgggcgactattaggggttcctctctggagggtgtttctctcatcctgttcggttcctactcttgtgccattaacgtagccacctcaaattcttcgcggattcagtgcaaggtgcctcctagaggcaaggatggtaggatagtgaacgtgaccgtgattagaggggattacagtgccgtactcccacgggcatttacctacgtttccagcttgaaccccgtgatagtgaccctcagccgcaacatttcaaatattgccggaggggagactctcgtaatcggggtggcacggctcatgaattacacggatctggacgttgaggtgcacgtacaggatgcccttgcgccagtgcacacccaaagtgcctggggcctcgaggtcgccctgcccccactgcccgcaggcttgcaccggatttccgtctctataaatggtgtaagcatccacagccagggcgtcgacctgcatattcagtatctgacagaagtgttttccatcgaaccttgttgtggctcacttttgggcggaactatcttgtccatcagcggcattgggttcagtagggaccccgctttggtttgggtcctcgtggggaaccgcagctgcgatatagtcaatctaaccgaggcaagtatttggtgcgaaactttgcccgctccgcagatcccagatgctggggctccgacagttccagccgctgtcgaggtgtgggcgggaaatcggttttttgcccgaggcccttcacccagcctggtcggcaagggattcaccttcatgtacgaggctgcagctacacctgtggtgactgctatgcaaggtgaaatcactaattcctccctgagcctgcacgttggaggctccaatttgagcaattctgtgattctgctggggaatctgaactgcgacgtcgaaacccagagctttcagggaaatgtgagcctctcagggtgtagtatccccctccattctctggaagcagggatctaccctctccaggttcgacagaaacagatgggcttcgctaacatgtccgttgtcctccagcagtttgctgttatgccacgaataatggccatctttccttcacagggaagcgcatgtgggggtacaatactcaccgtacggggtcttttactcaacagtaggaggcgatcagtccgcgtggacctttcgggacccttcacctgcgtgatactctctctcggcgatcacacaatcctttgtcaggtcagcctagaaggcgaccccctacccggtgccagcttttctctgaacgtgacggtcctagtaaacgggttgacctcagagtgccaaggaaactgcacactcttcatacgtgaggaagccagccccgttatggacgctctttccaccaacaccagcggcagtctgactacagtgttgattaggggtcaacgactagccacaacagccgacgaaccaatggtctttgtggatgatcagctcccatgcaacgtgacattcttcaacgcgtcacacgtggtatgtcagactcgggatctggctccagggcctcactatcttagcgtcttttacaccagaaatgggtatgcatgcagcggcaatgttagcaggcacttctacattatgccgcaggttttccactactttcctaagaatttcagtttgcacgggggttcactgcttactattgaaggcacaggcctccgcggacagaacaccacctcagtgtacatcgatcaacagacttgcctgacagtgaacataggagcagaactgattcgctgcattgtcccaactgggaatgggagcgttgcgctcgaaattgaagtcgatggactgtggtaccatatcggggttattgggtataataaggctttcacccccgagttaatcagcattagtcagtcggatgacatactcacttttgcggtggcccagatttccggtgcggcaaacattgacattttcatcggaatgagtccttgcgttggggtgtctggtaatcatacagtcctacagtgcgttgtgccttccctgcccgctggcgaataccacgtccgcggatacgactgcattcgagggtgggccagtagcgccctggtctttaccagtcgtgtgatcattacggctgttacggaaaattttggctgcctgggaggtcggctggtgcatgtgtttggcgcaggctttagccctggcaacgttagtgctgctgtatgtggcgctccttgccgagtgctggccaatgccactgttagtgccttttcctgcctggtcctcccactggacgtaagcttggccttcctgtgcggcttgaaacgggaagaagattcctgtgaggctgccaggcacacatatgtacagtgcgatttgacggttgctatggccacagaacagttgttagaatcttggccttacctctacatttgtgaagagtcatctcagtgtctgtttgtgcccgatcattgggcagagagcatgttcccctcgttcagcggattgttcatctcccctaaactggagcgggacgaggtgttgatatataatagctcttgtaatatcaccatggaaacagaggccgagatggagtgtgaaactcctaatcagcccataacagtgaaaatcaccgagattagaaagcgctggggacagaatacacaggggaatttttcgctacagttctgcaggcggtggagtaggacccacagttggtttcccgagagacttcctcaggacggggacaacgttacagtggaaaatggtcagttgctcctgctggataccaatacctctattctgaacctgctgcatattaagggcggtaagttgattttcatggctcctggacctatcgaattaagagctcatgccattctggtttcagatgggggagagttacggatcggcagtgaagataagccgttccaaggtagagcacagatcacattgtatggtagcagttacagtacacccttctttccctacggagtgaagtttctggctgttagaaacggaaccctctctctccacggctccctccctgaggtcatagtgacatgcctgcgggcaacagctcatgcattggacacggtgctcgctctggaggacgctgtcgactggaatcccggtgacgaagtggtcatcatcagtggaaccggcgttaagggggcaaagcccatggaggaaattgtgaccgtggaaacagtacaggatacggacctctatttgaagagtccattgcgatattctcataattttactgaaaactgggtggcaggtgaacaccatatcctcaaggcaaccgtggccttgctgtcccgcagcatcaccattcagggcaatctcactaatgaaagagagaagctcctggtaagttgccaggaggcaaacgccccagaagggaacttacaacattgcctttatagcatgtctgagaagatgctaggctccagggatatgggcgctcgtgtcattgttcagtcattccccgaagaaccaagccaggtgcagcttaaaggtgtgcaattccaggtgctggggcaggcttttcataagcatctgtcttcactaaccctggtcggagccatgcgtgagtcttttattcaggggtgcaccgttcgaaattcattcagcagagggttatccatgtgcgggaccctggggctgaaggtggatagcaacgtgttctacaatattttgggccacgctttattagttggaacttgcacagaaatgcgctatatctcttgggaggccatacatggtcgcaaggacgactggtctggccatggtaatattatcagaaacaacgtgataattcaagtgtcgggcgctgaggggctcagcaatcctgagatgctcaccccaagtgggatttacatctgttcacccacaaacgtcatcgaagggaatcgcgtgtgtggcgctgggtatgggtactttttccatctgatgacgaatcagacctcacaggctccattactctcttttacccagaatatagcccactcatgtactagatatggcctgtttgtgtaccctaaattccagcctccatgggacaatgtaacagggaccaccctgttccagtcattcaccgtctgggaaagcgcaggtggcgctcaaatctttcgcagcagcaacctccgtctcaagaactttaaggtgtactcctgccgggactttggcatagatgtgttggagtccgatgcaaatactagcgtgactgactctctgttactgggccatttcgctcataaaggtagcctgtgtatgagctctggcattaagacaccgaagcggtgggagctgatggttagtaacactaccttcgtgaacttcgatctaattaactgcgttgccatcaggacatgttctgactgctctcaggggcagggtgggtttaccgtaaagacttcacagctaaagttcacaaactcatcaaacctggtggccttcccttttcctcatgccgcaatcctcgaggacctggacgggtcattgagcggcaaaaacagatcgcacattttggcctctatggaaaccctgagtgcgagctgtttggtgaatagctctttcggacgcgtcgtgcatgggagcgcttgcgggggtggggtcttgtttcaccgaatgtccatagggcttgctaatacaccggaggttagttacgacctaacgatgacagacagtcgtaacaaaacgacaactgtgaactacgtgcgggataccctgtctaacccaagggggtggatggctctgttgttggatcaggagacctatagccttcagtcagaaaacctgtggatcaatcgaagcctccagtattccgcgaccttcgacaactttgcacctggaaactatctcttactggtccatacagacctgcctccatacccggatatcctccttaggtgcggttcacgggtggggctctcttttccgtttctgcctagtccaggccagaaccagggctgcgattggttcttcaattctcagctgagacagctcacttatctggtttccggagagggacaggtgcaggtcattcttcgcgtgaaggaggggatgccaccgacaatttccgcctcaacatcagccccagagtcagccctgaagtggtccctgcctgaaacatggcagggcgtggaagaaggctggggcggatacaataacaccatccccggaccgggagacgacgtgcttatcctgccgaaccgaacggtgcttgtggacacagacctcccatttttcaaaggtctatacgtgatgggaacactggactttccggttgacaggagcaatgtcctgtctgtagcttgtatggtgattgcgggaggggagctgaaagtgggcacactcgaaaatccactcgagaaggagcagaagctactcattctcttgagagcctcagaaggcgttttttgtgataggatgaatgggatacatattgatccagggacgataggggtctacggtaaggtccacctatacagcgcttatcccaaaaactcgtggacccaccttggggctgatatcgcttctggaaatgagcgtattatcgtggaagacgctgtagattggcgccctcacgataaaatcgtgttgtctagcagcagttacgaaccccatgaggcggaggtgttaaccgtcaaggaagttaagggccaccatgtcaggatatatgagcgcctgaaacatcgtcacatcggtagcgtgcatgtgacagaagacggacggcacatccggctggcagctgaggtgggacttctgacaagaaacatccagatccaaccagacgtctcttgtcgaggcaggttatttgtgggcagctttaggaagagttctagggaggagttctctggcgtgctgcagctcttgaatgtagagattcagaactttggatcgcccctgtatagttctgtcgaattttctaacgttagcgcgggtagctggatcatttcgagtacgctgcaccagtcttgtggcggaggcattcatgcagccgcatcacatggcgtgctgctcaacgataatatcgtgtttggtacggctggccacggcattgacttggaggggcaggcttataccgtgactaataatttagtggtcctgatgactcagccagcatggtcaactatctgggtggcagggataaaggtgaatcaggtgaaagacatcaacctgcacggaaacgttgtagctggcagtgaacgccttggttttcatatcagaggtcacaagtgctcatcatgtgagctgctgtggagtgacaacgttgcccactcgtctctccatggactccacttgtacaaggagtccggcctggacaattgtacaaggatttctggtttcttggcttttaaaaacttcgactatggagcaatgctgcatgtggagaactctgtagagattgaaaacatcactctggtagataatactataggattgctagcagtcgtatacgtattctccgccccacagaactctgtaaaaaaagtgcaaatcgtactgcggaattccgttattgtcgccacatcttccagtttcgactgtatccaggacaaggtcaaaccccattctgccaacctgacttcaacagaccgggcaccttcaaatccacgcggtggcaggattggaattttgtggcctgtgtttacaagtgagcccaatcagtggccacaggaaccttggcacaaagtgcgaaacgaccactcaatctcgggtataatgaaacttcaagatgtgactttttctagctttgtgaagtcctgctactctgatgacctggatgtgtgtatactgccaaacgcggaaaactcaggaattatgcatcccataaccgctgagaggacccgaatgctgaaaatcaaggacaagaacaaattctactttccctccctacaaccacgcaaggatctgggcaaggtagtgtgtcctgaactggattgtgctagtcccaggaaatacctctttaaagacctggacgggagagccttaggattgcctcccccagtgtcagtgttcccaaaaaccgaggccgagtggaccgcgagcttttttaacgctgttacgacagaacaggcacttaagatctctgagtag

SEQ ID NO: 247243 - DNA, 10190 bp, Artificial Sequence
  derived and/or modified sequence
atgactgcatggttgatttccctgatgtccatcgaggtcctgctgcttgctgtgcgccacctaagcctccacatcgaacccgaggagggctccctagcagggggaacatggataactgtgattttcgatggactggagctgggagtgctttaccctaataacgggagtcaactggaaatccaccttgtcaacgtgaatatggtggttcccgcactaaggagtgtgccctgcgatgttttcccagtgtttctcgacctccccgtggtcacgtgtcgaactcgtagcgtgctgtctgaagctcatgaaggcctctatttcctcgaagcatattttggagggcagttggtgagttcgcccaacccaggcccacgcgattcttgtacattcaaatttagcaaggctcagaccccgatcgtgcaccaggtgtatccacccagtggggtgcctggtaagttgattcacgtgtacggatggatcattacaggtagacttgagacctttgactttgatgccgagtacatcgattcccctgtaatccttgaagcccagggcgataaatgggtcactccctgttctctcattaataggcaaatgggcagctgctatccgattcaagaagaccacggcctgggcactctgcaatgtcacgttgagggagactacataggctcacagaacgtaagtttttccgtcttcaacaaggggaaaagtatggtgcataagaaggcgtggctgataagcgccaaacaagacctgttcctgtaccagacccattctgagatattgagcgtcttcccagagaccggcagcctggggggtagaactaacattacaataactggcgattttttcgataactccgctcaggttaccatcgcaggcatcccctgcgacatccgacacgtctctcccaggaaaatcgaatgtactacccgtgctcctgggaaggatgtgcgtcttaccactcctcagcctggcaacagaggtctgttatttgaggttggtgatgccgtggaaggcctggaactaactgaagcaacccccggatacagatggcagatcgtccccaatgcctcaagtccgtttggtttttggagtcaagaaggtcagccattccgcgcacgtctgagcggcttctttgtggccccagaaactaataattacacattctggatacaggcagactcacaggcttccttgcactttagctggtcggaagaacccagaaccaaggtgaaagtggctagcatctccgtgggcacagctgactggttcgatagctgggagcagaatcgggacgagggtacatggcagcagaaaacacccaagctggaattgcttgggggagcgatgtactaccttgaagcggaacaccatggaatcgcccctagtcgagggatgaggataggtgtgcagatccacaatacctggcttaacccggatgtggtgaccacttacctgagggaaaaacatcagatacgcgttcgggctcagagactgccagaggttcaggtgcttaatgtatctggacgcggaaattttttcctgacttgggataacgtgtcctcacagcccatccctgccaacgctactgcccatcttatccaaaccaccatcgaagaactattagctgtcaaatgtaagctcgagcctctgtggtcaaacatcctgcttcgactgggcttcgagagaggaccagaagtcagcaacagcgacggtgacctgacctccggtactgagccattttgcgggaggttctcactgaggcagccacggcacctggttctcacccctccagcagcacaaaaaggctataggctggaccagtatacccatctttgcctggcttataaaggtcatatgaataaaatcctcaagatgatcgtatcatttacgattggttttcaaaacatggtgaaaaacacgacctgtgactggagtttgacacgcacctccccagaatcatggcagttcgattgtactgatctgtgggaaacctgcgttaggtgctttggcgatttacaacccccacctgctaattctcccgtgctagtgcaccagatcaacctactccccctggcccaggagaccggcctgttctacgtagacgagatcatcattgctgacactaacgtgacggtatctcaggcggactccggtacagcccgaccagggggtaatctcgtggagtcagtgagcgtggtcggaagtcctcctgtatactccgtcaccagttggcttgccggatgtggaacagaattgcccctcataacagcacgtagcgtgccaaccgaaggtaccgaagagggatcgggccttgtgctcgtaactacccagcgaagacaacggacctctccgcctctgggagggcacttcaggatccagctcccgaacactgtgatcagtgacgtgcctgtccagatcagtgcccatcatttacaccagctgttacagaacaatgccgatgattttacatcgcgctatctgaatgctagcgatttcacagtgaaggaggatttgtacacctgctatgagcatgtgtggacactaagctggtctacccagattggagaccttcctaattttatccgcgtctcagacgagaacctgacgggtgtcaatcctgccgcagcaacccgagtggtttatgacggcggagtgttcctgggtccaatcttcggagacatgctcgccactgctaaccaacatacacaggtggtggtacgggttaacgatgtccctgcccattgtcccggatcgtgctcctttcagtatttgcaaggatctacaccatgtgtgcactctgtgtggtatagcattgacggagacattaatttgatgatatacattaccggcacaggtttctctggggacagtcagttcttacaagttacagtgaacaagacaagttgtaaagtgattttttctaaccaaaccaacgttgtatgtcagacggatctccttcctgtcggaatgcatcgcatactgatgctggttagaccatccggcctggccatcagcgctacaggtgaggacttgttcctgaacgtcaagccacgcttggatatggtggaaccttcccgagcagctgatatcggaggtctttgggcgacaatacgaggtagctctctagagggagtgtctctgattctatttggatcttactcttgcgctataaacgtagctacatcaaattccagtaggatccaatgtaaagtgcctcctcgcggtaaggacggtagaattgtgaacgtgaccgtgatacggggagattattcggctgtcttgccccgagcattcacctacgtgtccagcctcaacccagtgatcgtcaccctcagccgcaacatctccaacatcgccggtggggagacattagttatcggcgttgcgagactgatgaactatacagatctggacgttgaagtccatgtacaggacgcactggctcccgtgcatacccagagcgcctgggggctcgaggtggcattgcctcccctgccagcaggtctgcacaggatctccgtcagtattaacggcgtcagcatccatagtcagggagtggatttgcatatacagtacctgaccgaggttttttcaatagaaccatgctgcggctcattgctcggtggcaccatcctgagtatctccgggatcggattctctcgcgacccagccttggtttgggttttagtgggcaatcggagttgcgacattgtgaacctcaccgaagccagcatttggtgcgagaccctgccagcccctcagatcccagacgcgggagcccctacagtgccagccgcagtggaggtttgggcaggtaacaggttctttgcgcgaggcccttctccttcacttgtgggaaagggcttcactttcatgtatgaagccgcagctacccccgtggttaccgctatgcagggcgaaatcactaactctagcctgtccttgcatgttggcggttctaacctcagcaacagcgtcatcctgttgggaaacctcaactgtgacgtagagacccagtcattccaggggaatgtcagcctgagcggctgtagtatcccattgcacagcctggaggccggaatctatccacttcaggtaagacagaagcagatgggcttcgccaacatgtctgtagtgctccaacagtttgcagtgatgccgcgaattatggccattttccctagccagggttcggcatgcggcggtacaatactgacagtgcgcggactgctcctgaactctcgacggaggtcggttcgagtcgacctgtccggtccattcacatgcgttattctgagtctgggcgatcacactattctgtgtcaggtgtccctggaaggcgacccgttgcccggtgcctctttcagtctgaacgttacagttcttgtgaatggcctgacatctgaatgtcagggaaactgtacgctcttcattcgcgaggaggccagcccggtgatggatgcactttctacaaacacctccgggtccttaactaccgtacttatccggggacagagactggccactactgccgacgaaccaatggttttcgtggacgatcagctgccttgtaacgtcaccttttttaacgcttcgcatgtcgtgtgccagacaagagacctggcacctggccctcactatctcagcgtcttctatacccgcaacggatacgcctgctctgggaacgtgtctcgtcacttttatattatgccccaggtgtttcactactttccaaaaaatttttccctgcacggcggtagcctgctgaccatcgaggggacaggactccgtggacagaatacgacaagcgtttatattgatcagcagacctgcttaaccgttaatatcggagcggaactcattaggtgcatcgttccgactggcaatggaagcgtggcgctggaaattgaagtcgatggcttatggtaccatatcggcgtgatcgggtataataaggccttcacccctgaactgatcagcattagtcaatccgatgacatcctgactttcgctgttgcacaaatctctggtgccgctaacatagacatcttcatcgggatgtctccgtgtgttggcgtctccgggaaccacaccgtcttacaatgcgtagttccaagtctgccagctggggagtatcacgtgcggggatatgactgcattcggggttgggcatcatcagcactggtcttcacatccagagtcatcataacggcagtgacggagaactttgggtgcctgggtgggagactcgtgcacgtcttcggcgctggcttttcccccggaaatgtcagtgctgccgtatgcggcgctccatgtcgggttttggccaacgcgacagtgtctgcattctcctgtctcgtgctccctttagacgtgtcactggcttttctatgcggcctaaaaagggaagaagatagctgcgaggcggcacgacacacctatgtgcagtgtgaccttacagtagccatggccacagaacagctgttggaatcttggccctacctgtatatctgtgaggagtctagccagtgcctcttcgtccctgatcactgggccgaatcaatgttcccatccttttcagggttgtttatcagcccaaagctcgagcgagatgaggtgctcatctacaacagctcatgcaacatcacgatggaaaccgaggctgagatggaatgcgagacccccaaccagccaattactgtgaagataaccgagataaggaaaagatggggacagaacacacagggtaattttagcctccagttttgtcggagatggtcgaggacccatagctggttcccagagagactgcctcaggacggggataatgttaccgtggaaaatgggcaattgttgctacttgacaccaacacttcaattctgaatctgctgcacattaagggtgggaagcttatttttatggcccctggacctattgagctcagggcccacgccatccttgtgagtgacggaggagaactccggatcggcagtgaggacaaaccattccaaggacgcgctcagattacgctctatggctcatcctactctacccccttttttccatacggcgtaaaattcttagcggtgagaaatggaaccctgagtctccatggctccctgcctgaagtgatagttacttgcctgcgagccacagcgcacgccttggacaccgtcctagccctcgaggacgctgtcgattggaaccctggtgatgaggtggttattatttcaggaaccggggtgaaaggggcaaagcccatggaggagatcgtgaccgtggagaccgtccaggatacggacctctaccttaagtcccctctgcgttactcccataattttactgaaaactgggttgctggggaacaccacatactgaaggctacggttgcactgctgtccaggagtatcactatccaggggaatttaaccaacgagcgcgagaaattactagtttcttgccaagaggcgaatgcgccagaaggaaacctgcagcattgtctgtatagcatgtccgagaagatgctcggctcccgggacatgggcgcacgggtcatcgtgcagtcattccccgaggaaccctcacaagttcaactaaagggagtgcaattccaggtgctagggcaggcgtttcacaaacacctgtcaagccttacattggttggggctatgagggagagtttcattcagggttgcactgtgaggaattctttttcccgagggctcagtatgtgcggtactctgggactaaaagtagactccaatgtgttttataacatcctcggccatgcccttttggttggaacgtgtactgaaatgcgatacatcagctgggaggcaatccatggaagaaaggacgattggtccggacacggaaatatcattcgcaacaatgtaattattcaggtgtctggggctgaagggttatccaatcctgagatgttaacaccgtctggaatatatatttgctctccaactaacgttattgagggcaatagggtgtgtggtgccggttacggatatttcttccacctgatgaccaaccagacatcccaagcacctttgttgtcattcacacaaaacattgcacattcatgcacgagatacggcttgttcgtgtacccgaaattccagcctccctgggacaatgtcaccggaacaacgttgttccaaagctttaccgtgtgggagtctgccggaggcgctcagatttttcgctcgagcaacctgaggctcaaaaacttcaaggtatacagctgccgggattttggtattgatgtcttggaatcggacgcgaacactagcgtcaccgacagtcttttactggggcactttgcacacaagggcagcctctgtatgagctcgggtattaagactccaaagagatgggagctgatggtgagcaacacaactttcgtcaacttcgaccttataaactgtgtagcaattaggacctgttccgactgtagccagggccagggaggattcactgttaaaacgagtcagctgaagtttaccaactcaagtaacctcgtcgcttttccctttccccatgccgcaatcctagaggacctcgatggttcgctttctggtaagaatcgttcccacatactagctagcatggaaacgctttccgcttcttgtctagtgaactcgagctttggccgagtggtgcacggaagcgcgtgtggtgggggtgtgttgttccaccgaatgtcgatcggcttggctaacactcctgaagtatcatatgatttgaccatgactgattcaaggaataagacaaccacagtgaattacgttagggatacactgagtaatccaagaggttggatggccctattgttagaccaggagacctattccctgcaatcagagaatctctggatcaataggtcactgcagtactccgctaccttcgacaatttcgcccctggcaattatctcctgttagtacatacagatctgcccccttacccagatatcctccttcgatgtggttccagggtgggcctctcatttcctttcctgccatcccccggacagaatcaggggtgcgattggttttttaactcccagctgcgtcagctcacgtacctggtgtcaggcgaaggccaggtgcaggtcatcctcagggtaaaagagggtatgccacctaccatttctgcatccacgtccgcccctgagtcagcattaaaatggtctttgccagagacatggcaaggggtggaagagggttggggtggctacaacaatacgataccaggtccaggcgatgacgtactcatcctgcccaaccgaaccgtactcgtggacacagacctccccttcttcaaaggcttgtatgtgatgggtacacttgatttccctgtggaccgttccaacgtgctgagcgtggcctgcatggtcatcgctgggggtgagctgaaagtgggcaccttagaaaatcccctggagaaagaacagaagctcctgatccttctccgagcatctgagggagtcttctgcgacaggatgaatgggatccatattgatcccggtactattggcgtgtatgggaaagtacacctatacagtgcttaccctaaaaatagctggacccacttgggggcagacattgcctcaggaaacgaacgaatcatcgtggaggacgccgtggactggaggccacatgacaaaattgtcctctcttcctcttcctacgaaccacatgaggccgaggtgctgaccgtcaaagaggtaaaaggtcatcacgttaggatctatgagaggctgaagcatagacatatcgggagcgtgcatgtcaccgaagatggcagacatatcaggctagccgcagaggtcggcctcttaactcgaaacatccaaatccagcctgatgtgtcgtgtcggggacggctcttcgtcgggagcttcagaaagtcatccagagaagagttttccggtgtgctgcagctgctgaacgtcgaaatccagaactttggaagccctctctactcaagcgtggaattctcgaatgtatccgccggaagctggattatttcaagcactctacaccagtcctgcggcggaggaatccacgcagccgcatcacacggcgtattacttaatgataacattgtcttcgggacggcgggacatgggatagacctcgaaggacaggcttatactgtgactaataacctagtggtcctcatgacccagccagcctggtccaccatatgggtggccggtattaaagtgaaccaggtcaaggatatcaatctccacggcaatgtggtagccggtagcgagagactggggttccacattcgcggacacaagtgctcttcttgtgagctgctgtggtctgacaatgtggcccactcgtccctgcacggtctacacctgtacaaggagagcgggttggataactgcacaagaatatctggcttcctggcattcaaaaacttcgattatggggcaatgctgcatgtggaaaattcagtggaaatcgaaaacattaccctcgtggataacaccattggcctgctcgctgtcgtgtatgtgttctccgcgccacaaaattcagtgaagaaggttcaaattgttctcagaaatagtgttatagtagcgacaagcagctcttttgactgcattcaggataaagtgaagcctcattccgctaatttgacatctacagaccgggctccctccaatccgcgaggaggacggattggaatcctctggcctgtgttcacatcagagccaaaccagtggccccaggaaccatggcataaggtacgtaacgaccattcaatctctggtattatgaagctgcaggatgttaccttcagctcctttgtgaaatcgtgttattcggacgatctggacgtgtgcattttgcctaacgcggagaacagtggcatcatgcatcccattactgccgagcggacccggatgctgaaaattaaagacaagaacaagttttattttccctcgctgcagccacgcaaagacctcggcaaggtcgtgtgtcctgaactcgactgtgcatcaccaaggaaatacctgttcaaagatttggatggccgagcccttggcctccccccacccgtgtccgtctttccaaagactgaagcagaatggactgcttcgttcttcaatgctggtacgaaagagcagtcaatcgagatcaacgttta

SEQ ID NO: 247244 - DNA, 10191 bp, Artificial Sequence
  derived and/or modified sequence
atgaccgcctggctgatcagcctgatgagcatcgaggtgctgctgctggccgtgagacacctgagcctgcacatcgagcccgaggagggcagcctggccggcggcacctggatcaccgtgatcttcgacggcctggagctgggcgtgctgtaccccaacaacggcagccagctggagatccacctggtgaacgtgaacatggtggtgcccgccctgagaagcgtgccctgcgacgtgttccccgtgttcctggacctgcccgtggtgacctgcagaaccagaagcgtgctgagcgaggcccacgagggcctgtacttcctggaggcctacttcggcggccagctggtgagcagccccaaccccggccccagagacagctgcaccttcaagttcagcaaggcccagacccccatcgtgcaccaggtgtacccccccagcggcgtgcccggcaagctgatccacgtgtacggctggatcatcaccggcagactggagaccttcgacttcgacgccgagtacatcgacagccccgtgatcctggaggcccagggcgacaagtgggtgaccccctgcagcctgatcaacagacagatgggcagctgctaccccatccaggaggaccacggcctgggcaccctgcagtgccacgtggagggcgactacatcggcagccagaacgtgagcttcagcgtgttcaacaagggcaagagcatggtgcacaagaaggcctggctgatcagcgccaagcaggacctgttcctgtaccagacccacagcgagatcctgagcgtgttccccgagaccggcagcctgggcggcagaaccaacatcaccatcaccggcgacttcttcgacaacagcgcccaggtgaccatcgccggcatcccctgcgacatcagacacgtgagccccagaaagatcgagtgcaccaccagagcccccggcaaggacgtgagactgaccaccccccagcccggcaacagaggcctgctgttcgaggtgggcgacgccgtggagggcctggagctgaccgaggccacccccggctacagatggcagatcgtgcccaacgccagcagccccttcggcttctggagccaggagggccagcccttcagagccagactgagcggcttcttcgtggcccccgagaccaacaactacaccttctggatccaggccgacagccaggccagcctgcacttcagctggagcgaggagcccagaaccaaggtgaaggtggccagcatcagcgtgggcaccgccgactggttcgacagctgggagcagaacagagacgagggcacctggcagcagaagacccccaagctggagctgctgggcggcgccatgtactacctggaggccgagcaccacggcatcgcccccagcagaggcatgagaatcggcgtgcagatccacaacacctggctgaaccccgacgtggtgaccacctacctgagagagaagcaccagatcagagtgagagcccagagactgcccgaggtgcaggtgctgaacgtgagcggcagaggcaacttcttcctgacctgggacaacgtgagcagccagcccatccccgccaacgccaccgcccacctgatccagaccaccatcgaggagctgctggccgtgaagtgcaagctggagcccctgtggagcaacatcctgctgagactgggcttcgagagaggccccgaggtgagcaacagcgacggcgacctgaccagcggcaccgagcccttctgcggcagattcagcctgagacagcccagacacctggtgctgaccccccccgccgcccagaagggctacagactggaccagtacacccacctgtgcctggcctacaagggccacatgaacaagatcctgaagatgatcgtgagcttcaccatcggcttccagaacatggtgaagaacaccacctgcgactggagcctgaccagaaccagccccgagagctggcagttcgactgcaccgacctgtgggagacctgcgtgagatgcttcggcgacctgcagcccccccccgccaacagccccgtgctggtgcaccagatcaacctgctgcccctggcccaggagaccggcctgttctacgtggacgagatcatcatcgccgacaccaacgtgaccgtgagccaggccgacagcggcaccgccagacccggcggcaacctggtggagagcgtgagcgtggtgggcagcccccccgtgtacagcgtgaccagctggctggccggctgcggcaccgagctgcccctgatcaccgccagaagcgtgcccaccgagggcaccgaggagggcagcggcctggtgctggtgaccacccagagaagacagagaaccagcccccccctgggcggccacttcagaatccagctgcccaacaccgtgatcagcgacgtgcccgtgcagatcagcgcccaccacctgcaccagctgctgcagaacaacgccgacgacttcaccagcagatacctgaacgccagcgacttcaccgtgaaggaggacctgtacacctgctacgagcacgtgtggaccctgagctggagcacccagatcggcgacctgcccaacttcatcagagtgagcgacgagaacctgaccggcgtgaaccccgccgccgccaccagagtggtgtacgacggcggcgtgttcctgggccccatcttcggcgacatgctggccaccgccaaccagcacacccaggtggtggtgagagtgaacgacgtgcccgcccactgccccggcagctgcagcttccagtacctgcagggcagcaccccctgcgtgcacagcgtgtggtacagcatcgacggcgacatcaacctgatgatctacatcaccggcaccggcttcagcggcgacagccagttcctgcaggtgaccgtgaacaagaccagctgcaaggtgatcttcagcaaccagaccaacgtggtgtgccagaccgacctgctgcccgtgggcatgcacagaatcctgatgctggtgagacccagcggcctggccatcagcgccaccggcgaggacctgttcctgaacgtgaagcccagactggacatggtggagcccagcagagccgccgacatcggcggcctgtgggccaccatcagaggcagcagcctggagggcgtgagcctgatcctgttcggcagctacagctgcgccatcaacgtggccaccagcaacagcagcagaatccagtgcaaggtgccccccagaggcaaggacggcagaatcgtgaacgtgaccgtgatcagaggcgactacagcgccgtgctgcccagagccttcacctacgtgagcagcctgaaccccgtgatcgtgaccctgagcagaaacatcagcaacatcgccggcggcgagaccctggtgatcggcgtggccagactgatgaactacaccgacctggacgtggaggtgcacgtgcaggacgccctggcccccgtgcacacccagagcgcctggggcctggaggtggccctgccccccctgcccgccggcctgcacagaatcagcgtgagcatcaacggcgtgagcatccacagccagggcgtggacctgcacatccagtacctgaccgaggtgttcagcatcgagccctgctgcggcagcctgctgggcggcaccatcctgagcatcagcggcatcggcttcagcagagaccccgccctggtgtgggtgctggtgggcaacagaagctgcgacatcgtgaacctgaccgaggccagcatctggtgcgagaccctgcccgccccccagatccccgacgccggcgcccccaccgtgcccgccgccgtggaggtgtgggccggcaacagattcttcgccagaggccccagccccagcctggtgggcaagggcttcaccttcatgtacgaggccgccgccacccccgtggtgaccgccatgcagggcgagatcaccaacagcagcctgagcctgcacgtgggcggcagcaacctgagcaacagcgtgatcctgctgggcaacctgaactgcgacgtggagacccagagcttccagggcaacgtgagcctgagcggctgcagcatccccctgcacagcctggaggccggcatctaccccctgcaggtgagacagaagcagatgggcttcgccaacatgagcgtggtgctgcagcagttcgccgtgatgcccagaatcatggccatcttccccagccagggcagcgcctgcggcggcaccatcctgaccgtgagaggcctgctgctgaacagcagaagaagaagcgtgagagtggacctgagcggccccttcacctgcgtgatcctgagcctgggcgaccacaccatcctgtgccaggtgagcctggagggcgaccccctgcccggcgccagcttcagcctgaacgtgaccgtgctggtgaacggcctgaccagcgagtgccagggcaactgcaccctgttcatcagagaggaggccagccccgtgatggacgccctgagcaccaacaccagcggcagcctgaccaccgtgctgatcagaggccagagactggccaccaccgccgacgagcccatggtgttcgtggacgaccagctgccctgcaacgtgaccttcttcaacgccagccacgtggtgtgccagaccagagacctggcccccggcccccactacctgagcgtgttctacaccagaaacggctacgcctgcagcggcaacgtgagcagacacttctacatcatgccccaggtgttccactacttccccaagaacttcagcctgcacggcggcagcctgctgaccatcgagggcaccggcctgagaggccagaacaccaccagcgtgtacatcgaccagcagacctgcctgaccgtgaacatcggcgccgagctgatcagatgcatcgtgcccaccggcaacggcagcgtggccctggagatcgaggtggacggcctgtggtaccacatcggcgtgatcggctacaacaaggccttcacccccgagctgatcagcatcagccagagcgacgacatcctgaccttcgccgtggcccagatcagcggcgccgccaacatcgacatcttcatcggcatgagcccctgcgtgggcgtgagcggcaaccacaccgtgctgcagtgcgtggtgcccagcctgcccgccggcgagtaccacgtgagaggctacgactgcatcagaggctgggccagcagcgccctggtgttcaccagcagagtgatcatcaccgccgtgaccgagaacttcggctgcctgggcggcagactggtgcacgtgttcggcgccggcttcagccccggcaacgtgagcgccgccgtgtgcggcgccccctgcagagtgctggccaacgccaccgtgagcgccttcagctgcctggtgctgcccctggacgtgagcctggccttcctgtgcggcctgaagagagaggaggacagctgcgaggccgccagacacacctacgtgcagtgcgacctgaccgtggccatggccaccgagcagctgctggagagctggccctacctgtacatctgcgaggagagcagccagtgcctgttcgtgcccgaccactgggccgagagcatgttccccagcttcagcggcctgttcatcagccccaagctggagagagacgaggtgctgatctacaacagcagctgcaacatcaccatggagaccgaggccgagatggagtgcgagacccccaaccagcccatcaccgtgaagatcaccgagatcagaaagagatggggccagaacacccagggcaacttcagcctgcagttctgcagaagatggagcagaacccacagctggttccccgagagactgccccaggacggcgacaacgtgaccgtggagaacggccagctgctgctgctggacaccaacaccagcatcctgaacctgctgcacatcaagggcggcaagctgatcttcatggcccccggccccatcgagctgagagcccacgccatcctggtgagcgacggcggcgagctgagaatcggcagcgaggacaagcccttccagggcagagcccagatcaccctgtacggcagcagctacagcacccccttcttcccctacggcgtgaagttcctggccgtgagaaacggcaccctgagcctgcacggcagcctgcccgaggtgatcgtgacctgcctgagagccaccgcccacgccctggacaccgtgctggccctggaggacgccgtggactggaaccccggcgacgaggtggtgatcatcagcggcaccggcgtgaagggcgccaagcccatggaggagatcgtgaccgtggagaccgtgcaggacaccgacctgtacctgaagagccccctgagatacagccacaacttcaccgagaactgggtggccggcgagcaccacatcctgaaggccaccgtggccctgctgagcagaagcatcaccatccagggcaacctgaccaacgagagagagaagctgctggtgagctgccaggaggccaacgcccccgagggcaacctgcagcactgcctgtacagcatgagcgagaagatgctgggcagcagagacatgggcgccagagtgatcgtgcagagcttccccgaggagcccagccaggtgcagctgaagggcgtgcagttccaggtgctgggccaggccttccacaagcacctgagcagcctgaccctggtgggcgccatgagagagagcttcatccagggctgcaccgtgagaaacagcttcagcagaggcctgagcatgtgcggcaccctgggcctgaaggtggacagcaacgtgttctacaacatcctgggccacgccctgctggtgggcacctgcaccgagatgagatacatcagctgggaggccatccacggcagaaaggacgactggagcggccacggcaacatcatcagaaacaacgtgatcatccaggtgagcggcgccgagggcctgagcaaccccgagatgctgacccccagcggcatctacatctgcagccccaccaacgtgatcgagggcaacagagtgtgcggcgccggctacggctacttcttccacctgatgaccaaccagaccagccaggcccccctgctgagcttcacccagaacatcgcccacagctgcaccagatacggcctgttcgtgtaccccaagttccagcccccctgggacaacgtgaccggcaccaccctgttccagagcttcaccgtgtgggagagcgccggcggcgcccagatcttcagaagcagcaacctgagactgaagaacttcaaggtgtacagctgcagagacttcggcatcgacgtgctggagagcgacgccaacaccagcgtgaccgacagcctgctgctgggccacttcgcccacaagggcagcctgtgcatgagcagcggcatcaagacccccaagagatgggagctgatggtgagcaacaccaccttcgtgaacttcgacctgatcaactgcgtggccatcagaacctgcagcgactgcagccagggccagggcggcttcaccgtgaagaccagccagctgaagttcaccaacagcagcaacctggtggccttccccttcccccacgccgccatcctggaggacctggacggcagcctgagcggcaagaacagaagccacatcctggccagcatggagaccctgagcgccagctgcctggtgaacagcagcttcggcagagtggtgcacggcagcgcctgcggcggcggcgtgctgttccacagaatgagcatcggcctggccaacacccccgaggtgagctacgacctgaccatgaccgacagcagaaacaagaccaccaccgtgaactacgtgagagacaccctgagcaaccccagaggctggatggccctgctgctggaccaggagacctacagcctgcagagcgagaacctgtggatcaacagaagcctgcagtacagcgccaccttcgacaacttcgcccccggcaactacctgctgctggtgcacaccgacctgcccccctaccccgacatcctgctgagatgcggcagcagagtgggcctgagcttccccttcctgcccagccccggccagaaccagggctgcgactggttcttcaacagccagctgagacagctgacctacctggtgagcggcgagggccaggtgcaggtgatcctgagagtgaaggagggcatgccccccaccatcagcgccagcaccagcgcccccgagagcgccctgaagtggagcctgcccgagacctggcagggcgtggaggagggctggggcggctacaacaacaccatccccggccccggcgacgacgtgctgatcctgcccaacagaaccgtgctggtggacaccgacctgcccttcttcaagggcctgtacgtgatgggcaccctggacttccccgtggacagaagcaacgtgctgagcgtggcctgcatggtgatcgccggcggcgagctgaaggtgggcaccctggagaaccccctggagaaggagcagaagctgctgatcctgctgagagccagcgagggcgtgttctgcgacagaatgaacggcatccacatcgaccccggcaccatcggcgtgtacggcaaggtgcacctgtacagcgcctaccccaagaacagctggacccacctgggcgccgacatcgccagcggcaacgagagaatcatcgtggaggacgccgtggactggagaccccacgacaagatcgtgctgagcagcagcagctacgagccccacgaggccgaggtgctgaccgtgaaggaggtgaagggccaccacgtgagaatctacgagagactgaagcacagacacatcggcagcgtgcacgtgaccgaggacggcagacacatcagactggccgccgaggtgggcctgctgaccagaaacatccagatccagcccgacgtgagctgcagaggcagactgttcgtgggcagcttcagaaagagcagcagagaggagttcagcggcgtgctgcagctgctgaacgtggagatccagaacttcggcagccccctgtacagcagcgtggagttcagcaacgtgagcgccggcagctggatcatcagcagcaccctgcaccagagctgcggcggcggcatccacgccgccgccagccacggcgtgctgctgaacgacaacatcgtgttcggcaccgccggccacggcatcgacctggagggccaggcctacaccgtgaccaacaacctggtggtgctgatgacccagcccgcctggagcaccatctgggtggccggcatcaaggtgaaccaggtgaaggacatcaacctgcacggcaacgtggtggccggcagcgagagactgggcttccacatcagaggccacaagtgcagcagctgcgagctgctgtggagcgacaacgtggcccacagcagcctgcacggcctgcacctgtacaaggagagcggcctggacaactgcaccagaatcagcggcttcctggccttcaagaacttcgactacggcgccatgctgcacgtggagaacagcgtggagatcgagaacatcaccctggtggacaacaccatcggcctgctggccgtggtgtacgtgttcagcgccccccagaacagcgtgaagaaggtgcagatcgtgctgagaaacagcgtgatcgtggccaccagcagcagcttcgactgcatccaggacaaggtgaagccccacagcgccaacctgaccagcaccgacagagcccccagcaaccccagaggcggcagaatcggcatcctgtggcccgtgttcaccagcgagcccaaccagtggccccaggagccctggcacaaggtgagaaacgaccacagcatcagcggcatcatgaagctgcaggacgtgaccttcagcagcttcgtgaagagctgctacagcgacgacctggacgtgtgcatcctgcccaacgccgagaacagcggcatcatgcaccccatcaccgccgagagaaccagaatgctgaagatcaaggacaagaacaagttctacttccccagcctgcagcccagaaaggacctgggcaaggtggtgtgccccgagctggactgcgccagccccagaaagtacctgttcaaggacctggacggcagagccctgggcctgcccccccccgtgagcgtgttccccaagaccgaggccgagtggaccgccagcttcttcaacgccgtgaccaccgagcaggccctgaagatcagcgagtag

SEQ ID NO: 247245 - DNA, 10191 bp, Artificial Sequence
  derived and/or modified sequence
atgaccgcctggctgatcagcctgatgagcatcgaggtgctgctgctggccgtgagacacctgagcctgcacatcgagcccgaggagggcagcctggccggcggcacctggatcaccgtgatcttcgacggcctggagctgggcgtgctgtaccccaacaacggcagccagctggagatccacctggtgaacgtgaacatggtggtgcccgccctgagaagcgtgccctgcgacgtgttccccgtgttcctggacctgcccgtggtgacctgcagaaccagaagcgtgctgagcgaggcccacgagggcctgtacttcctggaggcctacttcggcggccagctggtgagcagccccaaccccggccccagagacagctgcaccttcaagttcagcaaggcccagacccccatcgtgcaccaggtgtacccccccagcggcgtgcccggcaagctgatccacgtgtacggctggatcatcaccggcagactggagaccttcgacttcgacgccgagtacatcgacagccccgtgatcctggaggcccagggcgacaagtgggtgaccccctgcagcctgatcaacagacagatgggcagctgctaccccatccaggaggaccacggcctgggcaccctgcagtgccacgtggagggcgactacatcggcagccagaacgtgagcttcagcgtgttcaacaagggcaagagcatggtgcacaagaaggcctggctgatcagcgccaagcaggacctgttcctgtaccagacccacagcgagatcctgagcgtgttccccgagaccggcagcctgggcggcagaaccaacatcaccatcaccggcgacttcttcgacaacagcgcccaggtgaccatcgccggcatcccctgcgacatcagacacgtgagccccagaaagatcgagtgcaccaccagagcccccggcaaggacgtgagactgaccaccccccagcccggcaacagaggcctgctgttcgaggtgggcgacgccgtggagggcctggagctgaccgaggccacccccggctacagatggcagatcgtgcccaacgccagcagccccttcggcttctggagccaggagggccagcccttcagagccagactgagcggcttcttcgtggcccccgagaccaacaactacaccttctggatccaggccgacagccaggccagcctgcacttcagctggagcgaggagcccagaaccaaggtgaaggtggccagcatcagcgtgggcaccgccgactggttcgacagctgggagcagaacagagacgagggcacctggcagcagaagacccccaagctggagctgctgggcggcgccatgtactacctggaggccgagcaccacggcatcgcccccagcagaggcatgagaatcggcgtgcagatccacaacacctggctgaaccccgacgtggtgaccacctacctgagagagaagcaccagatcagagtgagagcccagagactgcccgaggtgcaggtgctgaacgtgagcggcagaggcaacttcttcctgacctgggacaacgtgagcagccagcccatccccgccaacgccaccgcccacctgatccagaccaccatcgaggagctgctggccgtgaagtgcaagctggagcccctgtggagcaacatcctgctgagactgggcttcgagagaggccccgaggtgagcaacagcgacggcgacctgaccagcggcaccgagcccttctgcggcagattcagcctgagacagcccagacacctggtgctgaccccccccgccgcccagaagggctacagactggaccagtacacccacctgtgcctggcctacaagggccacatgaacaagatcctgaagatgatcgtgagcttcaccatcggcttccagaacatggtgaagaacaccacctgcgactggagcctgaccagaaccagccccgagagctggcagttcgactgcaccgacctgtgggagacctgcgtgagatgcttcggcgacctgcagcccccccccgccaacagccccgtgctggtgcaccagatcaacctgctgcccctggcccaggagaccggcctgttctacgtggacgagatcatcatcgccgacaccaacgtgaccgtgagccaggccgacagcggcaccgccagacccggcggcaacctggtggagagcgtgagcgtggtgggcagcccccccgtgtacagcgtgaccagctggctggccggctgcggcaccgagctgcccctgatcaccgccagaagcgtgcccaccgagggcaccgaggagggcagcggcctggtgctggtgaccacccagagaagacagagaaccagcccccccctgggcggccacttcagaatccagctgcccaacaccgtgatcagcgacgtgcccgtgcagatcagcgcccaccacctgcaccagctgctgcagaacaacgccgacgacttcaccagcagatacctgaacgccagcgacttcaccgtgaaggaggacctgtacacctgctacgagcacgtgtggaccctgagctggagcacccagatcggcgacctgcccaacttcatcagagtgagcgacgagaacctgaccggcgtgaaccccgccgccgccaccagagtggtgtacgacggcggcgtgttcctgggccccatcttcggcgacatgctggccaccgccaaccagcacacccaggtggtggtgagagtgaacgacgtgcccgcccactgccccggcagctgcagcttccagtacctgcagggcagcaccccctgcgtgcacagcgtgtggtacagcatcgacggcgacatcaacctgatgatctacatcaccggcaccggcttcagcggcgacagccagttcctgcaggtgaccgtgaacaagaccagctgcaaggtgatcttcagcaaccagaccaacgtggtgtgccagaccgacctgctgcccgtgggcatgcacagaatcctgatgctggtgagacccagcggcctggccatcagcgccaccggcgaggacctgttcctgaacgtgaagcccagactggacatggtggagcccagcagagccgccgacatcggcggcctgtgggccaccatcagaggcagcagcctggagggcgtgagcctgatcctgttcggcagctacagctgcgccatcaacgtggccaccagcaacagcagcagaatccagtgcaaggtgccccccagaggcaaggacggcagaatcgtgaacgtgaccgtgatcagaggcgactacagcgccgtgctgcccagagccttcacctacgtgagcagcctgaaccccgtgatcgtgaccctgagcagaaacatcagcaacatcgccggcggcgagaccctggtgatcggcgtggccagactgatgaactacaccgacctggacgtggaggtgcacgtgcaggacgccctggcccccgtgcacacccagagcgcctggggcctggaggtggccctgccccccctgcccgccggcctgcacagaatcagcgtgagcatcaacggcgtgagcatccacagccagggcgtggacctgcacatccagtacctgaccgaggtgttcagcatcgagccctgctgcggcagcctgctgggcggcaccatcctgagcatcagcggcatcggcttcagcagagaccccgccctggtgtgggtgctggtgggcaacagaagctgcgacatcgtgaacctgaccgaggccagcatctggtgcgagaccctgcccgccccccagatccccgacgccggcgcccccaccgtgcccgccgccgtggaggtgtgggccggcaacagattcttcgccagaggccccagccccagcctggtgggcaagggcttcaccttcatgtacgaggccgccgccacccccgtggtgaccgccatgcagggcgagatcaccaacagcagcctgagcctgcacgtgggcggcagcaacctgagcaacagcgtgatcctgctgggcaacctgaactgcgacgtggagacccagagcttccagggcaacgtgagcctgagcggctgcagcatccccctgcacagcctggaggccggcatctaccccctgcaggtgagacagaagcagatgggcttcgccaacatgagcgtggtgctgcagcagttcgccgtgatgcccagaatcatggccatcttccccagccagggcagcgcctgcggcggcaccatcctgaccgtgagaggcctgctgctgaacagcagaagaagaagcgtgagagtggacctgagcggccccttcacctgcgtgatcctgagcctgggcgaccacaccatcctgtgccaggtgagcctggagggcgaccccctgcccggcgccagcttcagcctgaacgtgaccgtgctggtgaacggcctgaccagcgagtgccagggcaactgcaccctgttcatcagagaggaggccagccccgtgatggacgccctgagcaccaacaccagcggcagcctgaccaccgtgctgatcagaggccagagactggccaccaccgccgacgagcccatggtgttcgtggacgaccagctgccctgcaacgtgaccttcttcaacgccagccacgtggtgtgccagaccagagacctggcccccggcccccactacctgagcgtgttctacaccagaaacggctacgcctgcagcggcaacgtgagcagacacttctacatcatgccccaggtgttccactacttccccaagaacttcagcctgcacggcggcagcctgctgaccatcgagggcaccggcctgagaggccagaacaccaccagcgtgtacatcgaccagcagacctgcctgaccgtgaacatcggcgccgagctgatcagatgcatcgtgcccaccggcaacggcagcgtggccctggagatcgaggtggacggcctgtggtaccacatcggcgtgatcggctacaacaaggccttcacccccgagctgatcagcatcagccagagcgacgacatcctgaccttcgccgtggcccagatcagcggcgccgccaacatcgacatcttcatcggcatgagcccctgcgtgggcgtgagcggcaaccacaccgtgctgcagtgcgtggtgcccagcctgcccgccggcgagtaccacgtgagaggctacgactgcatcagaggctgggccagcagcgccctggtgttcaccagcagagtgatcatcaccgccgtgaccgagaacttcggctgcctgggcggcagactggtgcacgtgttcggcgccggcttcagccccggcaacgtgagcgccgccgtgtgcggcgccccctgcagagtgctggccaacgccaccgtgagcgccttcagctgcctggtgctgcccctggacgtgagcctggccttcctgtgcggcctgaagagagaggaggacagctgcgaggccgccagacacacctacgtgcagtgcgacctgaccgtggccatggccaccgagcagctgctggagagctggccctacctgtacatctgcgaggagagcagccagtgcctgttcgtgcccgaccactgggccgagagcatgttccccagcttcagcggcctgttcatcagccccaagctggagagagacgaggtgctgatctacaacagcagctgcaacatcaccatggagaccgaggccgagatggagtgcgagacccccaaccagcccatcaccgtgaagatcaccgagatcagaaagagatggggccagaacacccagggcaacttcagcctgcagttctgcagaagatggagcagaacccacagctggttccccgagagactgccccaggacggcgacaacgtgaccgtggagaacggccagctgctgctgctggacaccaacaccagcatcctgaacctgctgcacatcaagggcggcaagctgatcttcatggcccccggccccatcgagctgagagcccacgccatcctggtgagcgacggcggcgagctgagaatcggcagcgaggacaagcccttccagggcagagcccagatcaccctgtacggcagcagctacagcacccccttcttcccctacggcgtgaagttcctggccgtgagaaacggcaccctgagcctgcacggcagcctgcccgaggtgatcgtgacctgcctgagagccaccgcccacgccctggacaccgtgctggccctggaggacgccgtggactggaaccccggcgacgaggtggtgatcatcagcggcaccggcgtgaagggcgccaagcccatggaggagatcgtgaccgtggagaccgtgcaggacaccgacctgtacctgaagagccccctgagatacagccacaacttcaccgagaactgggtggccggcgagcaccacatcctgaaggccaccgtggccctgctgagcagaagcatcaccatccagggcaacctgaccaacgagagagagaagctgctggtgagctgccaggaggccaacgcccccgagggcaacctgcagcactgcctgtacagcatgagcgagaagatgctgggcagcagagacatgggcgccagagtgatcgtgcagagcttccccgaggagcccagccaggtgcagctgaagggcgtgcagttccaggtgctgggccaggccttccacaagcacctgagcagcctgaccctggtgggcgccatgagagagagcttcatccagggctgcaccgtgagaaacagcttcagcagaggcctgagcatgtgcggcaccctgggcctgaaggtggacagcaacgtgttctacaacatcctgggccacgccctgctggtgggcacctgcaccgagatgagatacatcagctgggaggccatccacggcagaaaggacgactggagcggccacggcaacatcatcagaaacaacgtgatcatccaggtgagcggcgccgagggcctgagcaaccccgagatgctgacccccagcggcatctacatctgcagccccaccaacgtgatcgagggcaacagagtgtgcggcgccggctacggctacttcttccacctgatgaccaaccagaccagccaggcccccctgctgagcttcacccagaacatcgcccacagctgcaccagatacggcctgttcgtgtaccccaagttccagcccccctgggacaacgtgaccggcaccaccctgttccagagcttcaccgtgtgggagagcgccggcggcgcccagatcttcagaagcagcaacctgagactgaagaacttcaaggtgtacagctgcagagacttcggcatcgacgtgctggagagcgacgccaacaccagcgtgaccgacagcctgctgctgggccacttcgcccacaagggcagcctgtgcatgagcagcggcatcaagacccccaagagatgggagctgatggtgagcaacaccaccttcgtgaacttcgacctgatcaactgcgtggccatcagaacctgcagcgactgcagccagggccagggcggcttcaccgtgaagaccagccagctgaagttcaccaacagcagcaacctggtggccttccccttcccccacgccgccatcctggaggacctggacggcagcctgagcggcaagaacagaagccacatcctggccagcatggagaccctgagcgccagctgcctggtgaacagcagcttcggcagagtggtgcacggcagcgcctgcggcggcggcgtgctgttccacagaatgagcatcggcctggccaacacccccgaggtgagctacgacctgaccatgaccgacagcagaaacaagaccaccaccgtgaactacgtgagagacaccctgagcaaccccagaggctggatggccctgctgctggaccaggagacctacagcctgcagagcgagaacctgtggatcaacagaagcctgcagtacagcgccaccttcgacaacttcgcccccggcaactacctgctgctggtgcacaccgacctgcccccctaccccgacatcctgctgagatgcggcagcagagtgggcctgagcttccccttcctgcccagccccggccagaaccagggctgcgactggttcttcaacagccagctgagacagctgacctacctggtgagcggcgagggccaggtgcaggtgatcctgagagtgaaggagggcatgccccccaccatcagcgccagcaccagcgcccccgagagcgccctgaagtggagcctgcccgagacctggcagggcgtggaggagggctggggcggctacaacaacaccatccccggccccggcgacgacgtgctgatcctgcccaacagaaccgtgctggtggacaccgacctgcccttcttcaagggcctgtacgtgatgggcaccctggacttccccgtggacagaagcaacgtgctgagcgtggcctgcatggtgatcgccggcggcgagctgaaggtgggcaccctggagaaccccctggagaaggagcagaagctgctgatcctgctgagagccagcgagggcgtgttctgcgacagaatgaacggcatccacatcgaccccggcaccatcggcgtgtacggcaaggtgcacctgtacagcgcctaccccaagaacagctggacccacctgggcgccgacatcgccagcggcaacgagagaatcatcgtggaggacgccgtggactggagaccccacgacaagatcgtgctgagcagcagcagctacgagccccacgaggccgaggtgctgaccgtgaaggaggtgaagggccaccacgtgagaatctacgagagactgaagcacagacacatcggcagcgtgcacgtgaccgaggacggcagacacatcagactggccgccgaggtgggcctgctgaccagaaacatccagatccagcccgacgtgagctgcagaggcagactgttcgtgggcagcttcagaaagagcagcagagaggagttcagcggcgtgctgcagctgctgaacgtggagatccagaacttcggcagccccctgtacagcagcgtggagttcagcaacgtgagcgccggcagctggatcatcagcagcaccctgcaccagagctgcggcggcggcatccacgccgccgccagccacggcgtgctgctgaacgacaacatcgtgttcggcaccgccggccacggcatcgacctggagggccaggcctacaccgtgaccaacaacctggtggtgctgatgacccagcccgcctggagcaccatctgggtggccggcatcaaggtgaaccaggtgaaggacatcaacctgcacggcaacgtggtggccggcagcgagagactgggcttccacatcagaggccacaagtgcagcagctgcgagctgctgtggagcgacaacgtggcccacagcagcctgcacggcctgcacctgtacaaggagagcggcctggacaactgcaccagaatcagcggcttcctggccttcaagaacttcgactacggcgccatgctgcacgtggagaacagcgtggagatcgagaacatcaccctggtggacaacaccatcggcctgctggccgtggtgtacgtgttcagcgccccccagaacagcgtgaagaaggtgcagatcgtgctgagaaacagcgtgatcgtggccaccagcagcagcttcgactgcatccaggacaaggtgaagccccacagcgccaacctgaccagcaccgacagagcccccagcaaccccagaggcggcagaatcggcatcctgtggcccgtgttcaccagcgagcccaaccagtggccccaggagccctggcacaaggtgagaaacgaccacagcatcagcggcatcatgaagctgcaggacgtgaccttcagcagcttcgtgaagagctgctacagcgacgacctggacgtgtgcatcctgcccaacgccgagaacagcggcatcatgcaccccatcaccgccgagagaaccagaatgctgaagatcaaggacaagaacaagttctacttccccagcctgcagcccagaaaggacctgggcaaggtggtgtgccccgagctggactgcgccagccccagaaagtacctgttcaaggacctggacggcagagccctgggcctgcccccccccgtgagcgtgttccccaagaccgaggccgagtggaccgccagcttcttcaacgccggcaccaaggagcagagcatcgagatcaacgtgtag

SEQ ID NO: 247246 - protein, 255 aa, Artificial Sequence
  derived and/or modified sequence
MFHQVRRVMTILFLTMVISYFGCMKAAPMKEANIRGQGGLAYPGVRTHGTLESVNGPKAGSRGLTSLADTFEHVIEELLDEDQKVRPNEENNKDADLYTSRVMLSSQVPLEPPLLFLLEEYKNYLDAANMSMRVRRHSDPARRGELSVCDSISEWVTAADKKTAVDMSGGTVTVLEKVPVSKGQLKQYFYETKCNPMGYTKEGCRGIDKRHWNSQCRTTQSYVRALTMDSKKRIGWRFIRIDTSCVCTLTIKRGR

SEQ ID NO: 247247 - protein, 247 aa, Artificial Sequence
  derived and/or modified sequence
MTILFLTMVISYFGCMKAAPMKEANIRGQGGLAYPGVRTHGTLESVNGPKAGSRGLTSLADTFEHVIEELLDEDQKVRPNEENNKDADLYTSRVMLSSQVPLEPPLLFLLEEYKNYLDAANMSMRVRRHSDPARRGELSVCDSISEWVTAADKKTAVDMSGGTVTVLEKVPVSKGQLKQYFYETKCNPMGYTKEGCRGIDKRHWNSQCRTTQSYVRALTMDSKKRIGWRFIRIDTSCVCTLTIKRGR

SEQ ID NO: 247248 - DNA, 768 bp, Artificial Sequence
  derived and/or modified sequence
atgttccaccaggtgagaagagtgatgaccatcctgttcctgaccatggtgatcagctacttcggctgcatgaaggccgcccccatgaaggaggccaacatcagaggccagggcggcctggcctaccccggcgtgagaacccacggcaccctggagagcgtgaacggccccaaggccggcagcagaggcctgaccagcctggccgacaccttcgagcacgtgatcgaggagctgctggacgaggaccagaaggtgagacccaacgaggagaacaacaaggacgccgacctgtacaccagcagagtgatgctgagcagccaggtgcccctggagccccccctgctgttcctgctggaggagtacaagaactacctggacgccgccaacatgagcatgagagtgagaagacacagcgaccccgccagaagaggcgagctgagcgtgtgcgacagcatcagcgagtgggtgaccgccgccgacaagaagaccgccgtggacatgagcggcggcaccgtgaccgtgctggagaaggtgcccgtgagcaagggccagctgaagcagtacttctacgagaccaagtgcaaccccatgggctacaccaaggagggctgcagaggcatcgacaagagacactggaacagccagtgcagaaccacccagagctacgtgagagccctgaccatggacagcaagaagagaatcggctggagattcatcagaatcgacaccagctgcgtgtgcaccctgaccatcaagagaggcagatag

SEQ ID NO: 247249 - DNA, 4340 bp, Artificial Sequence
  derived and/or modified sequence
attattaaagcggtagtctgccggcgctgataagcaacaagttccccagcggtcttcccgccctagcctgacaaggcgaaggttttcttacctggcgacagggaaatctcccgagccgaattcagcttcgccggagccccaggtgtgacctgcgtagtgggcaagggagcggtgtgcaggctgagtttttttttttacaggggtaccctgaaactcctcactttctctgggaactttcagtgccaggacccagtaacgggcggttagaaggcagccctaggaaacacctgctacatagcagggcagttgggcaatcattggtaacctcgctcattcattagaatcacgtaagaactcaaaaggaaacgtgtctctcggagtgagggcgtttgcgtaaatctataggtttttcgacatcgatgccagttgctttgtcttctgtagtcgccaaggtggttgagagtttaagcttgcggatattgcaaagggttattagattcataagtcacaccaagtggtgggcgatccactgagcaaagccgaacttctcacatgatgacttcaaacaagacacattaccttccagcatctgttggggagacgagattttaagacacttgagtctccaggacagcaaaggcacaatgttccaccaggtgagaagagtgatgaccatccttttccttactatggttatttcatactttggttgcatgaaggctgcccccatgaaagaagcaaacatccgaggacaaggtggcttggcctacccaggtgtgcggacccatgggactctggagagcgtgaatgggcccaaggcaggttcaagaggcttgacatcattggctgacactttcgaacacgtgatagaagagctgttggatgaggaccagaaagttcggcccaatgaagaaaacaataaggacgcagacttgtacacgtccagggtgatgctcagtagtcaagtgcctttggagcctcctcttctctttctgctggaggaatacaaaaattacctagatgctgcaaacatgtccatgagggtccggcgccactctgaccctgcccgccgaggggagctgagcgtgtgtgacagtattagtgagtgggtaacggcagcagacaaaaagactgcagtggacatgtcgggcgggacggtcacagtccttgaaaaggtccctgtatcaaaaggccaactgaagcaatacttctacgagaccaagtgcaatcccatgggttacacaaaagaaggctgcaggggcatagacaaaaggcattggaactcccagtgccgaactacccagtcgtacgtgcgggcccttaccatggatagcaaaaagagaattggctggcgattcataaggatagacacttcttgtgtatgtacattgaccattaaaaggggaagatagtggatttatgttgtatagattagattatattgagacaaaaattatctatttgtatatatacataacagggtaaattattcagttaagaaaaaaataattttatgaactgcatgtataaatgaagtttatacagtacagtggttctacaatctatttattggacatgtccatgaccagaagggaaacagtcatttgcgcacaacttaaaaagtctgcattacattccttgataatgttgtggtttgttgccgttgccaagaactgaaaacataaaaagttaaaaaaaataataaattgcatgctgctttaattgtgaattgataataaactgtcctctttcagaaaacagaaaaaaaacacacacacacacaacaaaaatttgaaccaaaacattccgtttacattttagacagtaagtatcttcgttcttgttagtactatatctgttttactgcttttaacttctgatagcgttggaattaaaacaatgtcaaggtgctgttgtcattgctttactggcttaggggatgggggatggggggtatatttttgtttgttttgtgtttttttttcgtttgtttgttttgttttttagttcccacagggagtagagatggggaaagaattcctacaatatatattctggctgataaaagatacatttgtatgttgtgaagatgtttgcaatatcgatcagatgactagaaagtgaataaaaattaaggcaactgaacaaaaaaatgctcacactccacatcccgtgatgcacctcccaggccccgctcattctttgggcgttggtcagagtaagctgcttttgacggaaggacctatgtttgctcagaacacattctttccccccctccccctctggtctcctctttgttttgttttaaggaagaaaaatcagttgcgcgttctgaaatattttaccactgctgtgaacaagtgaacacattgtgtcacatcatgacactcgtataagcatggagaacagtgatttttttttagaacagaaaacaacaaaaaataaccccaaaatgaagattattttttatgaggagtgaacatttgggtaaatcatggctaagcttaaaaaaaactcatggtgaggcttaacaatgtcttgtaagcaaaaggtagagccctgtatcaacccagaaacacctagatcagaacaggaatccacattgccagtgacatgagactgaacagccaaatggaggctatgtggagttggcattgcatttaccggcagtgcgggaggaatttctgagtggccatcccaaggtctaggtggaggtggggcatggtatttgagacattccaaaacgaaggcctctgaaggacccttcagaggtggctctggaatgacatgtgtcaagctgcttggacctcgtgctttaagtgcctacattatctaactgtgctcaagaggttctcgactggaggaccacactcaagccgacttatgcccaccatcccacctctggataattttgcataaaattggattagcctggagcaggttgggagccaaatgtggcatttgtgatcatgagattgatgcaatgagatagaagatgtttgctacctgaacacttattgctttgaaactagacttgaggaaaccagggtttatcttttgagaacttttggtaagggaaaagggaacaggaaaagaaaccccaaactcaggccgaatgatcaaggggacccataggaaatcttgtccagagacaagacttcgggaaggtgtctggacattcagaacaccaagacttgaaggtgccttgctcaatggaagaggccaggacagagctgacaaaattttgctccccagtgaaggccacagcaaccttctgcccatcctgtctgttcatggagagggtccctgcctcacctctgccattttgggttaggagaagtcaagttgggagcctgaaatagtggttcttggaaaaatggatccccagtgaaaactagagctctaagcccattcagcccatttcacacctgaaaatgttagtgatcaccacttggaccagcatccttaagtatcagaaagccccaagcaattgctgcatcttagtagggtgagggataagcaaaagaggatgttcaccataacccaggaatgaagataccatcagcaaagaatttcaatttgttcagtctttcatttagagctagtctttcacagtaccatctgaatacctctttgaaagaaggaagactttacgtagtgtagatttgttttgtgttgtttgaaaatattatctttgtaattatttttaatatgtaaggaatgcttggaatatctgctgtatgtcaactttatgcagcttccttttgagggacaaatttaaaacaaacaaccccccatcacaaacttaaaggattgcaagggccagatctgttaagtggtttcataggagacacatccagcaattgtgtggtcagtggctcttttacccaataagatacatcacagtcacatgcttgatggtttatgttgacctaagatttattttgttaaaatctctctctgttgtgttcgttcttgttctgttttgttttgttttttaaagtcttgctgtggtctctttgtggcagaagtgtttcatgcatggcagcaggcctgttgcttttttatggcgattcccattgaaaatgtaagtaaatgtctgtggccttgttctctctatggtaaagatattattcaccatgtaaaacaaaaaacaatatttattgtattttagtatatttatataattatgttattgaaaaaaattggcattaaaacttaaccgcatcagaagcctattgtaaatacaagttctatttaagtgtactaattaacatataatatatgttttaaatatagaatttttaatgtttttaaatatattttcaaagtacataaaa

SEQ ID NO: 247250 - DNA, 4018 bp, Artificial Sequence
  derived and/or modified sequence
agagctaaataatgtctgacccgggcgcaaggcgcagcctggagctccgggtccccgacgctgccgccgccgcgcccgggcgcacccgcccgctcgctgtcccgcgcaccccgtagcgcctcgggctcccgggccggacagaggagccagcccggtgcgcccctccacctcctgctcggggggctttaatgagacacccaccgctgctgtggggccggcggggagcagcaccgcgacggggaccggggctgggcgctggagccagaatcggaaccacgatgtgactccgccgccggggacccgtgaggtttgtgtggaccccgagttccaccaggtgagaagagtgatgaccatccttttccttactatggttatttcatactttggttgcatgaaggctgcccccatgaaagaagcaaacatccgaggacaaggtggcttggcctacccaggtgtgcggacccatgggactctggagagcgtgaatgggcccaaggcaggttcaagaggcttgacatcattggctgacactttcgaacacgtgatagaagagctgttggatgaggaccagaaagttcggcccaatgaagaaaacaataaggacgcagacttgtacacgtccagggtgatgctcagtagtcaagtgcctttggagcctcctcttctctttctgctggaggaatacaaaaattacctagatgctgcaaacatgtccatgagggtccggcgccactctgaccctgcccgccgaggggagctgagcgtgtgtgacagtattagtgagtgggtaacggcagcagacaaaaagactgcagtggacatgtcgggcgggacggtcacagtccttgaaaaggtccctgtatcaaaaggccaactgaagcaatacttctacgagaccaagtgcaatcccatgggttacacaaaagaaggctgcaggggcatagacaaaaggcattggaactcccagtgccgaactacccagtcgtacgtgcgggcccttaccatggatagcaaaaagagaattggctggcgattcataaggatagacacttcttgtgtatgtacattgaccattaaaaggggaagatagtggatttatgttgtatagattagattatattgagacaaaaattatctatttgtatatatacataacagggtaaattattcagttaagaaaaaaataattttatgaactgcatgtataaatgaagtttatacagtacagtggttctacaatctatttattggacatgtccatgaccagaagggaaacagtcatttgcgcacaacttaaaaagtctgcattacattccttgataatgttgtggtttgttgccgttgccaagaactgaaaacataaaaagttaaaaaaaataataaattgcatgctgctttaattgtgaattgataataaactgtcctctttcagaaaacagaaaaaaaacacacacacacacaacaaaaatttgaaccaaaacattccgtttacattttagacagtaagtatcttcgttcttgttagtactatatctgttttactgcttttaacttctgatagcgttggaattaaaacaatgtcaaggtgctgttgtcattgctttactggcttaggggatgggggatggggggtatatttttgtttgttttgtgtttttttttcgtttgtttgttttgttttttagttcccacagggagtagagatggggaaagaattcctacaatatatattctggctgataaaagatacatttgtatgttgtgaagatgtttgcaatatcgatcagatgactagaaagtgaataaaaattaaggcaactgaacaaaaaaatgctcacactccacatcccgtgatgcacctcccaggccccgctcattctttgggcgttggtcagagtaagctgcttttgacggaaggacctatgtttgctcagaacacattctttccccccctccccctctggtctcctctttgttttgttttaaggaagaaaaatcagttgcgcgttctgaaatattttaccactgctgtgaacaagtgaacacattgtgtcacatcatgacactcgtataagcatggagaacagtgatttttttttagaacagaaaacaacaaaaaataaccccaaaatgaagattattttttatgaggagtgaacatttgggtaaatcatggctaagcttaaaaaaaactcatggtgaggcttaacaatgtcttgtaagcaaaaggtagagccctgtatcaacccagaaacacctagatcagaacaggaatccacattgccagtgacatgagactgaacagccaaatggaggctatgtggagttggcattgcatttaccggcagtgcgggaggaatttctgagtggccatcccaaggtctaggtggaggtggggcatggtatttgagacattccaaaacgaaggcctctgaaggacccttcagaggtggctctggaatgacatgtgtcaagctgcttggacctcgtgctttaagtgcctacattatctaactgtgctcaagaggttctcgactggaggaccacactcaagccgacttatgcccaccatcccacctctggataattttgcataaaattggattagcctggagcaggttgggagccaaatgtggcatttgtgatcatgagattgatgcaatgagatagaagatgtttgctacctgaacacttattgctttgaaactagacttgaggaaaccagggtttatcttttgagaacttttggtaagggaaaagggaacaggaaaagaaaccccaaactcaggccgaatgatcaaggggacccataggaaatcttgtccagagacaagacttcgggaaggtgtctggacattcagaacaccaagacttgaaggtgccttgctcaatggaagaggccaggacagagctgacaaaattttgctccccagtgaaggccacagcaaccttctgcccatcctgtctgttcatggagagggtccctgcctcacctctgccattttgggttaggagaagtcaagttgggagcctgaaatagtggttcttggaaaaatggatccccagtgaaaactagagctctaagcccattcagcccatttcacacctgaaaatgttagtgatcaccacttggaccagcatccttaagtatcagaaagccccaagcaattgctgcatcttagtagggtgagggataagcaaaagaggatgttcaccataacccaggaatgaagataccatcagcaaagaatttcaatttgttcagtctttcatttagagctagtctttcacagtaccatctgaatacctctttgaaagaaggaagactttacgtagtgtagatttgttttgtgttgtttgaaaatattatctttgtaattatttttaatatgtaaggaatgcttggaatatctgctgtatgtcaactttatgcagcttccttttgagggacaaatttaaaacaaacaaccccccatcacaaacttaaaggattgcaagggccagatctgttaagtggtttcataggagacacatccagcaattgtgtggtcagtggctcttttacccaataagatacatcacagtcacatgcttgatggtttatgttgacctaagatttattttgttaaaatctctctctgttgtgttcgttcttgttctgttttgttttgttttttaaagtcttgctgtggtctctttgtggcagaagtgtttcatgcatggcagcaggcctgttgcttttttatggcgattcccattgaaaatgtaagtaaatgtctgtggccttgttctctctatggtaaagatattattcaccatgtaaaacaaaaaacaatatttattgtattttagtatatttatataattatgttattgaaaaaaattggcattaaaacttaaccgcatcagaagcctattgtaaatacaagttctatttaagtgtactaattaacatataatatatgttttaaatatagaatttttaatgtttttaaatatattttcaaagtacataaaa

SEQ ID NO: 247251 - DNA, 3988 bp, Artificial Sequence
  derived and/or modified sequence
gtgtgtaatccgggcgataggagtccattcagcaccttggacagagccaacggatttgtccgaggtggcggtacccccaggtagtcttcttggccccgctgtaaagccaaccctgtgtcgcccttaaaaagcgtcttttctgaggttcggctcacactgagatcggggctggagagagagtcagattttggagcggagcgtttggaaagcgagccccagtttggtcccctcattgagctcgctgaagttggcttcctagcggtgtaggctggaatagactcttggcaagctccggttccaccaggtgagaagagtgatgaccatccttttccttactatggttatttcatactttggttgcatgaaggctgcccccatgaaagaagcaaacatccgaggacaaggtggcttggcctacccaggtgtgcggacccatgggactctggagagcgtgaatgggcccaaggcaggttcaagaggcttgacatcattggctgacactttcgaacacgtgatagaagagctgttggatgaggaccagaaagttcggcccaatgaagaaaacaataaggacgcagacttgtacacgtccagggtgatgctcagtagtcaagtgcctttggagcctcctcttctctttctgctggaggaatacaaaaattacctagatgctgcaaacatgtccatgagggtccggcgccactctgaccctgcccgccgaggggagctgagcgtgtgtgacagtattagtgagtgggtaacggcagcagacaaaaagactgcagtggacatgtcgggcgggacggtcacagtccttgaaaaggtccctgtatcaaaaggccaactgaagcaatacttctacgagaccaagtgcaatcccatgggttacacaaaagaaggctgcaggggcatagacaaaaggcattggaactcccagtgccgaactacccagtcgtacgtgcgggcccttaccatggatagcaaaaagagaattggctggcgattcataaggatagacacttcttgtgtatgtacattgaccattaaaaggggaagatagtggatttatgttgtatagattagattatattgagacaaaaattatctatttgtatatatacataacagggtaaattattcagttaagaaaaaaataattttatgaactgcatgtataaatgaagtttatacagtacagtggttctacaatctatttattggacatgtccatgaccagaagggaaacagtcatttgcgcacaacttaaaaagtctgcattacattccttgataatgttgtggtttgttgccgttgccaagaactgaaaacataaaaagttaaaaaaaataataaattgcatgctgctttaattgtgaattgataataaactgtcctctttcagaaaacagaaaaaaaacacacacacacacaacaaaaatttgaaccaaaacattccgtttacattttagacagtaagtatcttcgttcttgttagtactatatctgttttactgcttttaacttctgatagcgttggaattaaaacaatgtcaaggtgctgttgtcattgctttactggcttaggggatgggggatggggggtatatttttgtttgttttgtgtttttttttcgtttgtttgttttgttttttagttcccacagggagtagagatggggaaagaattcctacaatatatattctggctgataaaagatacatttgtatgttgtgaagatgtttgcaatatcgatcagatgactagaaagtgaataaaaattaaggcaactgaacaaaaaaatgctcacactccacatcccgtgatgcacctcccaggccccgctcattctttgggcgttggtcagagtaagctgcttttgacggaaggacctatgtttgctcagaacacattctttccccccctccccctctggtctcctctttgttttgttttaaggaagaaaaatcagttgcgcgttctgaaatattttaccactgctgtgaacaagtgaacacattgtgtcacatcatgacactcgtataagcatggagaacagtgatttttttttagaacagaaaacaacaaaaaataaccccaaaatgaagattattttttatgaggagtgaacatttgggtaaatcatggctaagcttaaaaaaaactcatggtgaggcttaacaatgtcttgtaagcaaaaggtagagccctgtatcaacccagaaacacctagatcagaacaggaatccacattgccagtgacatgagactgaacagccaaatggaggctatgtggagttggcattgcatttaccggcagtgcgggaggaatttctgagtggccatcccaaggtctaggtggaggtggggcatggtatttgagacattccaaaacgaaggcctctgaaggacccttcagaggtggctctggaatgacatgtgtcaagctgcttggacctcgtgctttaagtgcctacattatctaactgtgctcaagaggttctcgactggaggaccacactcaagccgacttatgcccaccatcccacctctggataattttgcataaaattggattagcctggagcaggttgggagccaaatgtggcatttgtgatcatgagattgatgcaatgagatagaagatgtttgctacctgaacacttattgctttgaaactagacttgaggaaaccagggtttatcttttgagaacttttggtaagggaaaagggaacaggaaaagaaaccccaaactcaggccgaatgatcaaggggacccataggaaatcttgtccagagacaagacttcgggaaggtgtctggacattcagaacaccaagacttgaaggtgccttgctcaatggaagaggccaggacagagctgacaaaattttgctccccagtgaaggccacagcaaccttctgcccatcctgtctgttcatggagagggtccctgcctcacctctgccattttgggttaggagaagtcaagttgggagcctgaaatagtggttcttggaaaaatggatccccagtgaaaactagagctctaagcccattcagcccatttcacacctgaaaatgttagtgatcaccacttggaccagcatccttaagtatcagaaagccccaagcaattgctgcatcttagtagggtgagggataagcaaaagaggatgttcaccataacccaggaatgaagataccatcagcaaagaatttcaatttgttcagtctttcatttagagctagtctttcacagtaccatctgaatacctctttgaaagaaggaagactttacgtagtgtagatttgttttgtgttgtttgaaaatattatctttgtaattatttttaatatgtaaggaatgcttggaatatctgctgtatgtcaactttatgcagcttccttttgagggacaaatttaaaacaaacaaccccccatcacaaacttaaaggattgcaagggccagatctgttaagtggtttcataggagacacatccagcaattgtgtggtcagtggctcttttacccaataagatacatcacagtcacatgcttgatggtttatgttgacctaagatttattttgttaaaatctctctctgttgtgttcgttcttgttctgttttgttttgttttttaaagtcttgctgtggtctctttgtggcagaagtgtttcatgcatggcagcaggcctgttgcttttttatggcgattcccattgaaaatgtaagtaaatgtctgtggccttgttctctctatggtaaagatattattcaccatgtaaaacaaaaaacaatatttattgtattttagtatatttatataattatgttattgaaaaaaattggcattaaaacttaaccgcatcagaagcctattgtaaatacaagttctatttaagtgtactaattaacatataatatatgttttaaatatagaatttttaatgtttttaaatatattttcaaagtacataaaa

SEQ ID NO: 247252 - DNA, 4125 bp, Artificial Sequence
  derived and/or modified sequence
agagctaaataatgtctgacccgggcgcaaggcgcagcctggagctccgggtccccgacgctgccgccgccgcgcccgggcgcacccgcccgctcgctgtcccgcgcaccccgtagcgcctcgggctcccgggccggacagaggagccagcccggtgcgcccctccacctcctgctcggggggctttaatgagacacccaccgctgctgtggggccggcggggagcagcaccgcgacggggaccggggctgggcgctggagccagaatcggaaccacgatgtgactccgccgccggggacccgtgaggtttgtgtggaccccgagcatgagcagagatcattaaaaattaaacttacaaagctgctaaagtgggaagaaggagaacttgaagccacaatttttgcacttgcttagaagccatctaatctcagttccaccaggtgagaagagtgatgaccatccttttccttactatggttatttcatactttggttgcatgaaggctgcccccatgaaagaagcaaacatccgaggacaaggtggcttggcctacccaggtgtgcggacccatgggactctggagagcgtgaatgggcccaaggcaggttcaagaggcttgacatcattggctgacactttcgaacacgtgatagaagagctgttggatgaggaccagaaagttcggcccaatgaagaaaacaataaggacgcagacttgtacacgtccagggtgatgctcagtagtcaagtgcctttggagcctcctcttctctttctgctggaggaatacaaaaattacctagatgctgcaaacatgtccatgagggtccggcgccactctgaccctgcccgccgaggggagctgagcgtgtgtgacagtattagtgagtgggtaacggcagcagacaaaaagactgcagtggacatgtcgggcgggacggtcacagtccttgaaaaggtccctgtatcaaaaggccaactgaagcaatacttctacgagaccaagtgcaatcccatgggttacacaaaagaaggctgcaggggcatagacaaaaggcattggaactcccagtgccgaactacccagtcgtacgtgcgggcccttaccatggatagcaaaaagagaattggctggcgattcataaggatagacacttcttgtgtatgtacattgaccattaaaaggggaagatagtggatttatgttgtatagattagattatattgagacaaaaattatctatttgtatatatacataacagggtaaattattcagttaagaaaaaaataattttatgaactgcatgtataaatgaagtttatacagtacagtggttctacaatctatttattggacatgtccatgaccagaagggaaacagtcatttgcgcacaacttaaaaagtctgcattacattccttgataatgttgtggtttgttgccgttgccaagaactgaaaacataaaaagttaaaaaaaataataaattgcatgctgctttaattgtgaattgataataaactgtcctctttcagaaaacagaaaaaaaacacacacacacacaacaaaaatttgaaccaaaacattccgtttacattttagacagtaagtatcttcgttcttgttagtactatatctgttttactgcttttaacttctgatagcgttggaattaaaacaatgtcaaggtgctgttgtcattgctttactggcttaggggatgggggatggggggtatatttttgtttgttttgtgtttttttttcgtttgtttgttttgttttttagttcccacagggagtagagatggggaaagaattcctacaatatatattctggctgataaaagatacatttgtatgttgtgaagatgtttgcaatatcgatcagatgactagaaagtgaataaaaattaaggcaactgaacaaaaaaatgctcacactccacatcccgtgatgcacctcccaggccccgctcattctttgggcgttggtcagagtaagctgcttttgacggaaggacctatgtttgctcagaacacattctttccccccctccccctctggtctcctctttgttttgttttaaggaagaaaaatcagttgcgcgttctgaaatattttaccactgctgtgaacaagtgaacacattgtgtcacatcatgacactcgtataagcatggagaacagtgatttttttttagaacagaaaacaacaaaaaataaccccaaaatgaagattattttttatgaggagtgaacatttgggtaaatcatggctaagcttaaaaaaaactcatggtgaggcttaacaatgtcttgtaagcaaaaggtagagccctgtatcaacccagaaacacctagatcagaacaggaatccacattgccagtgacatgagactgaacagccaaatggaggctatgtggagttggcattgcatttaccggcagtgcgggaggaatttctgagtggccatcccaaggtctaggtggaggtggggcatggtatttgagacattccaaaacgaaggcctctgaaggacccttcagaggtggctctggaatgacatgtgtcaagctgcttggacctcgtgctttaagtgcctacattatctaactgtgctcaagaggttctcgactggaggaccacactcaagccgacttatgcccaccatcccacctctggataattttgcataaaattggattagcctggagcaggttgggagccaaatgtggcatttgtgatcatgagattgatgcaatgagatagaagatgtttgctacctgaacacttattgctttgaaactagacttgaggaaaccagggtttatcttttgagaacttttggtaagggaaaagggaacaggaaaagaaaccccaaactcaggccgaatgatcaaggggacccataggaaatcttgtccagagacaagacttcgggaaggtgtctggacattcagaacaccaagacttgaaggtgccttgctcaatggaagaggccaggacagagctgacaaaattttgctccccagtgaaggccacagcaaccttctgcccatcctgtctgttcatggagagggtccctgcctcacctctgccattttgggttaggagaagtcaagttgggagcctgaaatagtggttcttggaaaaatggatccccagtgaaaactagagctctaagcccattcagcccatttcacacctgaaaatgttagtgatcaccacttggaccagcatccttaagtatcagaaagccccaagcaattgctgcatcttagtagggtgagggataagcaaaagaggatgttcaccataacccaggaatgaagataccatcagcaaagaatttcaatttgttcagtctttcatttagagctagtctttcacagtaccatctgaatacctctttgaaagaaggaagactttacgtagtgtagatttgttttgtgttgtttgaaaatattatctttgtaattatttttaatatgtaaggaatgcttggaatatctgctgtatgtcaactttatgcagcttccttttgagggacaaatttaaaacaaacaaccccccatcacaaacttaaaggattgcaagggccagatctgttaagtggtttcataggagacacatccagcaattgtgtggtcagtggctcttttacccaataagatacatcacagtcacatgcttgatggtttatgttgacctaagatttattttgttaaaatctctctctgttgtgttcgttcttgttctgttttgttttgttttttaaagtcttgctgtggtctctttgtggcagaagtgtttcatgcatggcagcaggcctgttgcttttttatggcgattcccattgaaaatgtaagtaaatgtctgtggccttgttctctctatggtaaagatattattcaccatgtaaaacaaaaaacaatatttattgtattttagtatatttatataattatgttattgaaaaaaattggcattaaaacttaaccgcatcagaagcctattgtaaatacaagttctatttaagtgtactaattaacatataatatatgttttaaatatagaatttttaatgtttttaaatatattttcaaagtacataaaa

SEQ ID NO: 247253 - DNA, 4532 bp, Artificial Sequence
  derived and/or modified sequence
gcgcgcgcgcacacacacacacacacacagagagaacatctctagtaaaaagaaaagttgagctttcttagctagatgtgtgtattagccagaaaaagccaaggagtgaagggttttagagaactggaggagataaagtggagtctgcatatgggaggcatttgaaatggacttaaatgtctttttaatgctgactttttcagttttctccttaccagacacattgttttcatgacattagccccaggcatagacacatcattaaaatgaacatgtcaaaaaatgatttctgtttagaaataagcaaaacattttcagttgtgaccacccaggtgtagaataaagaacagtggaattgggagccctgagttctaacataaactttcttcatgacataaggcaagtcttctatggcctttggtttccttacctgtaaaacaggatggctcaatgaaattatctttcttctttgctataatagagtatctctgtgggaagaggaaaaaaaaagtcaatttaaaggctccttatagttccccaactgctgttttattgtgctattcatgcctagacatcacatagctagaaaggcccatcagacccctcaggccactgctgttcctgtcacacattcctgcaaaggaccatgttgctaacttgaaaaaaattactattaattacacttgcagttgttgcttagtaacatttatgattttgtgtttctcgtgacagcatgagcagagatcattaaaaattaaacttacaaagctgctaaagtgggaagaaggagaacttgaagccacaatttttgcacttgcttagaagccatctaatctcagttccaccaggtgagaagagtgatgaccatccttttccttactatggttatttcatactttggttgcatgaaggctgcccccatgaaagaagcaaacatccgaggacaaggtggcttggcctacccaggtgtgcggacccatgggactctggagagcgtgaatgggcccaaggcaggttcaagaggcttgacatcattggctgacactttcgaacacgtgatagaagagctgttggatgaggaccagaaagttcggcccaatgaagaaaacaataaggacgcagacttgtacacgtccagggtgatgctcagtagtcaagtgcctttggagcctcctcttctctttctgctggaggaatacaaaaattacctagatgctgcaaacatgtccatgagggtccggcgccactctgaccctgcccgccgaggggagctgagcgtgtgtgacagtattagtgagtgggtaacggcagcagacaaaaagactgcagtggacatgtcgggcgggacggtcacagtccttgaaaaggtccctgtatcaaaaggccaactgaagcaatacttctacgagaccaagtgcaatcccatgggttacacaaaagaaggctgcaggggcatagacaaaaggcattggaactcccagtgccgaactacccagtcgtacgtgcgggcccttaccatggatagcaaaaagagaattggctggcgattcataaggatagacacttcttgtgtatgtacattgaccattaaaaggggaagatagtggatttatgttgtatagattagattatattgagacaaaaattatctatttgtatatatacataacagggtaaattattcagttaagaaaaaaataattttatgaactgcatgtataaatgaagtttatacagtacagtggttctacaatctatttattggacatgtccatgaccagaagggaaacagtcatttgcgcacaacttaaaaagtctgcattacattccttgataatgttgtggtttgttgccgttgccaagaactgaaaacataaaaagttaaaaaaaataataaattgcatgctgctttaattgtgaattgataataaactgtcctctttcagaaaacagaaaaaaaacacacacacacacaacaaaaatttgaaccaaaacattccgtttacattttagacagtaagtatcttcgttcttgttagtactatatctgttttactgcttttaacttctgatagcgttggaattaaaacaatgtcaaggtgctgttgtcattgctttactggcttaggggatgggggatggggggtatatttttgtttgttttgtgtttttttttcgtttgtttgttttgttttttagttcccacagggagtagagatggggaaagaattcctacaatatatattctggctgataaaagatacatttgtatgttgtgaagatgtttgcaatatcgatcagatgactagaaagtgaataaaaattaaggcaactgaacaaaaaaatgctcacactccacatcccgtgatgcacctcccaggccccgctcattctttgggcgttggtcagagtaagctgcttttgacggaaggacctatgtttgctcagaacacattctttccccccctccccctctggtctcctctttgttttgttttaaggaagaaaaatcagttgcgcgttctgaaatattttaccactgctgtgaacaagtgaacacattgtgtcacatcatgacactcgtataagcatggagaacagtgatttttttttagaacagaaaacaacaaaaaataaccccaaaatgaagattattttttatgaggagtgaacatttgggtaaatcatggctaagcttaaaaaaaactcatggtgaggcttaacaatgtcttgtaagcaaaaggtagagccctgtatcaacccagaaacacctagatcagaacaggaatccacattgccagtgacatgagactgaacagccaaatggaggctatgtggagttggcattgcatttaccggcagtgcgggaggaatttctgagtggccatcccaaggtctaggtggaggtggggcatggtatttgagacattccaaaacgaaggcctctgaaggacccttcagaggtggctctggaatgacatgtgtcaagctgcttggacctcgtgctttaagtgcctacattatctaactgtgctcaagaggttctcgactggaggaccacactcaagccgacttatgcccaccatcccacctctggataattttgcataaaattggattagcctggagcaggttgggagccaaatgtggcatttgtgatcatgagattgatgcaatgagatagaagatgtttgctacctgaacacttattgctttgaaactagacttgaggaaaccagggtttatcttttgagaacttttggtaagggaaaagggaacaggaaaagaaaccccaaactcaggccgaatgatcaaggggacccataggaaatcttgtccagagacaagacttcgggaaggtgtctggacattcagaacaccaagacttgaaggtgccttgctcaatggaagaggccaggacagagctgacaaaattttgctccccagtgaaggccacagcaaccttctgcccatcctgtctgttcatggagagggtccctgcctcacctctgccattttgggttaggagaagtcaagttgggagcctgaaatagtggttcttggaaaaatggatccccagtgaaaactagagctctaagcccattcagcccatttcacacctgaaaatgttagtgatcaccacttggaccagcatccttaagtatcagaaagccccaagcaattgctgcatcttagtagggtgagggataagcaaaagaggatgttcaccataacccaggaatgaagataccatcagcaaagaatttcaatttgttcagtctttcatttagagctagtctttcacagtaccatctgaatacctctttgaaagaaggaagactttacgtagtgtagatttgttttgtgttgtttgaaaatattatctttgtaattatttttaatatgtaaggaatgcttggaatatctgctgtatgtcaactttatgcagcttccttttgagggacaaatttaaaacaaacaaccccccatcacaaacttaaaggattgcaagggccagatctgttaagtggtttcataggagacacatccagcaattgtgtggtcagtggctcttttacccaataagatacatcacagtcacatgcttgatggtttatgttgacctaagatttattttgttaaaatctctctctgttgtgttcgttcttgttctgttttgttttgttttttaaagtcttgctgtggtctctttgtggcagaagtgtttcatgcatggcagcaggcctgttgcttttttatggcgattcccattgaaaatgtaagtaaatgtctgtggccttgttctctctatggtaaagatattattcaccatgtaaaacaaaaaacaatatttattgtattttagtatatttatataattatgttattgaaaaaaattggcattaaaacttaaccgcatcagaagcctattgtaaatacaagttctatttaagtgtactaattaacatataatatatgttttaaatatagaatttttaatgtttttaaatatattttcaaagtacataaaa

SEQ ID NO: 247254 - DNA, 4766 bp, Artificial Sequence
  derived and/or modified sequence
gcgcgcgcgcacacacacacacacacacagagagaacatctctagtaaaaagaaaagttgagctttcttagctagatgtgtgtattagccagaaaaagccaaggagtgaagggttttagagaactggaggagataaagtggagtctgcatatgggaggcatttgaaatggacttaaatgtctttttaatgctgactttttcagttttctccttaccagacacattgttttcatgacattagccccaggcatagacacatcattaaaatgaacatgtcaaaaaatgatttctgtttagaaataagcaaaacattttcagttgtgaccacccaggtgtagaataaagaacagtggaattgggagccctgagttctaacataaactttcttcatgacataaggcaagtcttctatggcctttggtttccttacctgtaaaacaggatggctcaatgaaattatctttcttctttgctataatagagtatctctgtgggaagaggaaaaaaaaagtcaatttaaaggctccttatagttccccaactgctgttttattgtgctattcatgcctagacatcacatagctagaaaggcccatcagacccctcaggccactgctgttcctgtcacacattcctgcaaaggaccatgttgctaacttgaaaaaaattactattaattacacttgcagttgttgcttagtaacatttatgattttgtgtttctcgtgacagcatgagcagagatcattaaaaattaaacttacaaagctgctaaagtgggaagaaggagaacttgaagccacaatttttgcacttgcttagaagccatctaatctcaggtttatatgctagatcttgggggaaacactgcatgtctctggtttatattaaaccacatacagcacactactgacactgatttgtgtctggtgcagctggagtttatcaccaagacataaaaaaaccttgaccctgcagaatggcctggaattacaatcagatgggccacatggcatcccggtgaaagaaagccctaaccagttttctgtcttgtttctgctttctccctacagttccaccaggtgagaagagtgatgaccatccttttccttactatggttatttcatactttggttgcatgaaggctgcccccatgaaagaagcaaacatccgaggacaaggtggcttggcctacccaggtgtgcggacccatgggactctggagagcgtgaatgggcccaaggcaggttcaagaggcttgacatcattggctgacactttcgaacacgtgatagaagagctgttggatgaggaccagaaagttcggcccaatgaagaaaacaataaggacgcagacttgtacacgtccagggtgatgctcagtagtcaagtgcctttggagcctcctcttctctttctgctggaggaatacaaaaattacctagatgctgcaaacatgtccatgagggtccggcgccactctgaccctgcccgccgaggggagctgagcgtgtgtgacagtattagtgagtgggtaacggcagcagacaaaaagactgcagtggacatgtcgggcgggacggtcacagtccttgaaaaggtccctgtatcaaaaggccaactgaagcaatacttctacgagaccaagtgcaatcccatgggttacacaaaagaaggctgcaggggcatagacaaaaggcattggaactcccagtgccgaactacccagtcgtacgtgcgggcccttaccatggatagcaaaaagagaattggctggcgattcataaggatagacacttcttgtgtatgtacattgaccattaaaaggggaagatagtggatttatgttgtatagattagattatattgagacaaaaattatctatttgtatatatacataacagggtaaattattcagttaagaaaaaaataattttatgaactgcatgtataaatgaagtttatacagtacagtggttctacaatctatttattggacatgtccatgaccagaagggaaacagtcatttgcgcacaacttaaaaagtctgcattacattccttgataatgttgtggtttgttgccgttgccaagaactgaaaacataaaaagttaaaaaaaataataaattgcatgctgctttaattgtgaattgataataaactgtcctctttcagaaaacagaaaaaaaacacacacacacacaacaaaaatttgaaccaaaacattccgtttacattttagacagtaagtatcttcgttcttgttagtactatatctgttttactgcttttaacttctgatagcgttggaattaaaacaatgtcaaggtgctgttgtcattgctttactggcttaggggatgggggatggggggtatatttttgtttgttttgtgtttttttttcgtttgtttgttttgttttttagttcccacagggagtagagatggggaaagaattcctacaatatatattctggctgataaaagatacatttgtatgttgtgaagatgtttgcaatatcgatcagatgactagaaagtgaataaaaattaaggcaactgaacaaaaaaatgctcacactccacatcccgtgatgcacctcccaggccccgctcattctttgggcgttggtcagagtaagctgcttttgacggaaggacctatgtttgctcagaacacattctttccccccctccccctctggtctcctctttgttttgttttaaggaagaaaaatcagttgcgcgttctgaaatattttaccactgctgtgaacaagtgaacacattgtgtcacatcatgacactcgtataagcatggagaacagtgatttttttttagaacagaaaacaacaaaaaataaccccaaaatgaagattattttttatgaggagtgaacatttgggtaaatcatggctaagcttaaaaaaaactcatggtgaggcttaacaatgtcttgtaagcaaaaggtagagccctgtatcaacccagaaacacctagatcagaacaggaatccacattgccagtgacatgagactgaacagccaaatggaggctatgtggagttggcattgcatttaccggcagtgcgggaggaatttctgagtggccatcccaaggtctaggtggaggtggggcatggtatttgagacattccaaaacgaaggcctctgaaggacccttcagaggtggctctggaatgacatgtgtcaagctgcttggacctcgtgctttaagtgcctacattatctaactgtgctcaagaggttctcgactggaggaccacactcaagccgacttatgcccaccatcccacctctggataattttgcataaaattggattagcctggagcaggttgggagccaaatgtggcatttgtgatcatgagattgatgcaatgagatagaagatgtttgctacctgaacacttattgctttgaaactagacttgaggaaaccagggtttatcttttgagaacttttggtaagggaaaagggaacaggaaaagaaaccccaaactcaggccgaatgatcaaggggacccataggaaatcttgtccagagacaagacttcgggaaggtgtctggacattcagaacaccaagacttgaaggtgccttgctcaatggaagaggccaggacagagctgacaaaattttgctccccagtgaaggccacagcaaccttctgcccatcctgtctgttcatggagagggtccctgcctcacctctgccattttgggttaggagaagtcaagttgggagcctgaaatagtggttcttggaaaaatggatccccagtgaaaactagagctctaagcccattcagcccatttcacacctgaaaatgttagtgatcaccacttggaccagcatccttaagtatcagaaagccccaagcaattgctgcatcttagtagggtgagggataagcaaaagaggatgttcaccataacccaggaatgaagataccatcagcaaagaatttcaatttgttcagtctttcatttagagctagtctttcacagtaccatctgaatacctctttgaaagaaggaagactttacgtagtgtagatttgttttgtgttgtttgaaaatattatctttgtaattatttttaatatgtaaggaatgcttggaatatctgctgtatgtcaactttatgcagcttccttttgagggacaaatttaaaacaaacaaccccccatcacaaacttaaaggattgcaagggccagatctgttaagtggtttcataggagacacatccagcaattgtgtggtcagtggctcttttacccaataagatacatcacagtcacatgcttgatggtttatgttgacctaagatttattttgttaaaatctctctctgttgtgttcgttcttgttctgttttgttttgttttttaaagtcttgctgtggtctctttgtggcagaagtgtttcatgcatggcagcaggcctgttgcttttttatggcgattcccattgaaaatgtaagtaaatgtctgtggccttgttctctctatggtaaagatattattcaccatgtaaaacaaaaaacaatatttattgtattttagtatatttatataattatgttattgaaaaaaattggcattaaaacttaaccgcatcagaagcctattgtaaatacaagttctatttaagtgtactaattaacatataatatatgttttaaatatagaatttttaatgtttttaaatatattttcaaagtacataaaa

SEQ ID NO: 247255 - DNA, 3829 bp, Artificial Sequence
  derived and/or modified sequence
aatatcaagtatcacttaattagagatttttaagccttttcctcctgctgtgccgggtgtgtaatccgggcgataggagtccattcagcaccttggacagagccaacggatttgtccgaggtggcggtacccccagttccaccaggtgagaagagtgatgaccatccttttccttactatggttatttcatactttggttgcatgaaggctgcccccatgaaagaagcaaacatccgaggacaaggtggcttggcctacccaggtgtgcggacccatgggactctggagagcgtgaatgggcccaaggcaggttcaagaggcttgacatcattggctgacactttcgaacacgtgatagaagagctgttggatgaggaccagaaagttcggcccaatgaagaaaacaataaggacgcagacttgtacacgtccagggtgatgctcagtagtcaagtgcctttggagcctcctcttctctttctgctggaggaatacaaaaattacctagatgctgcaaacatgtccatgagggtccggcgccactctgaccctgcccgccgaggggagctgagcgtgtgtgacagtattagtgagtgggtaacggcagcagacaaaaagactgcagtggacatgtcgggcgggacggtcacagtccttgaaaaggtccctgtatcaaaaggccaactgaagcaatacttctacgagaccaagtgcaatcccatgggttacacaaaagaaggctgcaggggcatagacaaaaggcattggaactcccagtgccgaactacccagtcgtacgtgcgggcccttaccatggatagcaaaaagagaattggctggcgattcataaggatagacacttcttgtgtatgtacattgaccattaaaaggggaagatagtggatttatgttgtatagattagattatattgagacaaaaattatctatttgtatatatacataacagggtaaattattcagttaagaaaaaaataattttatgaactgcatgtataaatgaagtttatacagtacagtggttctacaatctatttattggacatgtccatgaccagaagggaaacagtcatttgcgcacaacttaaaaagtctgcattacattccttgataatgttgtggtttgttgccgttgccaagaactgaaaacataaaaagttaaaaaaaataataaattgcatgctgctttaattgtgaattgataataaactgtcctctttcagaaaacagaaaaaaaacacacacacacacaacaaaaatttgaaccaaaacattccgtttacattttagacagtaagtatcttcgttcttgttagtactatatctgttttactgcttttaacttctgatagcgttggaattaaaacaatgtcaaggtgctgttgtcattgctttactggcttaggggatgggggatggggggtatatttttgtttgttttgtgtttttttttcgtttgtttgttttgttttttagttcccacagggagtagagatggggaaagaattcctacaatatatattctggctgataaaagatacatttgtatgttgtgaagatgtttgcaatatcgatcagatgactagaaagtgaataaaaattaaggcaactgaacaaaaaaatgctcacactccacatcccgtgatgcacctcccaggccccgctcattctttgggcgttggtcagagtaagctgcttttgacggaaggacctatgtttgctcagaacacattctttccccccctccccctctggtctcctctttgttttgttttaaggaagaaaaatcagttgcgcgttctgaaatattttaccactgctgtgaacaagtgaacacattgtgtcacatcatgacactcgtataagcatggagaacagtgatttttttttagaacagaaaacaacaaaaaataaccccaaaatgaagattattttttatgaggagtgaacatttgggtaaatcatggctaagcttaaaaaaaactcatggtgaggcttaacaatgtcttgtaagcaaaaggtagagccctgtatcaacccagaaacacctagatcagaacaggaatccacattgccagtgacatgagactgaacagccaaatggaggctatgtggagttggcattgcatttaccggcagtgcgggaggaatttctgagtggccatcccaaggtctaggtggaggtggggcatggtatttgagacattccaaaacgaaggcctctgaaggacccttcagaggtggctctggaatgacatgtgtcaagctgcttggacctcgtgctttaagtgcctacattatctaactgtgctcaagaggttctcgactggaggaccacactcaagccgacttatgcccaccatcccacctctggataattttgcataaaattggattagcctggagcaggttgggagccaaatgtggcatttgtgatcatgagattgatgcaatgagatagaagatgtttgctacctgaacacttattgctttgaaactagacttgaggaaaccagggtttatcttttgagaacttttggtaagggaaaagggaacaggaaaagaaaccccaaactcaggccgaatgatcaaggggacccataggaaatcttgtccagagacaagacttcgggaaggtgtctggacattcagaacaccaagacttgaaggtgccttgctcaatggaagaggccaggacagagctgacaaaattttgctccccagtgaaggccacagcaaccttctgcccatcctgtctgttcatggagagggtccctgcctcacctctgccattttgggttaggagaagtcaagttgggagcctgaaatagtggttcttggaaaaatggatccccagtgaaaactagagctctaagcccattcagcccatttcacacctgaaaatgttagtgatcaccacttggaccagcatccttaagtatcagaaagccccaagcaattgctgcatcttagtagggtgagggataagcaaaagaggatgttcaccataacccaggaatgaagataccatcagcaaagaatttcaatttgttcagtctttcatttagagctagtctttcacagtaccatctgaatacctctttgaaagaaggaagactttacgtagtgtagatttgttttgtgttgtttgaaaatattatctttgtaattatttttaatatgtaaggaatgcttggaatatctgctgtatgtcaactttatgcagcttccttttgagggacaaatttaaaacaaacaaccccccatcacaaacttaaaggattgcaagggccagatctgttaagtggtttcataggagacacatccagcaattgtgtggtcagtggctcttttacccaataagatacatcacagtcacatgcttgatggtttatgttgacctaagatttattttgttaaaatctctctctgttgtgttcgttcttgttctgttttgttttgttttttaaagtcttgctgtggtctctttgtggcagaagtgtttcatgcatggcagcaggcctgttgcttttttatggcgattcccattgaaaatgtaagtaaatgtctgtggccttgttctctctatggtaaagatattattcaccatgtaaaacaaaaaacaatatttattgtattttagtatatttatataattatgttattgaaaaaaattggcattaaaacttaaccgcatcagaagcctattgtaaatacaagttctatttaagtgtactaattaacatataatatatgttttaaatatagaatttttaatgtttttaaatatattttcaaagtacataaaa

SEQ ID NO: 247256 - DNA, 3930 bp, Artificial Sequence
  derived and/or modified sequence
cttccaccccgccccctcctccagcctccatccctccctcattctatctcttcctctccgtcgccctcgctcctcgctggatgcttctttctgggttttcttttttttttcccttctgtcctccctccccgcgagtttcgggcgctggcttagagggttcccgctttctcaagggaaggggagctgccgagaccgcgctccgctccccagccgggccggatgcctcactgagcccagttccaccaggtgagaagagtgatgaccatccttttccttactatggttatttcatactttggttgcatgaaggctgcccccatgaaagaagcaaacatccgaggacaaggtggcttggcctacccaggtgtgcggacccatgggactctggagagcgtgaatgggcccaaggcaggttcaagaggcttgacatcattggctgacactttcgaacacgtgatagaagagctgttggatgaggaccagaaagttcggcccaatgaagaaaacaataaggacgcagacttgtacacgtccagggtgatgctcagtagtcaagtgcctttggagcctcctcttctctttctgctggaggaatacaaaaattacctagatgctgcaaacatgtccatgagggtccggcgccactctgaccctgcccgccgaggggagctgagcgtgtgtgacagtattagtgagtgggtaacggcagcagacaaaaagactgcagtggacatgtcgggcgggacggtcacagtccttgaaaaggtccctgtatcaaaaggccaactgaagcaatacttctacgagaccaagtgcaatcccatgggttacacaaaagaaggctgcaggggcatagacaaaaggcattggaactcccagtgccgaactacccagtcgtacgtgcgggcccttaccatggatagcaaaaagagaattggctggcgattcataaggatagacacttcttgtgtatgtacattgaccattaaaaggggaagatagtggatttatgttgtatagattagattatattgagacaaaaattatctatttgtatatatacataacagggtaaattattcagttaagaaaaaaataattttatgaactgcatgtataaatgaagtttatacagtacagtggttctacaatctatttattggacatgtccatgaccagaagggaaacagtcatttgcgcacaacttaaaaagtctgcattacattccttgataatgttgtggtttgttgccgttgccaagaactgaaaacataaaaagttaaaaaaaataataaattgcatgctgctttaattgtgaattgataataaactgtcctctttcagaaaacagaaaaaaaacacacacacacacaacaaaaatttgaaccaaaacattccgtttacattttagacagtaagtatcttcgttcttgttagtactatatctgttttactgcttttaacttctgatagcgttggaattaaaacaatgtcaaggtgctgttgtcattgctttactggcttaggggatgggggatggggggtatatttttgtttgttttgtgtttttttttcgtttgtttgttttgttttttagttcccacagggagtagagatggggaaagaattcctacaatatatattctggctgataaaagatacatttgtatgttgtgaagatgtttgcaatatcgatcagatgactagaaagtgaataaaaattaaggcaactgaacaaaaaaatgctcacactccacatcccgtgatgcacctcccaggccccgctcattctttgggcgttggtcagagtaagctgcttttgacggaaggacctatgtttgctcagaacacattctttccccccctccccctctggtctcctctttgttttgttttaaggaagaaaaatcagttgcgcgttctgaaatattttaccactgctgtgaacaagtgaacacattgtgtcacatcatgacactcgtataagcatggagaacagtgatttttttttagaacagaaaacaacaaaaaataaccccaaaatgaagattattttttatgaggagtgaacatttgggtaaatcatggctaagcttaaaaaaaactcatggtgaggcttaacaatgtcttgtaagcaaaaggtagagccctgtatcaacccagaaacacctagatcagaacaggaatccacattgccagtgacatgagactgaacagccaaatggaggctatgtggagttggcattgcatttaccggcagtgcgggaggaatttctgagtggccatcccaaggtctaggtggaggtggggcatggtatttgagacattccaaaacgaaggcctctgaaggacccttcagaggtggctctggaatgacatgtgtcaagctgcttggacctcgtgctttaagtgcctacattatctaactgtgctcaagaggttctcgactggaggaccacactcaagccgacttatgcccaccatcccacctctggataattttgcataaaattggattagcctggagcaggttgggagccaaatgtggcatttgtgatcatgagattgatgcaatgagatagaagatgtttgctacctgaacacttattgctttgaaactagacttgaggaaaccagggtttatcttttgagaacttttggtaagggaaaagggaacaggaaaagaaaccccaaactcaggccgaatgatcaaggggacccataggaaatcttgtccagagacaagacttcgggaaggtgtctggacattcagaacaccaagacttgaaggtgccttgctcaatggaagaggccaggacagagctgacaaaattttgctccccagtgaaggccacagcaaccttctgcccatcctgtctgttcatggagagggtccctgcctcacctctgccattttgggttaggagaagtcaagttgggagcctgaaatagtggttcttggaaaaatggatccccagtgaaaactagagctctaagcccattcagcccatttcacacctgaaaatgttagtgatcaccacttggaccagcatccttaagtatcagaaagccccaagcaattgctgcatcttagtagggtgagggataagcaaaagaggatgttcaccataacccaggaatgaagataccatcagcaaagaatttcaatttgttcagtctttcatttagagctagtctttcacagtaccatctgaatacctctttgaaagaaggaagactttacgtagtgtagatttgttttgtgttgtttgaaaatattatctttgtaattatttttaatatgtaaggaatgcttggaatatctgctgtatgtcaactttatgcagcttccttttgagggacaaatttaaaacaaacaaccccccatcacaaacttaaaggattgcaagggccagatctgttaagtggtttcataggagacacatccagcaattgtgtggtcagtggctcttttacccaataagatacatcacagtcacatgcttgatggtttatgttgacctaagatttattttgttaaaatctctctctgttgtgttcgttcttgttctgttttgttttgttttttaaagtcttgctgtggtctctttgtggcagaagtgtttcatgcatggcagcaggcctgttgcttttttatggcgattcccattgaaaatgtaagtaaatgtctgtggccttgttctctctatggtaaagatattattcaccatgtaaaacaaaaaacaatatttattgtattttagtatatttatataattatgttattgaaaaaaattggcattaaaacttaaccgcatcagaagcctattgtaaatacaagttctatttaagtgtactaattaacatataatatatgttttaaatatagaatttttaatgtttttaaatatattttcaaagtacataaaa

SEQ ID NO: 247257 - DNA, 3878 bp, Artificial Sequence
  derived and/or modified sequence
acacggctacctgctccccaggaattgagactgaagtggacttacaagtccgaagccaatgtagcttggaaaacttgggaggcggaattcctaccgctgggaactgaaagggtctgcgacactctcgggcaggccgaacccacatctctacccatcctgcgcccctcttctgaagcgccctccagttccaccaggtgagaagagtgatgaccatccttttccttactatggttatttcatactttggttgcatgaaggctgcccccatgaaagaagcaaacatccgaggacaaggtggcttggcctacccaggtgtgcggacccatgggactctggagagcgtgaatgggcccaaggcaggttcaagaggcttgacatcattggctgacactttcgaacacgtgatagaagagctgttggatgaggaccagaaagttcggcccaatgaagaaaacaataaggacgcagacttgtacacgtccagggtgatgctcagtagtcaagtgcctttggagcctcctcttctctttctgctggaggaatacaaaaattacctagatgctgcaaacatgtccatgagggtccggcgccactctgaccctgcccgccgaggggagctgagcgtgtgtgacagtattagtgagtgggtaacggcagcagacaaaaagactgcagtggacatgtcgggcgggacggtcacagtccttgaaaaggtccctgtatcaaaaggccaactgaagcaatacttctacgagaccaagtgcaatcccatgggttacacaaaagaaggctgcaggggcatagacaaaaggcattggaactcccagtgccgaactacccagtcgtacgtgcgggcccttaccatggatagcaaaaagagaattggctggcgattcataaggatagacacttcttgtgtatgtacattgaccattaaaaggggaagatagtggatttatgttgtatagattagattatattgagacaaaaattatctatttgtatatatacataacagggtaaattattcagttaagaaaaaaataattttatgaactgcatgtataaatgaagtttatacagtacagtggttctacaatctatttattggacatgtccatgaccagaagggaaacagtcatttgcgcacaacttaaaaagtctgcattacattccttgataatgttgtggtttgttgccgttgccaagaactgaaaacataaaaagttaaaaaaaataataaattgcatgctgctttaattgtgaattgataataaactgtcctctttcagaaaacagaaaaaaaacacacacacacacaacaaaaatttgaaccaaaacattccgtttacattttagacagtaagtatcttcgttcttgttagtactatatctgttttactgcttttaacttctgatagcgttggaattaaaacaatgtcaaggtgctgttgtcattgctttactggcttaggggatgggggatggggggtatatttttgtttgttttgtgtttttttttcgtttgtttgttttgttttttagttcccacagggagtagagatggggaaagaattcctacaatatatattctggctgataaaagatacatttgtatgttgtgaagatgtttgcaatatcgatcagatgactagaaagtgaataaaaattaaggcaactgaacaaaaaaatgctcacactccacatcccgtgatgcacctcccaggccccgctcattctttgggcgttggtcagagtaagctgcttttgacggaaggacctatgtttgctcagaacacattctttccccccctccccctctggtctcctctttgttttgttttaaggaagaaaaatcagttgcgcgttctgaaatattttaccactgctgtgaacaagtgaacacattgtgtcacatcatgacactcgtataagcatggagaacagtgatttttttttagaacagaaaacaacaaaaaataaccccaaaatgaagattattttttatgaggagtgaacatttgggtaaatcatggctaagcttaaaaaaaactcatggtgaggcttaacaatgtcttgtaagcaaaaggtagagccctgtatcaacccagaaacacctagatcagaacaggaatccacattgccagtgacatgagactgaacagccaaatggaggctatgtggagttggcattgcatttaccggcagtgcgggaggaatttctgagtggccatcccaaggtctaggtggaggtggggcatggtatttgagacattccaaaacgaaggcctctgaaggacccttcagaggtggctctggaatgacatgtgtcaagctgcttggacctcgtgctttaagtgcctacattatctaactgtgctcaagaggttctcgactggaggaccacactcaagccgacttatgcccaccatcccacctctggataattttgcataaaattggattagcctggagcaggttgggagccaaatgtggcatttgtgatcatgagattgatgcaatgagatagaagatgtttgctacctgaacacttattgctttgaaactagacttgaggaaaccagggtttatcttttgagaacttttggtaagggaaaagggaacaggaaaagaaaccccaaactcaggccgaatgatcaaggggacccataggaaatcttgtccagagacaagacttcgggaaggtgtctggacattcagaacaccaagacttgaaggtgccttgctcaatggaagaggccaggacagagctgacaaaattttgctccccagtgaaggccacagcaaccttctgcccatcctgtctgttcatggagagggtccctgcctcacctctgccattttgggttaggagaagtcaagttgggagcctgaaatagtggttcttggaaaaatggatccccagtgaaaactagagctctaagcccattcagcccatttcacacctgaaaatgttagtgatcaccacttggaccagcatccttaagtatcagaaagccccaagcaattgctgcatcttagtagggtgagggataagcaaaagaggatgttcaccataacccaggaatgaagataccatcagcaaagaatttcaatttgttcagtctttcatttagagctagtctttcacagtaccatctgaatacctctttgaaagaaggaagactttacgtagtgtagatttgttttgtgttgtttgaaaatattatctttgtaattatttttaatatgtaaggaatgcttggaatatctgctgtatgtcaactttatgcagcttccttttgagggacaaatttaaaacaaacaaccccccatcacaaacttaaaggattgcaagggccagatctgttaagtggtttcataggagacacatccagcaattgtgtggtcagtggctcttttacccaataagatacatcacagtcacatgcttgatggtttatgttgacctaagatttattttgttaaaatctctctctgttgtgttcgttcttgttctgttttgttttgttttttaaagtcttgctgtggtctctttgtggcagaagtgtttcatgcatggcagcaggcctgttgcttttttatggcgattcccattgaaaatgtaagtaaatgtctgtggccttgttctctctatggtaaagatattattcaccatgtaaaacaaaaaacaatatttattgtattttagtatatttatataattatgttattgaaaaaaattggcattaaaacttaaccgcatcagaagcctattgtaaatacaagttctatttaagtgtactaattaacatataatatatgttttaaatatagaatttttaatgtttttaaatatattttcaaagtacataaaa

SEQ ID NO: 247258 - DNA, 4000 bp, Artificial Sequence
  derived and/or modified sequence
agagctaaataatgtctgacccgggcgcaaggcgcagcctggagctccgggtccccgacgctgccgccgccgcgcccgggcgcacccgcccgctcgctgtcccgcgcaccccgtagcgcctcgggctcccgggccggacagaggagccagcccggtgcgcccctccacctcctgctcggggggctttaatgagacacccaccgctgctgtggggccggcggggagcagcaccgcgacggggaccggggctgggcgctggagccagaatcggaaccacgatgtgactccgccgccggggacccgtgagttccaccaggtgagaagagtgatgaccatccttttccttactatggttatttcatactttggttgcatgaaggctgcccccatgaaagaagcaaacatccgaggacaaggtggcttggcctacccaggtgtgcggacccatgggactctggagagcgtgaatgggcccaaggcaggttcaagaggcttgacatcattggctgacactttcgaacacgtgatagaagagctgttggatgaggaccagaaagttcggcccaatgaagaaaacaataaggacgcagacttgtacacgtccagggtgatgctcagtagtcaagtgcctttggagcctcctcttctctttctgctggaggaatacaaaaattacctagatgctgcaaacatgtccatgagggtccggcgccactctgaccctgcccgccgaggggagctgagcgtgtgtgacagtattagtgagtgggtaacggcagcagacaaaaagactgcagtggacatgtcgggcgggacggtcacagtccttgaaaaggtccctgtatcaaaaggccaactgaagcaatacttctacgagaccaagtgcaatcccatgggttacacaaaagaaggctgcaggggcatagacaaaaggcattggaactcccagtgccgaactacccagtcgtacgtgcgggcccttaccatggatagcaaaaagagaattggctggcgattcataaggatagacacttcttgtgtatgtacattgaccattaaaaggggaagatagtggatttatgttgtatagattagattatattgagacaaaaattatctatttgtatatatacataacagggtaaattattcagttaagaaaaaaataattttatgaactgcatgtataaatgaagtttatacagtacagtggttctacaatctatttattggacatgtccatgaccagaagggaaacagtcatttgcgcacaacttaaaaagtctgcattacattccttgataatgttgtggtttgttgccgttgccaagaactgaaaacataaaaagttaaaaaaaataataaattgcatgctgctttaattgtgaattgataataaactgtcctctttcagaaaacagaaaaaaaacacacacacacacaacaaaaatttgaaccaaaacattccgtttacattttagacagtaagtatcttcgttcttgttagtactatatctgttttactgcttttaacttctgatagcgttggaattaaaacaatgtcaaggtgctgttgtcattgctttactggcttaggggatgggggatggggggtatatttttgtttgttttgtgtttttttttcgtttgtttgttttgttttttagttcccacagggagtagagatggggaaagaattcctacaatatatattctggctgataaaagatacatttgtatgttgtgaagatgtttgcaatatcgatcagatgactagaaagtgaataaaaattaaggcaactgaacaaaaaaatgctcacactccacatcccgtgatgcacctcccaggccccgctcattctttgggcgttggtcagagtaagctgcttttgacggaaggacctatgtttgctcagaacacattctttccccccctccccctctggtctcctctttgttttgttttaaggaagaaaaatcagttgcgcgttctgaaatattttaccactgctgtgaacaagtgaacacattgtgtcacatcatgacactcgtataagcatggagaacagtgatttttttttagaacagaaaacaacaaaaaataaccccaaaatgaagattattttttatgaggagtgaacatttgggtaaatcatggctaagcttaaaaaaaactcatggtgaggcttaacaatgtcttgtaagcaaaaggtagagccctgtatcaacccagaaacacctagatcagaacaggaatccacattgccagtgacatgagactgaacagccaaatggaggctatgtggagttggcattgcatttaccggcagtgcgggaggaatttctgagtggccatcccaaggtctaggtggaggtggggcatggtatttgagacattccaaaacgaaggcctctgaaggacccttcagaggtggctctggaatgacatgtgtcaagctgcttggacctcgtgctttaagtgcctacattatctaactgtgctcaagaggttctcgactggaggaccacactcaagccgacttatgcccaccatcccacctctggataattttgcataaaattggattagcctggagcaggttgggagccaaatgtggcatttgtgatcatgagattgatgcaatgagatagaagatgtttgctacctgaacacttattgctttgaaactagacttgaggaaaccagggtttatcttttgagaacttttggtaagggaaaagggaacaggaaaagaaaccccaaactcaggccgaatgatcaaggggacccataggaaatcttgtccagagacaagacttcgggaaggtgtctggacattcagaacaccaagacttgaaggtgccttgctcaatggaagaggccaggacagagctgacaaaattttgctccccagtgaaggccacagcaaccttctgcccatcctgtctgttcatggagagggtccctgcctcacctctgccattttgggttaggagaagtcaagttgggagcctgaaatagtggttcttggaaaaatggatccccagtgaaaactagagctctaagcccattcagcccatttcacacctgaaaatgttagtgatcaccacttggaccagcatccttaagtatcagaaagccccaagcaattgctgcatcttagtagggtgagggataagcaaaagaggatgttcaccataacccaggaatgaagataccatcagcaaagaatttcaatttgttcagtctttcatttagagctagtctttcacagtaccatctgaatacctctttgaaagaaggaagactttacgtagtgtagatttgttttgtgttgtttgaaaatattatctttgtaattatttttaatatgtaaggaatgcttggaatatctgctgtatgtcaactttatgcagcttccttttgagggacaaatttaaaacaaacaaccccccatcacaaacttaaaggattgcaagggccagatctgttaagtggtttcataggagacacatccagcaattgtgtggtcagtggctcttttacccaataagatacatcacagtcacatgcttgatggtttatgttgacctaagatttattttgttaaaatctctctctgttgtgttcgttcttgttctgttttgttttgttttttaaagtcttgctgtggtctctttgtggcagaagtgtttcatgcatggcagcaggcctgttgcttttttatggcgattcccattgaaaatgtaagtaaatgtctgtggccttgttctctctatggtaaagatattattcaccatgtaaaacaaaaaacaatatttattgtattttagtatatttatataattatgttattgaaaaaaattggcattaaaacttaaccgcatcagaagcctattgtaaatacaagttctatttaagtgtactaattaacatataatatatgttttaaatatagaatttttaatgtttttaaatatattttcaaagtacataaaa

SEQ ID NO: 247259 - DNA, 768 bp, Artificial Sequence
  derived and/or modified sequence
atgttccaccaggtgaggagagtgatgacaatcttattcctgacaatggtcattagttatttcggctgcatgaaggccgctcctatgaaggaggctaacattcgaggtcaggggggcctggcttatcctggggtccggacgcatggcaccttggagtccgtcaacggcccaaaggccgggtccagaggacttacctctcttgctgataccttcgagcacgttatcgaagaacttttggatgaggatcagaaggtgagacctaacgaggagaacaataaggacgcagatctctatacctctcgagtgatgctgtccagtcaggttcctctcgagcctccgctgttgttcctgctagaagaatataagaattatctggacgctgccaacatgagcatgcgcgtcagacgccatagcgatccagcacgacggggggaactgtctgtttgtgattctatctccgagtgggtcaccgccgcggacaagaaaacggccgttgatatgtctggcgggaccgtcacagtcctggaaaaggtccctgtgtcaaaaggccaattgaagcaatatttctacgagacaaagtgcaatccaatgggttataccaaggagggctgccggggcatcgacaagcgccactggaacagccaatgtcggaccacacagagctatgtgcgggctctcaccatggactccaaaaagaggattggctggagatttatcaggattgacaccagctgcgtgtgtaccttgaccatcaaaaggggccgctag

SEQ ID NO: 247260 - DNA, 768 bp, Artificial Sequence
  derived and/or modified sequence
atgttccaccaggtgcggcgggtgatgaccatcctcttcctgaccatggtgatctcctacttcggctgcatgaaggccgcccccatgaaggaggccaacatccggggccagggcggcctggcctacccaggagtgaggacccacggcaccctggagagcgtgaatggccccaaggccggcagccggggcctgaccagcctggccgacacctttgaacatgtgattgaggagctgctggatgaggaccagaaggtgcggcccaatgaggagaacaacaaggatgctgacctgtacaccagccgggtgatgctgagcagccaggtgcccctggagccccccctgctcttcctgctggaggagtacaagaactacctggatgctgccaacatgtccatgagggtgagaagacacagcgaccctgcccggcggggggagctgtctgtgtgtgacagcatcagcgagtgggtgacagctgctgacaagaagacagctgtggacatgtctgggggcaccgtgacagtgctggagaaggtgcctgtgtccaagggccagctgaagcagtacttctatgagaccaagtgcaaccccatgggctacaccaaggagggctgccggggcatcgacaagaggcactggaacagccagtgcaggaccacccagagctatgtgcgggccctgaccatggacagcaagaagagaattggctggaggttcatcagaattgacaccagctgtgtgtgcaccctgaccatcaagagaggaagatag

SEQ ID NO: 247261 - DNA, 768 bp, Artificial Sequence
  derived and/or modified sequence
atgttccaccaggtgcggcgggtgatgaccatcctgttcctgaccatggttatttcatacttcgggtgcatgaaagcagctcctatgaaagaggctaatattcggggccaggggggcttggcgtatccaggtgtgagaacacacggaaccctggaaagcgtgaacggccctaaggccggttcacgcgggcttacctcactagcagatactttcgaacatgttatcgaggagctcctagacgaggaccagaaagtcaggcccaacgaagaaaataacaaagatgccgacctttataccagtcgcgtgatgctgtcctcacaggtgcctttagagcctcctctcctttttttactggaggaatataagaactaccttgacgctgccaatatgtctatgcgagtcagaagacactcggaccctgcccgccgtggggagctgtctgtgtgcgactctatttctgaatgggtgacagccgcggacaaaaaaaccgcagtggacatgtccggcggcaccgtcaccgtcctggagaaggtcccagtctccaaaggacagctcaaacagtatttctatgagacaaagtgtaatccgatgggatacacaaaagaaggatgtagagggattgacaagaggcactggaattcccagtgccgcactacccaaagttatgtgcgagccctcaccatggacagcaaaaagaggattggctggagatttattcggatagatacaagctgcgtttgtacccttactatcaagcgggggaggtag

SEQ ID NO: 247262 - DNA, 768 bp, Artificial Sequence
  derived and/or modified sequence
atgtttcaccaagtacgaagggtcatgaccatcttgtttcttactatggtcatttcttacttcgggtgcatgaaagccgcacccatgaaggaggctaatataagagggcaaggtggcctcgcataccccggagtgcgaacacacgggacgctggagtccgtcaacggtccaaaggccggaagtcggggactcaccagccttgccgatacgtttgagcacgtcatcgaggaactcctggatgaggatcagaaagttcgccctaacgaggagaacaacaaagacgcggatctctatacctccagagtgatgctcagctcacaagttcccctggagcccccattgttgtttttgttggaggaatacaaaaactatttagacgccgctaatatgtcaatgcgggtgagaaggcacagtgaccccgctaggaggggagagttgtcggtgtgtgattcgatttccgaatgggttactgcagcggacaaaaagacagccgtggatatgagcggcggaaccgtgactgtgcttgagaaggtccctgtatccaagggacagttgaagcagtacttctacgaaacaaagtgcaaccccatgggctacacaaaggagggttgtcgcggaatcgataaacgccactggaacagtcagtgcagaactacgcaatcctacgtgcgcgcactgacaatggacagtaaaaaacgtatcggctggcgtttcattcgaatagatacatcctgtgtgtgcaccctgacaattaaaagagggagatag

SEQ ID NO: 247263 - protein, 262 aa, Artificial Sequence
  derived and/or modified sequence
MQSREEEWFHQVRRVMTILFLTMVISYFGCMKAAPMKEANIRGQGGLAYPGVRTHGTLESVNGPKAGSRGLTSLADTFEHVIEELLDEDQKVRPNEENNKDADLYTSRVMLSSQVPLEPPLLFLLEEYKNYLDAANMSMRVRRHSDPARRGELSVCDSISEWVTAADKKTAVDMSGGTVTVLEKVPVSKGQLKQYFYETKCNPMGYTKEGCRGIDKRHWNSQCRTTQSYVRALTMDSKKRIGWRFIRIDTSCVCTLTIKRGR

SEQ ID NO: 247264 - DNA, 789 bp, Artificial Sequence
  derived and/or modified sequence
atgcagagcagagaggaggagtggttccaccaggtgagaagagtgatgaccatcctgttcctgaccatggtgatcagctacttcggctgcatgaaggccgcccccatgaaggaggccaacatcagaggccagggcggcctggcctaccccggcgtgagaacccacggcaccctggagagcgtgaacggccccaaggccggcagcagaggcctgaccagcctggccgacaccttcgagcacgtgatcgaggagctgctggacgaggaccagaaggtgagacccaacgaggagaacaacaaggacgccgacctgtacaccagcagagtgatgctgagcagccaggtgcccctggagccccccctgctgttcctgctggaggagtacaagaactacctggacgccgccaacatgagcatgagagtgagaagacacagcgaccccgccagaagaggcgagctgagcgtgtgcgacagcatcagcgagtgggtgaccgccgccgacaagaagaccgccgtggacatgagcggcggcaccgtgaccgtgctggagaaggtgcccgtgagcaagggccagctgaagcagtacttctacgagaccaagtgcaaccccatgggctacaccaaggagggctgcagaggcatcgacaagagacactggaacagccagtgcagaaccacccagagctacgtgagagccctgaccatggacagcaagaagagaatcggctggagattcatcagaatcgacaccagctgcgtgtgcaccctgaccatcaagagaggcagatag

SEQ ID NO: 247265 - DNA, 3979 bp, Artificial Sequence
  derived and/or modified sequence
acacggctacctgctccccaggaattgagactgaagtggacttacaagtccgaagccaatgtagcttggaaaacttgggaggcggaattcctaccgctgggaactgaaagggtctgcgacactctcgggcaggccgaacccacatctctacccatcctgcgcccctcttctgaagcgccctccagggaagttaagagttttgactttcggggagtggttgggatgtacgtgggggattcttgactcgggttagtctctggggatgcagagccgggaagaggaatggttccaccaggtgagaagagtgatgaccatccttttccttactatggttatttcatactttggttgcatgaaggctgcccccatgaaagaagcaaacatccgaggacaaggtggcttggcctacccaggtgtgcggacccatgggactctggagagcgtgaatgggcccaaggcaggttcaagaggcttgacatcattggctgacactttcgaacacgtgatagaagagctgttggatgaggaccagaaagttcggcccaatgaagaaaacaataaggacgcagacttgtacacgtccagggtgatgctcagtagtcaagtgcctttggagcctcctcttctctttctgctggaggaatacaaaaattacctagatgctgcaaacatgtccatgagggtccggcgccactctgaccctgcccgccgaggggagctgagcgtgtgtgacagtattagtgagtgggtaacggcagcagacaaaaagactgcagtggacatgtcgggcgggacggtcacagtccttgaaaaggtccctgtatcaaaaggccaactgaagcaatacttctacgagaccaagtgcaatcccatgggttacacaaaagaaggctgcaggggcatagacaaaaggcattggaactcccagtgccgaactacccagtcgtacgtgcgggcccttaccatggatagcaaaaagagaattggctggcgattcataaggatagacacttcttgtgtatgtacattgaccattaaaaggggaagatagtggatttatgttgtatagattagattatattgagacaaaaattatctatttgtatatatacataacagggtaaattattcagttaagaaaaaaataattttatgaactgcatgtataaatgaagtttatacagtacagtggttctacaatctatttattggacatgtccatgaccagaagggaaacagtcatttgcgcacaacttaaaaagtctgcattacattccttgataatgttgtggtttgttgccgttgccaagaactgaaaacataaaaagttaaaaaaaataataaattgcatgctgctttaattgtgaattgataataaactgtcctctttcagaaaacagaaaaaaaacacacacacacacaacaaaaatttgaaccaaaacattccgtttacattttagacagtaagtatcttcgttcttgttagtactatatctgttttactgcttttaacttctgatagcgttggaattaaaacaatgtcaaggtgctgttgtcattgctttactggcttaggggatgggggatggggggtatatttttgtttgttttgtgtttttttttcgtttgtttgttttgttttttagttcccacagggagtagagatggggaaagaattcctacaatatatattctggctgataaaagatacatttgtatgttgtgaagatgtttgcaatatcgatcagatgactagaaagtgaataaaaattaaggcaactgaacaaaaaaatgctcacactccacatcccgtgatgcacctcccaggccccgctcattctttgggcgttggtcagagtaagctgcttttgacggaaggacctatgtttgctcagaacacattctttccccccctccccctctggtctcctctttgttttgttttaaggaagaaaaatcagttgcgcgttctgaaatattttaccactgctgtgaacaagtgaacacattgtgtcacatcatgacactcgtataagcatggagaacagtgatttttttttagaacagaaaacaacaaaaaataaccccaaaatgaagattattttttatgaggagtgaacatttgggtaaatcatggctaagcttaaaaaaaactcatggtgaggcttaacaatgtcttgtaagcaaaaggtagagccctgtatcaacccagaaacacctagatcagaacaggaatccacattgccagtgacatgagactgaacagccaaatggaggctatgtggagttggcattgcatttaccggcagtgcgggaggaatttctgagtggccatcccaaggtctaggtggaggtggggcatggtatttgagacattccaaaacgaaggcctctgaaggacccttcagaggtggctctggaatgacatgtgtcaagctgcttggacctcgtgctttaagtgcctacattatctaactgtgctcaagaggttctcgactggaggaccacactcaagccgacttatgcccaccatcccacctctggataattttgcataaaattggattagcctggagcaggttgggagccaaatgtggcatttgtgatcatgagattgatgcaatgagatagaagatgtttgctacctgaacacttattgctttgaaactagacttgaggaaaccagggtttatcttttgagaacttttggtaagggaaaagggaacaggaaaagaaaccccaaactcaggccgaatgatcaaggggacccataggaaatcttgtccagagacaagacttcgggaaggtgtctggacattcagaacaccaagacttgaaggtgccttgctcaatggaagaggccaggacagagctgacaaaattttgctccccagtgaaggccacagcaaccttctgcccatcctgtctgttcatggagagggtccctgcctcacctctgccattttgggttaggagaagtcaagttgggagcctgaaatagtggttcttggaaaaatggatccccagtgaaaactagagctctaagcccattcagcccatttcacacctgaaaatgttagtgatcaccacttggaccagcatccttaagtatcagaaagccccaagcaattgctgcatcttagtagggtgagggataagcaaaagaggatgttcaccataacccaggaatgaagataccatcagcaaagaatttcaatttgttcagtctttcatttagagctagtctttcacagtaccatctgaatacctctttgaaagaaggaagactttacgtagtgtagatttgttttgtgttgtttgaaaatattatctttgtaattatttttaatatgtaaggaatgcttggaatatctgctgtatgtcaactttatgcagcttccttttgagggacaaatttaaaacaaacaaccccccatcacaaacttaaaggattgcaagggccagatctgttaagtggtttcataggagacacatccagcaattgtgtggtcagtggctcttttacccaataagatacatcacagtcacatgcttgatggtttatgttgacctaagatttattttgttaaaatctctctctgttgtgttcgttcttgttctgttttgttttgttttttaaagtcttgctgtggtctctttgtggcagaagtgtttcatgcatggcagcaggcctgttgcttttttatggcgattcccattgaaaatgtaagtaaatgtctgtggccttgttctctctatggtaaagatattattcaccatgtaaaacaaaaaacaatatttattgtattttagtatatttatataattatgttattgaaaaaaattggcattaaaacttaaccgcatcagaagcctattgtaaatacaagttctatttaagtgtactaattaacatataatatatgttttaaatatagaatttttaatgtttttaaatatattttcaaagtacataaaa

SEQ ID NO: 247266 - DNA, 3918 bp, Artificial Sequence
  derived and/or modified sequence
agagttgaaagctaggggagcgagacctcggggcgtgcgattctcactcgctccctcccgccccagcgcccacagccggggtttctgcagagggcgcgggacgcggggttccccggggctgaggctggggctggaacacccctcgaagccgcgggcgtcctgtccaaggcgccccaggagggcgcaggactcgcagggcgatgtcgcggggccctaggggaggagttccaccaggtgagaagagtgatgaccatccttttccttactatggttatttcatactttggttgcatgaaggctgcccccatgaaagaagcaaacatccgaggacaaggtggcttggcctacccaggtgtgcggacccatgggactctggagagcgtgaatgggcccaaggcaggttcaagaggcttgacatcattggctgacactttcgaacacgtgatagaagagctgttggatgaggaccagaaagttcggcccaatgaagaaaacaataaggacgcagacttgtacacgtccagggtgatgctcagtagtcaagtgcctttggagcctcctcttctctttctgctggaggaatacaaaaattacctagatgctgcaaacatgtccatgagggtccggcgccactctgaccctgcccgccgaggggagctgagcgtgtgtgacagtattagtgagtgggtaacggcagcagacaaaaagactgcagtggacatgtcgggcgggacggtcacagtccttgaaaaggtccctgtatcaaaaggccaactgaagcaatacttctacgagaccaagtgcaatcccatgggttacacaaaagaaggctgcaggggcatagacaaaaggcattggaactcccagtgccgaactacccagtcgtacgtgcgggcccttaccatggatagcaaaaagagaattggctggcgattcataaggatagacacttcttgtgtatgtacattgaccattaaaaggggaagatagtggatttatgttgtatagattagattatattgagacaaaaattatctatttgtatatatacataacagggtaaattattcagttaagaaaaaaataattttatgaactgcatgtataaatgaagtttatacagtacagtggttctacaatctatttattggacatgtccatgaccagaagggaaacagtcatttgcgcacaacttaaaaagtctgcattacattccttgataatgttgtggtttgttgccgttgccaagaactgaaaacataaaaagttaaaaaaaataataaattgcatgctgctttaattgtgaattgataataaactgtcctctttcagaaaacagaaaaaaaacacacacacacacaacaaaaatttgaaccaaaacattccgtttacattttagacagtaagtatcttcgttcttgttagtactatatctgttttactgcttttaacttctgatagcgttggaattaaaacaatgtcaaggtgctgttgtcattgctttactggcttaggggatgggggatggggggtatatttttgtttgttttgtgtttttttttcgtttgtttgttttgttttttagttcccacagggagtagagatggggaaagaattcctacaatatatattctggctgataaaagatacatttgtatgttgtgaagatgtttgcaatatcgatcagatgactagaaagtgaataaaaattaaggcaactgaacaaaaaaatgctcacactccacatcccgtgatgcacctcccaggccccgctcattctttgggcgttggtcagagtaagctgcttttgacggaaggacctatgtttgctcagaacacattctttccccccctccccctctggtctcctctttgttttgttttaaggaagaaaaatcagttgcgcgttctgaaatattttaccactgctgtgaacaagtgaacacattgtgtcacatcatgacactcgtataagcatggagaacagtgatttttttttagaacagaaaacaacaaaaaataaccccaaaatgaagattattttttatgaggagtgaacatttgggtaaatcatggctaagcttaaaaaaaactcatggtgaggcttaacaatgtcttgtaagcaaaaggtagagccctgtatcaacccagaaacacctagatcagaacaggaatccacattgccagtgacatgagactgaacagccaaatggaggctatgtggagttggcattgcatttaccggcagtgcgggaggaatttctgagtggccatcccaaggtctaggtggaggtggggcatggtatttgagacattccaaaacgaaggcctctgaaggacccttcagaggtggctctggaatgacatgtgtcaagctgcttggacctcgtgctttaagtgcctacattatctaactgtgctcaagaggttctcgactggaggaccacactcaagccgacttatgcccaccatcccacctctggataattttgcataaaattggattagcctggagcaggttgggagccaaatgtggcatttgtgatcatgagattgatgcaatgagatagaagatgtttgctacctgaacacttattgctttgaaactagacttgaggaaaccagggtttatcttttgagaacttttggtaagggaaaagggaacaggaaaagaaaccccaaactcaggccgaatgatcaaggggacccataggaaatcttgtccagagacaagacttcgggaaggtgtctggacattcagaacaccaagacttgaaggtgccttgctcaatggaagaggccaggacagagctgacaaaattttgctccccagtgaaggccacagcaaccttctgcccatcctgtctgttcatggagagggtccctgcctcacctctgccattttgggttaggagaagtcaagttgggagcctgaaatagtggttcttggaaaaatggatccccagtgaaaactagagctctaagcccattcagcccatttcacacctgaaaatgttagtgatcaccacttggaccagcatccttaagtatcagaaagccccaagcaattgctgcatcttagtagggtgagggataagcaaaagaggatgttcaccataacccaggaatgaagataccatcagcaaagaatttcaatttgttcagtctttcatttagagctagtctttcacagtaccatctgaatacctctttgaaagaaggaagactttacgtagtgtagatttgttttgtgttgtttgaaaatattatctttgtaattatttttaatatgtaaggaatgcttggaatatctgctgtatgtcaactttatgcagcttccttttgagggacaaatttaaaacaaacaaccccccatcacaaacttaaaggattgcaagggccagatctgttaagtggtttcataggagacacatccagcaattgtgtggtcagtggctcttttacccaataagatacatcacagtcacatgcttgatggtttatgttgacctaagatttattttgttaaaatctctctctgttgtgttcgttcttgttctgttttgttttgttttttaaagtcttgctgtggtctctttgtggcagaagtgtttcatgcatggcagcaggcctgttgcttttttatggcgattcccattgaaaatgtaagtaaatgtctgtggccttgttctctctatggtaaagatattattcaccatgtaaaacaaaaaacaatatttattgtattttagtatatttatataattatgttattgaaaaaaattggcattaaaacttaaccgcatcagaagcctattgtaaatacaagttctatttaagtgtactaattaacatataatatatgttttaaatatagaatttttaatgtttttaaatatattttcaaagtacataaaa

SEQ ID NO: 247267 - DNA, 789 bp, Artificial Sequence
  derived and/or modified sequence
atgcagtcgcgggaggaggagtggttccaccaagtgcgcagggttatgacgatccttttcctgactatggttatatcctattttggttgtatgaaggcagccccaatgaaggaagctaacatcaggggacagggtggtcttgcatacccaggagtcagaacccacggtactctcgaatcagtaaatgggcctaaggccggatcaagaggcctgacgtcccttgcggatacctttgaacatgtaatcgaagaactcctggatgaagaccagaaagtccgacctaacgaggagaacaacaaggatgccgatctgtatacttcccgggtgatgttatcatcccaggttcccctcgagcctcctctgctgttccttcttgaagagtataagaactatctagacgcggcgaatatgagcatgcgggtgaggcggcattccgaccccgctagacggggggagctttcagtgtgcgactcgatttccgagtgggtcaccgctgcggataaaaaaacagccgtggacatgtccggtggaacagtgacggtgctggaaaaggtgccagtctcaaaaggccaactgaaacaatacttttatgaaactaagtgcaacccaatgggatacactaaagaagggtgtcggggaatcgacaaacgtcactggaatagccagtgccggaccacccagtcatatgttagagccttaactatggactccaaaaaaagaatcgggtggcggttcatcaggattgatacctcctgtgtgtgtacactcacaataaaacggggtaggtag

SEQ ID NO: 247268 - DNA, 789 bp, Artificial Sequence
  derived and/or modified sequence
atgcagagccgggaggaggagtggttccaccaggtgagaagagtgatgaccatcctcttcctgaccatggtgatctcctacttcggctgcatgaaggccgcccccatgaaggaggccaacatccggggccagggcggcctggcctacccaggagtgaggacccacggcaccctggagagcgtgaatggccccaaggccggcagccggggcctgaccagcctggccgacacctttgagcacgtgattgaggagctgctggatgaggaccagaaggtgcggcccaatgaggagaacaacaaggatgctgacctgtacaccagccgggtgatgctgagcagccaggtgcccctggagccccccctgctcttcctgctggaggagtacaagaactacctggatgctgccaacatgtccatgagggtgcggcggcacagcgaccctgccaggagaggagagctgtctgtgtgtgacagcatcagcgagtgggtgacagctgctgacaagaagacagctgtggacatgtctgggggcaccgtgacagtgctggagaaggtgcctgtgtccaagggccagctgaagcagtacttctatgagaccaagtgcaaccccatgggctacaccaaggagggctgccggggcatcgacaagaggcactggaacagccagtgcaggaccacccagagctatgtgcgggccctgaccatggacagcaagaagagaattggctggaggttcatcagaattgacaccagctgtgtgtgcaccctgaccatcaagaggggccgctag

SEQ ID NO: 247269 - DNA, 789 bp, Artificial Sequence
  derived and/or modified sequence
atgcagagccgggaggaggagtggttccaccaggtgcggcgggtgatgaccattctttttcttacaatggtgattagctactttgggtgcatgaaggctgcgcccatgaaggaggcaaacatccgaggccaaggaggactggcatacccaggggtgagaacccatggcaccctggagtcagttaatggacccaaagcgggttcacggggattgacttctttagctgacacttttgaacacgtaatagaggaacttctcgacgaagatcagaaggtgcggcctaatgaggaaaataacaaggacgcggatttgtatacctcgagggtcatgttaagctctcaggtcccgctggaaccgcctttacttttcctgctggaagaatataagaactatttagacgctgctaatatgtccatgcgcgtccggcgccatagtgacccagccagaaggggcgagctatctgtctgcgatagcatatccgagtgggtcaccgctgcggataaaaagacagccgtggatatgtcgggcggcaccgtgactgtgctggaaaaggttcccgtctctaaagggcagcttaagcaatatttttatgagaccaaatgtaaccccatgggctacactaaggagggatgcagaggcattgacaaacggcactggaattcccagtgcaggaccacccagagctacgtgcgcgcacttaccatggatagtaagaagagaatcggatggcggtttatcagaattgatacctcttgtgtttgcacacttacgatcaagaggggccggtag

SEQ ID NO: 247270 - DNA, 789 bp, Artificial Sequence
  derived and/or modified sequence
atgcaatctcgggaagaggagtggttccatcaagttaggagggtcatgaccatcctgtttctcaccatggttatatcgtattttggttgcatgaaagcagcacccatgaaagaagccaacattcgtggccagggcggactggcctatcccggagtcagaacacatggtacactggagagtgtaaatggacccaaggcgggatcaagaggcctgacttcattagctgacactttcgaacacgtgatcgaagaactgttggacgaagaccaaaaggtgcgacccaatgaagagaacaacaaggacgccgatctgtacacatctagggttatgctcagctcccaagtccctctcgaaccacctctcttgtttctcctcgaagagtataagaattacctggatgctgctaatatgagcatgcgggttaggcggcactctgatcccgctcgtcgcggtgaactctctgtctgtgactcaatttctgaatgggtgactgccgctgataaaaaaacggctgtagatatgtctgggggtactgttacagtcctagagaaggtcccggtaagtaagggtcagcttaagcagtatttttatgaaacaaagtgcaatcctatgggctatacaaaagaggggtgccgtggaatcgataaacgacactggaactcacagtgtagaactacccagtcttacgtgagagcccttactatggactccaaaaagcgtatcggctggcgcttcattagaattgacacctcctgcgtgtgtacattaaccataaagaggggtaggtag

SEQ ID NO: 247271 - protein, 166 aa, Artificial Sequence
  derived and/or modified sequence
MSKLGRAARGLRKPERGVSINQFCKEFNERTKDIKEGIPLPTKILVKPDRTFEIKIGQPTVSYFLKAAAGIEKGARQTGKEVAGLVTLKHVYEIARIKAQDEAFALQDVPLSSVVRSIIGSARSLGIRVVKDLSSEELAAFQKERAIFLAAQKEADLAAQEEAAKK

SEQ ID NO: 247272 - DNA, 501 bp, Artificial Sequence
  derived and/or modified sequence
atgtctaaactggggcgggccgcgcgcggactgcgcaagcccgagcggggcgtgagcattaaccaattttgtaaggaattcaatgagcgaacaaaggatattaaagaaggaatccctttaccaactaagatcttagttaagcccgaccggacctttgaaatcaaaattggacagcccactgtcagctatttccttaaagcagcggctggcattgagaagggagcacgacaaacaggaaaggaagtggccggattggtcaccctgaagcatgtatacgagatcgcccgcataaaagctcaggacgaagcttttgcgctccaggacgtccctttgagctccgttgtgaggtcgatcattgggtccgctaggagcttgggtattcgggtggtaaaagacctgagctccgaagagctcgctgcttttcagaaagagagggctatcttcttggctgcgcagaaagaggccgacctggcggctcaagaggaggccgctaaaaagtag

SEQ ID NO: 247273 - DNA, 501 bp, Artificial Sequence
  derived and/or modified sequence
atgagcaagctgggccgggccgcccggggcctgaggaagccagagcggggcgtgtccatcaaccagttctgcaaggagttcaatgaaagaaccaaggacatcaaggagggcatccccctgcccaccaagatcctggtgaagccagacaggacctttgagatcaagattggccagcccaccgtgtcctacttcctgaaggctgctgctggcattgaaaaaggagcccggcagacaggcaaggaggtggccggcctggtgaccctgaagcacgtgtatgagatcgcccgcatcaaggcccaggatgaggcctttgccctgcaggatgtgcccctgagctctgtggtgcgcagcatcatcggcagcgcccggagcctgggcatccgggtggtgaaggacctgagcagcgaggagctggccgccttccagaaggagcgggccatcttcctggccgcccagaaggaggccgacctggccgcccaggaggaggccgccaagaagtag

SEQ ID NO: 247274 - DNA, 1527 bp, Artificial Sequence
  derived and/or modified sequence
gtgaggacccttgacctctggcccaagatggtggcgcccagagcttcgctcttgctgctcccctgaggtgaactgaagccagcagccccgcatcatgtcaaagctcggccgggccgcccggggcctcaggaagcccgagagaggcgtttccatcaaccagttttgcaaggagttcaatgagaggacaaaggacatcaaggaaggcattcctctgcctaccaagattttagtgaagcctgacaggacatttgaaattaagattggacagcccactgtttcctacttcctgaaggcagcagctgggattgaaaagggggcccggcaaacagggaaagaggtggcaggcctggtgaccttgaagcatgtgtatgagattgcccgcatcaaagctcaggatgaggcatttgccctgcaggatgtacccctgtcgtctgttgtccgctccatcatcgggtctgcccgttctctgggcattcgcgtggtgaaggacctcagttcagaagagcttgcagctttccagaaggaacgagccatcttcctggctgctcagaaggaggcagatttggctgcccaagaagaagctgccaagaagtgacccttgccccaccaactcccagatttcaaaggaggtagttgcaaaagctgtgcccaaggggaggaaggaggtcacaccaatatgatgatggttttcatgactttgaatgatatatttttgtacatctagctgtatcgaggcatcaggcctgaataaacatcctttcttacccactgtcatcttctatcttgggacctcagggaagggaaccagtactggtggtagccaatatgggcagacattaggaaattggggtcttcatactgcttctcagatgtgcaaactgaggttcagccaagcaaagtaacttgcccaggtccttttttttcttttttaagttataattttgttttattgcccaggttctgaattggtgccagaggtaggaatagaacccaggccttctcatttgaaatcctgtgttcttcccctccccagggtgggaactatggttgctagggctgaggtgtattgcttacttcttccatcaaaaatctcttttatctctgaacaacttgccacctctgcagaaacaagtccctgtggagatctcagttcagccccaggcagggttactacatggagtacccagatcccaggggctacttcaggcccttctactaagctcctgaccctggctctgggtcagatgttggctgaacatgaactattgtagggctgacagctacagaccacagaaagagcaaagcttcagtaggttcctgcctgatggagaagtcctcgggaagcccttggccttctatttcctcattgtcctttcagagaagagagcaggagttgggggagaaaggagattcgcatttactgaccatctgttatgtgctagacacttcattttacactgagaaaatatggaaagcatagataaacacctaaaagaaaataaaaacctcatgttatcccaccaccca

SEQ ID NO: 247275 - DNA, 501 bp, Artificial Sequence
  derived and/or modified sequence
atgagcaagctgggccgggccgcccggggcctgcggaagcccgagcgcggcgtctctatcaaccagttctgtaaggagttcaacgaacgaacgaaagatatcaaagaggggatccccttaccaaccaaaatccttgtgaaaccggaccgcacgttcgagattaaaatcggccagcccactgtctcctacttccttaaagctgctgccggcatcgagaagggggcgcgtcagaccgggaaagaagtggctggactcgtgacactgaagcacgtttatgagatcgcaaggattaaagctcaagatgaagccttcgccctgcaggatgtccctctgtccagcgtggttcggtctataattgggtcggctcgtagcttgggtataagagtggttaaggatctctccagtgaggagcttgccgccttccagaaggagcgcgcaatcttcctggctgcccagaaggaggcggacctggccgcacaagaggaagccgcaaaaaagtag

SEQ ID NO: 247276 - DNA, 501 bp, Artificial Sequence
  derived and/or modified sequence
atgagcaagttggggagagccgctcggggactgcggaagcctgagcgcggagtgagtataaatcagttttgcaaggagtttaacgagcgtacaaaagacatcaaggaaggaattccgcttcctacaaagattttggtgaagcccgaccggacgttcgaaattaaaattggccagcccaccgtgtcgtactttttaaaagctgctgcgggaatcgaaaaaggggcaaggcagactgggaaggaggtggcaggactggtgaccttaaagcatgtgtacgagatcgcgcgaatcaaagcacaggacgaggcattcgccctccaggacgttccactcagctctgtcgttcgttccattattggatccgctaggtctctcggcattcgggtagttaaagaccttagttctgaggagctggcagcttttcagaaagaacgtgcgatcttcctggcggctcagaaagaggccgacctggccgctcaagaggaagccgcaaagaagtag

SEQ ID NO: 247277 - DNA, 501 bp, Artificial Sequence
  derived and/or modified sequence
atgagcaagctgggcagagccgccagaggcctgagaaagcccgagagaggcgtgagcatcaaccagttctgcaaggagttcaacgagagaaccaaggacatcaaggagggcatccccctgcccaccaagatcctggtgaagcccgacagaaccttcgagatcaagatcggccagcccaccgtgagctacttcctgaaggccgccgccggcatcgagaagggcgccagacagaccggcaaggaggtggccggcctggtgaccctgaagcacgtgtacgagatcgccagaatcaaggcccaggacgaggccttcgccctgcaggacgtgcccctgagcagcgtggtgagaagcatcatcggcagcgccagaagcctgggcatcagagtggtgaaggacctgagcagcgaggagctggccgccttccagaaggagagagccatcttcctggccgcccagaaggaggccgacctggccgcccaggaggaggccgccaagaagtag

SEQ ID NO: 247278 - protein, 181 aa, Artificial Sequence
  derived and/or modified sequence
MSKLGRAARGLRKPEVGGVIRAIVRAGLAMPGPPLGPVLGQRGVSINQFCKEFNERTKDIKEGIPLPTKILVKPDRTFEIKIGQPTVSYFLKAAAGIEKGARQTGKEVAGLVTLKHVYEIARIKAQDEAFALQDVPLSSVVRSIIGSARSLGIRVVKERCSANVLRNGKISMKDPSGRSSV

SEQ ID NO: 247279 - DNA, 546 bp, Artificial Sequence
  derived and/or modified sequence
atgtccaagctggggcgagctgcccgcggcctgcggaagcccgaagttggtggcgtgatcagggctatagtacgagcagggctggcaatgccaggcccgccactgggccccgtcctgggacagcgcggtgttagcattaatcagttctgcaaggagttcaacgaacggaccaaggatattaaagaggggatcccactaccaactaaaattctcgtaaaacccgataggacgttcgagatcaagataggccagccgacagtgtcatactttctgaaagccgcagcagggatcgagaaaggagccagacagacagggaaggaagttgccggcctggtgacgctgaaacatgtctacgagatcgccaggattaaggcacaggacgaggcttttgccttacaggacgtacctctgtcttctgttgtgagaagcatcatcggttccgctcgcagcttgggcattcgcgttgttaaggaacggtgctccgctaatgtactgcgtaacggaaaaatttccatgaaagatccatcaggacggagctctgtgtag

SEQ ID NO: 247280 - DNA, 546 bp, Artificial Sequence
  derived and/or modified sequence
atgagcaagctgggccgggccgcccggggcctgaggaagccagaggtgggcggcgtcatccgggccatcgtgcgggccggcctggccatgcctggcccccccctgggccctgtgctgggccagaggggcgtgtccatcaaccagttctgcaaggagttcaatgaaagaaccaaggacatcaaggagggcatccccctgcccaccaagatcctggtgaagccagacaggacctttgagatcaagattggccagcccaccgtgtcctacttcctgaaggctgctgctggcattgaaaaaggagcccggcagacaggcaaggaggtggccggcctggtgaccctgaagcacgtgtatgagatcgcccgcatcaaggcccaggatgaggcctttgccctgcaggatgtgcccctgagctctgtggtgcgcagcatcatcggcagcgcccggagcctgggcatccgggtggtgaaggagcgctgcagcgccaacgtgctgagaaatggcaagatctccatgaaggaccccagcggccgcagctctgtgtag

SEQ ID NO: 247281 - DNA, 922 bp, Artificial Sequence
  derived and/or modified sequence
cctctggcccaagatggtggcgcccagagcttcgctcttgctgctcccctgaggtgaactgaagccagcagccccgcatcatgtcaaagctcggccgggccgcccggggcctcaggaagcccgaggtcggcggtgtgatccgggcgatcgtgcgggcaggcctggccatgcccgggcccccactaggcccagtgctgggtcagagaggcgtttccatcaaccagttttgcaaggagttcaatgagaggacaaaggacatcaaggaaggcattcctctgcctaccaagattttagtgaagcctgacaggacatttgaaattaagattggacagcccactgtttcctacttcctgaaggcagcagctgggattgaaaagggggcccggcaaacagggaaagaggtggcaggcctggtgaccttgaagcatgtgtatgagattgcccgcatcaaagctcaggatgaggcatttgccctgcaggatgtacccctgtcgtctgttgtccgctccatcatcgggtctgcccgttctctgggcattcgcgtggtgaaggaacgttgttctgcaaatgttctaagaaatggaaagatctccatgaaggatccaagtgggagaagttcagtgtgacctgggtctgtcgtcctagagcctcagttcagaagagcttgcagctttccagaaggaacgagccatcttcctggctgctcagaaggaggcagatttggctgcccaagaagaagctgccaagaagtgacccttgccccaccaactcccagatttcaaaggaggtagttgcaaaagctgtgcccaaggggaggaaggaggtcacaccaatatgatgatggttttcatgactttgaatgatatatttttgtacatctagctgtatcgaggcatcaggcctgaataaacatcctttctta

SEQ ID NO: 247282 - DNA, 546 bp, Artificial Sequence
  derived and/or modified sequence
atgagcaagctgggccgggccgcccggggcctgcggaagcccgaggttggcggagtgatacgggccatcgtccgggcagggttagccatgcccggtcctcccctgggccctgtattggggcaacggggtgtaagtattaatcagttctgcaaagagttcaatgagagaacaaaagacataaaggagggaatccctctgcctactaaaattctggtgaagcctgataggacctttgagatcaagattggccaaccgaccgttagctattttttgaaagccgcggctgggattgaaaaaggcgcccgccaaacagggaaggaggtggccggattagtgacgctgaagcacgtctacgaaattgctcggattaaagcccaggatgaggcttttgctttacaggatgtgcctctttccagcgtggtacgttctatcattggctccgcccggtctttgggcatcagggttgtgaaagaacggtgtagcgccaatgtcctgcggaacgggaaaattagtatgaaagacccatccggcaggtcaagtgtatag

SEQ ID NO: 247283 - DNA, 546 bp, Artificial Sequence
  derived and/or modified sequence
atgtccaaacttggcagggctgctagggggctacggaagccggaagtgggcggagtgatccgcgctattgtgcgagcaggactggcgatgcccggaccgcctctgggccctgttttagggcaacgcggtgtgagcatcaatcagttttgtaaagagttcaacgaaaggaccaaggatattaaagagggaatccctctgccgactaagatactagttaagcccgatcgaacctttgagatcaaaatcggtcaacccacggtgagttattttcttaaggccgctgctgggatcgaaaaaggggcacgtcaaaccgggaaagaggtggctggcctcgtgacattgaagcatgtgtacgagattgctagaattaaagcccaagatgaggcgttcgcgctacaagatgtgcccctgtcatcagtggtgcggtccatcattgggagtgcgcgaagccttgggattcgcgtcgtgaaggaacgctgctcggcaaatgttttgcggaatgggaagattagcatgaaggatcctagtgggcgaagctcagtgtag

SEQ ID NO: 247284 - DNA, 546 bp, Artificial Sequence
  derived and/or modified sequence
atgagcaagctgggcagagccgccagaggcctgagaaagcccgaggtgggcggcgtgatcagagccatcgtgagagccggcctggccatgcccggcccccccctgggccccgtgctgggccagagaggcgtgagcatcaaccagttctgcaaggagttcaacgagagaaccaaggacatcaaggagggcatccccctgcccaccaagatcctggtgaagcccgacagaaccttcgagatcaagatcggccagcccaccgtgagctacttcctgaaggccgccgccggcatcgagaagggcgccagacagaccggcaaggaggtggccggcctggtgaccctgaagcacgtgtacgagatcgccagaatcaaggcccaggacgaggccttcgccctgcaggacgtgcccctgagcagcgtggtgagaagcatcatcggcagcgccagaagcctgggcatcagagtggtgaaggagagatgcagcgccaacgtgctgagaaacggcaagatcagcatgaaggaccccagcggcagaagcagcgtgtag

SEQ ID NO: 247285 - protein, 548 aa, Artificial Sequence
  derived and/or modified sequence
MATCIWLRSCGARRLGSTFPGCRLRPRAGGLVPASGPAPGPAQLRCYAGRLAGLSAALLRTDSFVGGRWLPAAATFPVQDPASGAALGMVADCGVREARAAVRAAYEAFCRWREVSAKERSSLLRKWYNLMIQNKDDLARIITAESGKPLKEAHGEILYSAFFLEWFSEEARRVYGDIIHTPAKDRRALVLKQPIGVAAVITPWNFPSAMITRKVGAALAAGCTVVVKPAEDTPFSALALAEVNQGFLLDLDPLLLASQAGIPSGVYNVIPCSRKNAKEVGEAICTDPLVSKISFTGSTTTGKILLHHAANSVKRVSMELGGLAPFIVFDSANVDQAVAGAMASKFRNTGQTCVCSNQFLVQRGIHDAFVKAFAEAMKKNLRVGNGFEEGTTQGPLINEKAVEKVEKQVNDAVSKGATVVTGGKRHQLGKNFFEPTLLCNVTQDMLCTHEETFGPLAPVIKFDTEEEAIAIANAADVGLAGYFYSQDPAQIWRVAEQLEVGMVGVNEGLISSVECPFGGVKQSGLGREGSKYGIDEYLELKYVCYGGL

SEQ ID NO: 247286 - DNA, 1647 bp, Artificial Sequence
  derived and/or modified sequence
atggctacatgcatttggctgagatcctgcggtgcccggcgcctcgggtcaacattccccgggtgtcgactacgaccgagagcaggtggacttgtccctgcctcgggacctgcccctggtcccgctcaactgagatgttatgctggacgcctggccggactgagcgccgccctactgcgtacggattcattcgtgggtgggcggtggttgcccgccgcagccactttcccagttcaagatccagcctctggagcagcactgggtatggtggccgactgcggcgtccgggaagcaagagccgcagtccgggccgcctacgaggcgttttgtcgctggagggaagtatccgctaaagagcggagctcgctgctgcgcaagtggtataatctgatgattcaaaacaaggatgatctggcaagaatcattaccgctgaatcgggaaagccccttaaagaggctcatggtgagatcctttactccgctttcttcctagagtggttcagcgaagaggccagacgcgtgtatggtgatattatccacacccctgccaaagacaggcgcgccctggtgctgaagcagcctatcggcgtcgcagcggtgattacaccctggaattttccttccgcgatgattacccggaaggttggtgcggccctcgcagccgggtgcactgtcgtggtgaaacctgccgaagacactcctttttccgcgttggccctagcagaggttaaccaaggattcctgttggacctcgacccccttttacttgcctcccaggctggcataccttccggagtgtacaatgtaataccctgtagtcggaagaatgcaaaagaagtgggcgaggccatatgcaccgatcctctcgtcagtaaaatttcgtttacaggctcaacaacgactggaaaaattctgctgcatcatgccgcaaactctgttaagcgggttagtatggagctggggggcttagccccctttattgtgtttgactctgccaacgttgaccaagctgtggctggcgctatggcatccaagttccgaaatactggccagacatgcgtctgcagcaatcaattcttggtgcagcgaggcatccatgatgctttcgtgaaagcatttgccgaagctatgaagaagaatctgcgagtgggaaacggcttcgaggaggggaccacacagggccctctgattaatgagaaggcggttgagaaagtagagaagcaagttaacgacgccgtctccaagggggcgacagtcgtcacaggggggaaacgccatcaactaggcaagaacttctttgagcctaccttgctctgcaacgtgactcaggatatgttatgtacacacgaagaaacttttggtcctctcgccccagttatcaaattcgatacagaagaggaagcaatagccatagctaacgcagcggatgttggactggccggatatttttactcccaggaccctgcacagatctggcgcgtagccgagcagcttgaggttggtatggtgggtgttaatgagggactgatcagttcagtcgagtgccctttcgggggagtgaaacaaagcggcctggggagagagggttcaaagtacggaatcgatgagtacttggaactgaaatatgtatgttatggaggattgtag

SEQ ID NO: 247287 - DNA, 1647 bp, Artificial Sequence
  derived and/or modified sequence
atggccacctgcatctggctgcggagctgtggggcccggcggctgggcagcaccttccctggctgccgcctgcggccccgggccggcggcctggtgcctgccagcggccctgcccctggccctgcccagctgcgctgctacgccggccgcctggccggcctgtctgctgccctgctgaggacagacagctttgtgggcggccgctggctgcctgctgctgccaccttccctgtgcaggaccctgccagcggggccgccctgggcatggtggccgactgtggggtgcgggaggcccgggctgctgtgcgggccgcctatgaggccttctgccgctggagggaggtgtctgccaaggagaggagcagcctgctgaggaagtggtacaacctgatgatccagaacaaggatgacctggcccgcatcatcacagctgagagcggcaagcccctgaaggaggcccacggggagatcctgtacagcgccttcttcctggagtggttcagcgaggaggcccggcgggtgtatggagacatcatccacaccccagccaaggaccggcgggccctggtgctgaagcagcccatcggcgtggccgctgtgatcaccccctggaacttccccagcgccatgatcaccaggaaggtgggcgccgccctggccgccggctgcaccgtggtggtgaagccagctgaggacacccccttcagcgccctggccctggccgaggtgaaccagggcttcctgctggacctggaccccctgctgctggccagccaggccggcatccccagcggcgtgtacaacgtcatcccctgcagcaggaagaatgccaaggaggtgggggaggccatctgcacagaccccctggtgtccaagatctccttcaccggcagcaccaccaccgggaagatcctgctgcaccacgccgccaacagcgtgaagagggtgtccatggagctgggcggcctggcccccttcatcgtgtttgattctgccaacgtggaccaggccgtggccggggccatggccagcaagttcaggaacacaggccagacctgtgtgtgcagcaaccagttcctggtgcagaggggcatccatgatgcctttgtgaaggcctttgctgaggccatgaagaagaacctgcgggtgggcaatggatttgaggagggcaccacccagggccccctcatcaatgagaaggctgtggagaaggtggagaagcaggtgaatgatgctgtgtccaaaggagccaccgtggtgactggaggcaagaggcaccagctgggcaagaacttctttgagcccaccctgctgtgcaatgtgacccaggacatgctgtgcacccatgaggagaccttcggccccctggcccctgtgatcaagtttgacacagaggaggaggccatcgccatcgccaatgctgctgatgtgggcctggccggctacttctacagccaggaccctgcccagatctggagggtggccgagcagctggaggtgggcatggtgggcgtgaatgaaggcctcatcagctctgtggagtgcccctttggaggagtgaagcagagcggcctgggccgggagggcagcaaatatggaattgatgagtacctggagctgaagtatgtgtgctatggaggcctgtag

SEQ ID NO: 247288 - DNA, 2266 bp, Artificial Sequence
  derived and/or modified sequence
gtttcctgtcgccgtcgttgcccgggccatggcgacctgcatttggctgcggagctgtggggcccggcgcctcgggtcgacgtttccaggctgccgcctccgcccccgcgccggcggcctggtccctgcctccgggcctgcgcccggcccggcccagctccgctgctacgctgggcgcctggcgggcctctctgcggcgctgctgcgcaccgacagcttcgtgggcggccgctggctcccggccgccgccaccttccccgtgcaagacccggccagcggcgccgctctgggcatggtagccgactgcggggtgcgagaggcccgcgccgccgtgcgcgctgcctacgaggctttctgccgctggagggaggtctccgccaaggagaggagttcattacttcggaagtggtacaatttaatgatacaaaataaggatgaccttgccagaataatcacagctgaaagtggaaagccactgaaggaggcacatggagaaattctctattccgcctttttcctagagtggttctctgaggaagcccgccgtgtttacggagacattatccacaccccggcaaaggacaggcgggccctggtcctcaagcagcccataggcgtggctgcagtcatcaccccgtggaatttccccagtgccatgatcacccggaaggtgggggccgccctggcagccggctgtactgtcgtggtgaagcctgccgaagacacgcccttctccgccctggccctggctgaggtaaatcagggatttcttcttgatttggatccattgttgcttgcaagccaggctgggattccttcaggtgtatacaatgttattccctgttctcgaaagaatgccaaggaagtaggggaggcaatttgtactgatcctctggtgtccaaaatttcctttactggttcaacaactacaggaaagatcctgttgcaccacgcagcaaactctgtgaaaagggtctctatggagctgggcggccttgctccatttatagtatttgacagtgccaacgtggaccaggctgtagcaggggccatggcatctaaatttaggaacactggacagacttgtgtttgctcaaaccaattcttggtgcaaaggggcatccatgatgcctttgtaaaagcattcgccgaggccatgaagaagaacctgcgcgtaggtaatggatttgaggaaggaactactcagggcccattaattaatgaaaaagcggtagaaaaggtggagaaacaggtgaatgatgccgtttctaaaggtgccaccgttgtgacaggtggaaaacgacaccaacttggaaaaaatttctttgagcctaccctgctgtgcaatgtcacccaggacatgctgtgcactcatgaagagactttcgggcctctggcaccagttatcaagttcgatacagaggaggaggctatagcaatcgctaacgcagctgatgttgggttagcaggttatttttactctcaagacccagcccagatctggagagtggcagagcagctggaagtgggcatggttggcgtcaacgaaggattaatttcctctgtggagtgcccttttggtggagtgaagcagtccggccttgggcgagaggggtccaagtatggcattgatgagtatctggaactcaagtatgtgtgttacgggggcttgtaggattctttggttctttaaaaaaatttaaaaggagacttatctacatatataggtacatgccatccattattttaaataaactaataggttttcagaattatgaatttttcagaactcatccagtccttgtaatcttaaacagatgcaaatcctacccctgcccttaatgtaactagggaccaatatgtgccacgtgcctgtggctgcagactcccagagaaccagcactgggtttacagaatgaggccctggctccccaccacagccccagctgcctcagagcaggcacagcacaaggcaggcccagccccatgggccgtcacaaaggcttgatcactgcctgggcagtggcacaaccatcccccatgtcgctacagaacatgggcccagagcaccttgaaggagacccttgactgtgactggcaggcaggtgaggggcacagcacccctccccggcatctgccagctcagcacagaagacaccgaatgtgcatctggaggtgttgcggcagaggtttgagtgaaccctctttcaaagacaataaatagcacagaattgtccgtgcttctgtgaggcacgaaggagcacct

SEQ ID NO: 247289 - DNA, 1647 bp, Artificial Sequence
  derived and/or modified sequence
atggccacctgcatctggctgcggagctgcggcgcccggcggctgggctctacctttcccgggtgtagactgcgacccagggcaggtggattagtgcctgcctcggggccagcgcctggaccagctcagctcaggtgttacgcagggcgattagcagggttatccgccgcactcttaaggacggactcattcgttggaggaaggtggctcccagccgccgccacgtttcccgtacaggaccctgcttccggtgctgccttgggaatggttgctgattgcggcgtccgggaggccagggcggcagttagggcggcctatgaggctttctgccgatggagagaagtcagcgccaaagaaagaagctccctgctgcgcaagtggtataaccttatgatacaaaataaggatgatctggcacgtatcatcactgccgagtctggaaaacccctgaaagaagcccacggcgagattctgtattctgccttcttcctcgagtggttcagtgaagaggccagacgcgtatacggagatataatccatacgcctgcgaaagaccgacgggcccttgtgttgaagcaacccatcggcgtggccgcagttatcacaccatggaatttcccaagcgcaatgattacaaggaaggttggagctgcactagccgcgggatgtaccgtcgtagttaaaccagcagaggacaccccattttctgccttggctctcgcggaggtcaaccagggtttcttgcttgaccttgaccccctccttctagcttcccaggcaggcatcccttcaggcgtgtacaacgtcattccctgcagtcggaagaatgctaaggaagtgggcgaggcaatttgtaccgacccgctggtctctaaaatcagttttaccggatccacgactaccggcaagatcctccttcaccatgcggctaacagtgtaaagagggtctcaatggagttgggcggcctcgcgccatttattgttttcgattcagccaatgtcgatcaggcagtggcaggagccatggcctctaaattccgtaatacgggccaaacttgtgtctgttccaaccagtttcttgttcagcgcgggatccatgacgcatttgtgaaggcatttgctgaagcaatgaagaaaaatctccgcgtcggaaatgggtttgaagaaggaacgacccaagggccactgatcaacgagaaggctgtcgagaaggttgagaaacaggttaatgacgcagtgagcaaaggagccaccgtcgtgacagggggtaagcgtcaccagctcgggaagaatttcttcgaacccacactcctgtgcaatgtgactcaagacatgctttgtacccatgaggaaacctttggcccactggcccccgtcatcaagttcgatacagaggaggaggccatagccatagctaacgcggctgatgtcggcctagccgggtacttttattcccaagaccctgcccaaatctggcgtgtggccgaacagctggaagtgggcatggtgggcgttaacgaggggctcatttcatctgtcgaatgtcccttcggaggcgtgaaacagagcggcctggggagagaaggaagcaaatacgggattgacgagtatctggagctgaagtacgtgtgttacgggggcctgtag

SEQ ID NO: 247290 - DNA, 1647 bp, Artificial Sequence
  derived and/or modified sequence
atggccacctgcatttggctacgatcctgcggcgcacgccgtttggggagcacattccccggttgccgcctccggccacgggctggaggattggtgcccgctagcgggccagcaccaggacctgcacagctccgttgctacgcagggaggctggccggtctcagtgctgccttgttgcgcactgactctttcgtgggcggacgctggctgcccgcagctgctaccttcccagtgcaagaccccgcatccggggcagccctggggatggtggcggattgtggcgtacgagaagctcgcgctgcagttagagccgcttatgaggccttctgccgttggcgcgaggtaagtgccaaggaacgctccagtctgcttcgcaagtggtataacctgatgatacagaacaaggacgatctggcaaggattatcacagcggagtctggcaagcccctcaaggaggctcatggggagatcctctacagcgcattctttctggaatggtttagcgaggaagcgaggcgtgtctacggggatattatccatactccagctaaagatcgaagagcgctggtattgaagcagccgatcggtgtggccgcagtgatcacaccatggaactttcccagcgccatgatcacgcggaaggttggagctgccctggccgctgggtgcacagtcgtcgtaaaaccagctgaagataccccattttcagccttggcactagcagaagttaaccaaggctttttactggacctggacccactcttgctcgcctcccaggctggcatcccgtctggtgtatacaacgtgataccctgctccaggaagaatgcaaaagaggtcggggaagccatctgcacggatccactcgtctcaaaaatttcatttacaggctcaactactacaggcaagattctcttacaccacgcagcgaacagcgtcaaaagagtttcaatggagttgggtggactggcacccttcattgtatttgactcggctaatgtcgatcaagccgttgccggtgccatggcttccaaattccgaaacactgggcagacctgcgtgtgctcgaaccaatttctcgtgcagcgcggaatccatgacgcgttcgtgaaggccttcgccgaagctatgaagaaaaatttgagagtcggaaatgggttcgaagagggaacgacacaggggccattaatcaatgaaaaagcggtagagaaagtggaaaaacaagtgaatgatgctgtcagtaagggcgctacagtagtgactgggggaaagaggcaccagctcggaaagaacttttttgagccaactttgctgtgtaacgttacacaggatatgctgtgtacgcatgaggaaacgttcggtcctctagcccctgtcatcaagttcgacaccgaggaagaggcgattgccatcgccaatgctgcagacgtggggctcgcagggtatttctattctcaggatcccgctcagatttggcgcgtggcggaacagctggaggtgggtatggtgggtgttaatgagggcctcatcagtagtgtcgaatgccccttcggcggagtcaaacaatccggcctcggaagagaaggatcgaagtatggtatagatgaatacctggagttaaaatacgtctgctatggtgggctctag

SEQ ID NO: 247291 - DNA, 1647 bp, Artificial Sequence
  derived and/or modified sequence
atggccacctgcatctggctgagaagctgcggcgccagaagactgggcagcaccttccccggctgcagactgagacccagagccggcggcctggtgcccgccagcggccccgcccccggccccgcccagctgagatgctacgccggcagactggccggcctgagcgccgccctgctgagaaccgacagcttcgtgggcggcagatggctgcccgccgccgccaccttccccgtgcaggaccccgccagcggcgccgccctgggcatggtggccgactgcggcgtgagagaggccagagccgccgtgagagccgcctacgaggccttctgcagatggagagaggtgagcgccaaggagagaagcagcctgctgagaaagtggtacaacctgatgatccagaacaaggacgacctggccagaatcatcaccgccgagagcggcaagcccctgaaggaggcccacggcgagatcctgtacagcgccttcttcctggagtggttcagcgaggaggccagaagagtgtacggcgacatcatccacacccccgccaaggacagaagagccctggtgctgaagcagcccatcggcgtggccgccgtgatcaccccctggaacttccccagcgccatgatcaccagaaaggtgggcgccgccctggccgccggctgcaccgtggtggtgaagcccgccgaggacacccccttcagcgccctggccctggccgaggtgaaccagggcttcctgctggacctggaccccctgctgctggccagccaggccggcatccccagcggcgtgtacaacgtgatcccctgcagcagaaagaacgccaaggaggtgggcgaggccatctgcaccgaccccctggtgagcaagatcagcttcaccggcagcaccaccaccggcaagatcctgctgcaccacgccgccaacagcgtgaagagagtgagcatggagctgggcggcctggcccccttcatcgtgttcgacagcgccaacgtggaccaggccgtggccggcgccatggccagcaagttcagaaacaccggccagacctgcgtgtgcagcaaccagttcctggtgcagagaggcatccacgacgccttcgtgaaggccttcgccgaggccatgaagaagaacctgagagtgggcaacggcttcgaggagggcaccacccagggccccctgatcaacgagaaggccgtggagaaggtggagaagcaggtgaacgacgccgtgagcaagggcgccaccgtggtgaccggcggcaagagacaccagctgggcaagaacttcttcgagcccaccctgctgtgcaacgtgacccaggacatgctgtgcacccacgaggagaccttcggccccctggcccccgtgatcaagttcgacaccgaggaggaggccatcgccatcgccaacgccgccgacgtgggcctggccggctacttctacagccaggaccccgcccagatctggagagtggccgagcagctggaggtgggcatggtgggcgtgaacgagggcctgatcagcagcgtggagtgccccttcggcggcgtgaagcagagcggcctgggcagagagggcagcaagtacggcatcgacgagtacctggagctgaagtacgtgtgctacggcggcctgtag

SEQ ID NO: 247292 - protein, 945 aa, Artificial Sequence
  derived and/or modified sequence
MGARSGARGALLLALLLCWDPRLSQAGTDSGSEVLPDSFPSAPAEPLPYFLQEPQDAYIVKNKPVELRCRAFPATQIYFKCNGEWVSQNDHVTQEGLDEATGLRVREVQIEVSRQQVEELFGLEDYWCQCVAWSSAGTTKSRRAYVRIAYLRKNFDQEPLGKEVPLDHEVLLQCRPPEGVPVAEVEWLKNEDVIDPTQDTNFLLTIDHNLIIRQARLSDTANYTCVAKNIVAKRRSTTATVIVYVNGGWSSWAEWSPCSNRCGRGWQKRTRTCTNPAPLNGGAFCEGQAFQKTACTTICPVDGAWTEWSKWSACSTECAHWRSRECMAPPPQNGGRDCSGTLLDSKNCTDGLCMQNKKTLSDPNSHLLEASGDAALYAGLVVAIFVVVAILMAVGVVVYRRNCRDFDTDITDSSAALTGGFHPVNFKTARPSNPQLLHPSVPPDLTASAGIYRGPVYALQDSTDKIPMTNSPLLDPLPSLKVKVYSSSTTGSGPGLADGADLLGVLPPGTYPSDFARDTHFLHLRSASLGSQQLLGLPRDPGSSVSGTFGCLGGRLSIPGTGVSLLVPNGAIPQGKFYEMYLLINKAESTLPLSEGTQTVLSPSVTCGPTGLLLCRPVILTMPHCAEVSARDWIFQLKTQAHQGHWEEVVTLDEETLNTPCYCQLEPRACHILLDQLGTYVFTGESYSRSAVKRLQLAVFAPALCTSLEYSLRVYCLEDTPVALKEVLELERTLGGYLVEEPKPLMFKDSYHNLRLSLHDLPHAHWRSKLLAKYQEIPFYHIWSGSQKALHCTFTLERHSLASTELTCKICVRQVEGEGQIFQLHTTLAETPAGSLDTLCSAPGSTVTTQLGPYAFKIPLSIRQKICNSLDAPNSRGNDWRMLAQKLSMDRYLNYFATKASPTGVILDLWEALQQDDGDLNSLASALEEMGKSEMLVAVATDGDC

SEQ ID NO: 247293 - DNA, 2838 bp, Artificial Sequence
  derived and/or modified sequence
atgggcgccagaagcggcgccagaggcgccctgctgctggccctgctgctgtgctgggaccccagactgagccaggccggcaccgacagcggcagcgaggtgctgcccgacagcttccccagcgcccccgccgagcccctgccctacttcctgcaggagccccaggacgcctacatcgtgaagaacaagcccgtggagctgagatgcagagccttccccgccacccagatctacttcaagtgcaacggcgagtgggtgagccagaacgaccacgtgacccaggagggcctggacgaggccaccggcctgagagtgagagaggtgcagatcgaggtgagcagacagcaggtggaggagctgttcggcctggaggactactggtgccagtgcgtggcctggagcagcgccggcaccaccaagagcagaagagcctacgtgagaatcgcctacctgagaaagaacttcgaccaggagcccctgggcaaggaggtgcccctggaccacgaggtgctgctgcagtgcagaccccccgagggcgtgcccgtggccgaggtggagtggctgaagaacgaggacgtgatcgaccccacccaggacaccaacttcctgctgaccatcgaccacaacctgatcatcagacaggccagactgagcgacaccgccaactacacctgcgtggccaagaacatcgtggccaagagaagaagcaccaccgccaccgtgatcgtgtacgtgaacggcggctggagcagctgggccgagtggagcccctgcagcaacagatgcggcagaggctggcagaagagaaccagaacctgcaccaaccccgcccccctgaacggcggcgccttctgcgagggccaggccttccagaagaccgcctgcaccaccatctgccccgtggacggcgcctggaccgagtggagcaagtggagcgcctgcagcaccgagtgcgcccactggagaagcagagagtgcatggccccccccccccagaacggcggcagagactgcagcggcaccctgctggacagcaagaactgcaccgacggcctgtgcatgcagaacaagaagaccctgagcgaccccaacagccacctgctggaggccagcggcgacgccgccctgtacgccggcctggtggtggccatcttcgtggtggtggccatcctgatggccgtgggcgtggtggtgtacagaagaaactgcagagacttcgacaccgacatcaccgacagcagcgccgccctgaccggcggcttccaccccgtgaacttcaagaccgccagacccagcaacccccagctgctgcaccccagcgtgccccccgacctgaccgccagcgccggcatctacagaggccccgtgtacgccctgcaggacagcaccgacaagatccccatgaccaacagccccctgctggaccccctgcccagcctgaaggtgaaggtgtacagcagcagcaccaccggcagcggccccggcctggccgacggcgccgacctgctgggcgtgctgccccccggcacctaccccagcgacttcgccagagacacccacttcctgcacctgagaagcgccagcctgggcagccagcagctgctgggcctgcccagagaccccggcagcagcgtgagcggcaccttcggctgcctgggcggcagactgagcatccccggcaccggcgtgagcctgctggtgcccaacggcgccatcccccagggcaagttctacgagatgtacctgctgatcaacaaggccgagagcaccctgcccctgagcgagggcacccagaccgtgctgagccccagcgtgacctgcggccccaccggcctgctgctgtgcagacccgtgatcctgaccatgccccactgcgccgaggtgagcgccagagactggatcttccagctgaagacccaggcccaccagggccactgggaggaggtggtgaccctggacgaggagaccctgaacaccccctgctactgccagctggagcccagagcctgccacatcctgctggaccagctgggcacctacgtgttcaccggcgagagctacagcagaagcgccgtgaagagactgcagctggccgtgttcgcccccgccctgtgcaccagcctggagtacagcctgagagtgtactgcctggaggacacccccgtggccctgaaggaggtgctggagctggagagaaccctgggcggctacctggtggaggagcccaagcccctgatgttcaaggacagctaccacaacctgagactgagcctgcacgacctgccccacgcccactggagaagcaagctgctggccaagtaccaggagatccccttctaccacatctggagcggcagccagaaggccctgcactgcaccttcaccctggagagacacagcctggccagcaccgagctgacctgcaagatctgcgtgagacaggtggagggcgagggccagatcttccagctgcacaccaccctggccgagacccccgccggcagcctggacaccctgtgcagcgcccccggcagcaccgtgaccacccagctgggcccctacgccttcaagatccccctgagcatcagacagaagatctgcaacagcctggacgcccccaacagcagaggcaacgactggagaatgctggcccagaagctgagcatggacagatacctgaactacttcgccaccaaggccagccccaccggcgtgatcctggacctgtgggaggccctgcagcaggacgacggcgacctgaacagcctggccagcgccctggaggagatgggcaagagcgagatgctggtggccgtggccaccgacggcgactgctag

SEQ ID NO: 247294 - DNA, 2838 bp, Artificial Sequence
  derived and/or modified sequence
atgggagctagaagcggggctcgcggcgcgctgctgcttgctcttttgttatgctgggatccacgcctaagccaggccgggacagatagtggaagtgaagtcctccctgactccttccctagcgcccctgccgaaccattgccatactttctgcaggaaccccaggacgcttatatagtgaaaaataagccagtggaactacggtgtcgagcgtttccagctacccagatctacttcaagtgcaatggagaatgggtgagccagaatgatcacgtgacccaggagggcttggacgaggcaaccggacttcgagtgagagaggtccaaattgaggtctccaggcagcaggtggaagagctcttcgggctggaggattattggtgtcagtgcgtggcttggtcgtccgctggcacaaccaagtcccgtcgggcatatgtgcgaatcgcttaccttaggaaaaacttcgatcaggagccactaggtaaggaggtcccactggatcatgaggtgttacttcagtgtcggcctcccgagggagtgccagttgcggaagtggagtggttaaaaaacgaagacgttattgaccccacacaggacacaaacttcttgctcacaattgatcataatcttattattaggcaggcccgactgtcagatactgcgaactacacttgcgtcgcgaagaatatcgtcgcaaagcgaagatccaccaccgctacggtaattgtgtatgtgaatgggggatggtcgagttgggcagagtggagtccatgcagtaatcggtgtggccgcggatggcaaaagagaacaaggacctgcacaaatcctgcgcctttgaacggcggggctttttgcgaaggtcaggccttccagaaaactgcctgcacaactatttgccctgtcgacggagcctggactgagtggagtaagtggagtgcgtgctcaacagagtgcgcgcactggcgtagcagggaatgcatggcccctccaccccagaatggaggaagagattgctctgggacccttctggacagtaaaaattgcactgatggcctgtgcatgcagaacaaaaaaacactcagcgaccctaacagccatctcctggaagctagcggagacgcggcgctatacgcaggactcgtggtggccatttttgtggtcgtggcaatcctcatggccgtcggcgtagtcgtttaccgacgaaattgtagggattttgacaccgacatcacagattcctcagcagctctcactggcggattccacccggtaaatttcaaaacagctagaccatccaatcctcaattgcttcatccttccgtgcctccagacctgactgcatccgctggaatctaccgaggaccagtgtacgccctgcaggattccactgacaaaatccccatgaccaatagccccctgctggatcctctgccctccctgaaagtgaaggtctacagctcatctacaaccggctctggacccgggctcgccgatggtgccgatctgttgggggtgttacctcccgggacttaccctagtgacttcgccagagacactcatttcctgcatctcagaagtgcttctctcggctcccagcagctgcttggactccccagagatccaggctcttccgtttcaggcaccttcggatgcctcggaggaagactttctatccccgggacaggggtgagccttcttgtccctaacggcgcgattcctcagggtaaattctacgaaatgtacttacttatcaacaaggctgaatccaccctgcccctaagtgagggtacacaaacggtgctgtccccctcagtgacctgtggcccaacgggtctcctgttgtgtaggcctgtgatcctgaccatgccccactgtgccgaggtcagcgctcgcgactggatctttcagcttaaaacacaggctcatcaggggcattgggaagaggtcgttactttagacgaagaaacactcaataccccatgttactgccaactcgagcctagggcctgtcacatactgctggaccagctgggcacctatgtgtttacaggagagagctactcacgctctgccgttaaaaggctgcagctggccgtcttcgctccagccctatgtacttcccttgagtattcactgagggtgtattgcctggaagatactcctgtcgcactcaaagaggtgctggagctcgagcgcaccctgggtggctacctcgtggaggagcccaaacccttgatgtttaaagactcctatcacaacctgcgcctgtcactccacgatctgccccatgcccactggaggtccaaattgctggcaaagtaccaggagataccattctaccacatctggagtgggagtcagaaagcactccactgcacattcaccctggagaggcattcgctcgctagcaccgagctgacgtgtaaaatatgcgtcagacaggtcgagggcgaagggcagatattccaactgcacacaacactcgccgaaacaccagcgggttctcttgacactctctgctctgctcctggtagcaccgtgactacacaacttggaccatacgcttttaaaatccctttatcaattcggcaaaaaatttgcaattctctagacgccccgaattccaggggaaatgattggagaatgctggcccaaaaactttctatggatagatatctcaactattttgctactaaggcctcacccaccggcgtgatcctggatctatgggaagccctacaacaggacgatggcgatctgaacagcctggcgtctgccttggaggagatgggcaaaagcgagatgctggtcgctgtcgccactgacggggactgttag

SEQ ID NO: 247295 - DNA, 2838 bp, Artificial Sequence
  derived and/or modified sequence
atgggcgcccggagcggggcccggggggccctgctgctggccctgctgctgtgctgggacccccggctgagccaggccggcacagacagcggcagcgaggtgctgcctgacagcttccccagcgccccagctgagcccctgccctacttcctgcaggagccccaggatgcctacatcgtgaagaacaagcctgtggagctgcgctgccgggccttccctgccacccagatctacttcaagtgcaatggagagtgggtgtcccagaatgaccacgtgacccaggagggcctggatgaggccaccggcctgcgggtgcgggaggtgcagatcgaggtgtcccggcagcaggtggaggagctgtttggcctggaggactactggtgccagtgtgtggcctggagcagcgctggcaccaccaagagccggcgggcctacgtgcgcatcgcctacctgaggaagaactttgaccaggagcccctgggcaaggaggtgcccctggaccacgaggtgctgctgcagtgccggcccccagagggcgtgcctgtggccgaggtggagtggctgaagaatgaagatgtgattgaccccacccaggacaccaacttcctgctgaccatcgaccacaacctgatcatccggcaggcccggctgagtgacacagccaactacacctgtgtggccaagaacatcgtggccaagaggaggagcaccacagccaccgtcatcgtgtatgtgaatggaggctggagctcctgggccgagtggagcccctgcagcaacagatgtggccggggctggcagaagaggaccaggacctgcaccaacccagcccccctgaatggaggagccttctgtgagggccaggccttccagaagacagcctgcaccaccatctgccctgtggatggagcctggacagagtggagcaagtggagcgcctgcagcacagaatgtgcccactggaggagccgggagtgcatggcccccccaccccagaatggaggccgggactgcagcggcaccctgctggacagcaagaactgcacagatggcctgtgcatgcagaacaagaagaccctgagtgaccccaacagccacctgctggaggccagcggagatgctgccctgtatgccggcctggtggtggccatctttgtggtggtggccatcctgatggctgtgggcgtggtggtgtacagaagaaactgccgggactttgacacagacatcacagacagcagcgctgccctgaccggcggcttccaccctgtgaacttcaagacagcccggcccagcaacccccagctgctgcaccccagcgtgcccccagacctgacagccagcgctggcatctaccggggccctgtgtatgccctgcaggacagcacagacaagatccccatgaccaacagccccctgctggaccccctgcccagcctgaaggtgaaggtgtacagcagcagcaccaccggcagcggccctggcctggctgatggagctgacctgctgggcgtgctgcccccaggcacctaccccagcgactttgcccgggacacccacttcctgcacctgcggagcgccagcctgggcagccagcagctgctgggcctgccccgggaccccggcagctctgtgtctggcaccttcggctgcctgggcggccgcctgagcatccctggcactggagtgtccctgctggtgcccaatggagccatcccccagggcaagttctatgagatgtacctgctgatcaacaaggccgagagcaccctgcccctgtctgagggcacccagacagtgctgagccccagcgtgacctgtggccccaccggcctgctgctgtgcaggcctgtgatcctgaccatgccccactgtgccgaggtgtctgcccgggactggatcttccagctgaagacccaggcccaccagggccactgggaggaggtggtgaccctggatgaggagaccctgaacaccccctgctactgccagctggagccccgggcctgccacatcctgctggaccagctgggcacctacgtgttcaccggggagagctacagccgctctgctgtgaagaggctgcagctggccgtgtttgccccagccctgtgcaccagcctggagtacagcctgcgggtgtactgcctggaggacacccctgtggccctgaaggaggtgctggagctggagaggaccctgggcggctacctggtggaggagcccaagcccctgatgttcaaggacagctaccacaacctgcggctgagcctgcatgacctgccccacgcccactggaggagcaagctgctggccaagtaccaggagatccccttctaccacatctggagcggcagccagaaggccctgcactgcaccttcaccctggagcggcacagcctggccagcacagagctgacctgcaagatctgtgtgcggcaggtggagggggagggccagatcttccagctgcacaccaccctggccgagaccccagctggcagcctggacaccctgtgcagcgcccctggcagcacagtgaccacccagctgggcccctatgccttcaagatccccctgagcatccggcagaagatctgcaacagcctggatgcccccaacagcagaggaaatgactggaggatgctggcccagaagctgtccatggaccgctacctgaactactttgccaccaaggccagccccactggagtcatcctggacctgtgggaggccctgcagcaggatgatggagacctgaacagcctggccagcgccctggaggagatgggcaagtctgagatgctggtggccgtggccacagatggagactgctag

SEQ ID NO: 247296 - DNA, 2838 bp, Artificial Sequence
  derived and/or modified sequence
atgggcgcccggagcggcgcccggggcgccctgctgctggccctgctgctgtgctgggacccccgactgagtcaggccgggacggactctggaagtgaggtgctgccagactcattccccagcgccccagccgaaccactgccctacttccttcaggaacctcaggatgcctatatagtaaaaaataaacccgtggagctccggtgcagagccttcccggccacgcagatatatttcaagtgcaacggggagtgggtgtcccagaatgaccatgtaactcaggaaggcctcgatgaagctacaggcctcagagtgcgagaggtgcagatcgaggtttcacggcagcaggtcgaagaattgtttgggctggaagactactggtgtcagtgcgtcgcctggagcagtgccgggactactaaatcaaggcgcgcctacgtgagaatcgcctacctgcgaaaaaattttgaccaggagccactggggaaggaggtgcccctcgatcatgaagtcttgttgcagtgtcgtccacccgagggcgtgccggttgcagaggtggagtggctgaagaacgaggacgttatagaccccacccaggacaccaattttctcctgacaatcgaccacaacctgattattagacaggcgagactaagtgacaccgctaattatacctgcgtggcgaagaacatagtggccaagcgccgcagcaccaccgctacggtgatcgtgtatgtcaatggaggatggtcttcctgggccgagtggtctccttgtagtaatcggtgtggcagagggtggcagaaacgaacacgaacctgcaccaatcctgcaccattaaacggaggcgctttctgtgaaggtcaagcctttcagaaaactgcctgcacaacaatctgccccgttgatggagcatggaccgagtggagcaaatggagcgcctgctcaaccgaatgtgctcactggagaagccgagaatgtatggcccccccgccacagaacggcggaagggattgctcgggcacccttcttgactctaagaactgtacggatggactctgtatgcagaataagaagacattatctgatcccaacagccacctattagaagcctctggagatgccgccctctacgcagggttagttgttgctattttcgtggtagttgccattctgatggccgtgggggtggtggtctacaggcggaattgtagagatttcgacacagatattacagatagctccgcggccttaacagggggatttcaccctgtgaactttaaaacagcacgcccgagcaatcctcagctgcttcatcctagcgtgcctccagacttgactgccagtgccggcatctaccgcggacccgtttacgcattgcaagacagcacagacaagattcctatgaccaatagccctctgctggaccctctgccatctttaaaagtgaaggtctactccagctccacaacagggagtggcccggggcttgctgatggtgctgatctgttgggcgtcctgccccctgggacctacccctctgacttcgcacgggatacccacttcctgcatctgaggtcagcctccctgggctcacagcagctcctgggactccctcgagatcccggcagctcagtttcaggcacttttggatgtctggggggtaggctctcaattcccgggaccggggttagcttattagtacctaacggggccatcccccagggcaaattctatgagatgtacctgttgattaataaggctgagtccacccttccgctcagcgaagggacccagactgtccttagtcccagcgtcacctgtggacccacaggactgctcttatgcagaccagtgatactgactatgcctcattgtgccgaagtctcagcgcgagattggatcttccagctcaagacccaggcccatcaaggccattgggaggaggtggtgacccttgatgaggagacactgaataccccttgctactgtcagctcgaaccacgggcttgccacatacttctagaccaactggggacctacgtgttcacaggtgagtcctactcccggagcgcagtgaagagactgcagctagccgtttttgctcccgccttgtgtacttccctcgaatactccctcagggtctactgcttggaggataccccagttgcactgaaggaggttctcgagctggaacgcacactcggagggtatctggtcgaagaacccaaacctcttatgttcaaggatagttatcataatctgcggctatctttacacgacctgccccatgctcattggcggtcgaagctactggctaaatatcaggagattcctttttaccacatctggtccggatcccaaaaggcattgcactgcactttcaccttggaaaggcatagcttggcctccactgaactaacttgcaaaatctgcgtgcggcaagtcgagggggagggtcagatattccaattgcacaccactctggcagagactcctgctggctcactcgacactctgtgctcagcacctggctctacagttacaacacagcttggtccgtacgctttcaagatccccctcagtattcgtcagaaaatctgtaactctctcgacgctcccaactcgcgtggtaacgattggaggatgttagctcaaaaactgagcatggaccgatatctgaactattttgccacaaaagctagccccaccggcgtaattcttgatctgtgggaggccctacaacaagacgatggtgatctgaacagcctggcctcagccctggaggagatggggaagtctgaaatgctggtagccgtggccactgatggagactgctag

SEQ ID NO: 247297 - DNA, 2838 bp, Artificial Sequence
  derived and/or modified sequence
atgggtgcaagatctggggcaagaggcgcactgctgttagcactactcttgtgttgggaccccaggcttagtcaagcaggcactgattccgggagcgaagtcttacctgacagtttcccttctgccccagccgagccgctgccatattttctacaggagccacaagacgcgtatatagtgaaaaataagccagtcgaattacggtgtcgtgctttccctgccactcagatctacttcaaatgcaacggtgaatgggtcagccaaaatgaccatgttactcaggaggggttggacgaggccaccggtctgcgggtgcgagaggtgcaaattgaggtgtcaagacagcaggttgaggaactgtttgggctggaggattattggtgccagtgcgttgcgtggtcttccgcgggaacgactaaatctagacgcgcttacgtgcgcatcgcgtacctccgcaagaacttcgaccaggagccactggggaaagaggtcccacttgatcatgaggtgctcctccaatgcaggcctccagaaggcgtcccggtggccgaggtggaatggctgaagaatgaagacgttatcgatccaacacaagacactaactttctactgaccatcgaccacaaccttataatccgacaggctcgcctgagcgacaccgccaattatacttgcgtggcaaaaaacatcgtggctaagagaaggtcaactacagcaacggtcatcgtgtacgtgaacggcggatggagttcatgggccgagtggagcccttgcagtaatcggtgtggcaggggctggcagaagaggacccgaacctgcactaatcctgcccctctcaatggtggggctttctgtgagggtcaggctttccaaaagaccgcttgcactactatctgtccggtcgatggcgcttggactgagtggagcaagtggtctgcgtgctctaccgaatgcgctcactggaggtctcgtgaatgtatggcacctccgcctcagaatggcggtcgggactgctcgggaaccctcctggactccaagaattgcacggatggcctgtgcatgcaaaataaaaagaccctctccgacccaaactctcaccttctagaggcaagcggggacgctgcactgtacgccggacttgtcgtggcaattttcgtcgtggtggcaattctcatggccgtgggtgttgtggtgtatagaagaaattgcagagactttgatactgacatcactgatagcagcgcagcacttacagggggattccatcccgtcaatttcaagacagctcgccctagtaacccacagttgctgcatccctccgtgccacctgacctaacggcctctgctgggatctaccggggaccagtctatgccctccaggactctacggacaagatcccaatgaccaatagtccactcctggacccactgccgagcctcaaggtaaaggtttattcctctagcactaccgggtcaggacctggactagccgatggcgcagatctgcttggtgtcttaccccctggcacatacccaagtgacttcgcgagggacacacatttcctgcacctcaggagcgcatcattaggatcacaacagcttctgggcctgccgcgtgaccctggtagctccgtatccggtacctttggatgcctgggtgggagattgtctatccctggaacaggagttagcctattggtccctaatggggctatacctcagggtaagttctacgagatgtatctgctcatcaacaaggccgagtcgacgctccccctgagcgagggcacccagaccgtcctctctccctctgtcacctgtggtcctactggacttctgctttgccggcctgtgatcctcacaatgccacactgcgcagaggtgtccgccagggactggatcttccagctgaagacgcaagcccatcaggggcattgggaagaagtggtcacactcgacgaagagaccctcaatacaccgtgttattgccagcttgaacctcgagcatgtcacattctcctagatcagctgggtacatacgtgttcaccggcgagtcctatagccgcagcgcagttaagcgactgcagctcgctgtcttcgctcctgcactctgtaccagcctggagtacagtctccgcgtgtattgtcttgaggatacccccgtcgccctaaaggaagtcctggaactggaaaggactctggggggatacctggtcgaagaacctaaaccgcttatgtttaaggactcctatcataacctgcggcttagcctgcacgacttgccccatgcacactggaggtcaaaactcctcgccaagtaccaagaaattccgttttatcacatttggagtgggtctcagaaagccctgcactgcacattcactctggagcgccactctctggcctcaaccgagttgacatgcaaaatatgcgtccggcaagttgaaggggaggggcagattttccagctgcacacgactctagccgagacaccagccggtagcctagatacgttgtgttctgcaccaggctctacagtaacgactcagctgggcccttacgcgttcaaaatcccactcagtatcaggcagaagatttgcaacagtcttgatgcacctaactccaggggaaatgactggcggatgctggcccaaaaactctccatggacagataccttaattactttgccactaaagcctccccaaccggtgtgattctggacctctgggaggcccttcaacaagatgacggtgatctgaactctctggctagtgcgctcgaagagatgggaaaatcagagatgcttgtggcagtggccaccgacggcgactgctag

SEQ ID NO: 247298 - DNA, 6841 bp, Artificial Sequence
  derived and/or modified sequence
attgtggcaggcggctggggccggctagggcgccggagccgcacgcagccgcggggctccgagaggcgcgcactggggctgggactgcgcggcgccgccgctgcgagcgccactgagcggtcgcgcaacttcggaggcacagcgccggagccaggcgagcgctcagagacccggagccagaggggcgcgccggagcctcgttcgagagccggcgccaggcacccaccgcgctccgagtgccaggcggccctccgcgcagcgtggcttccgctgcccccacggaaggcacgggctggcgctgccgggcgccggggaggacggcgaggaggaggcggcggcggcggagacggcggcggcgagactggggccagggagacagccctgggggagaggcgcccgaaccaggccgcgggagcatgggggcccggagcggagctcggggcgcgctgctgctggcactgctgctctgctgggacccgaggctgagccaagcaggcactgattctggcagcgaggtgctccctgactccttcccgtcagcgccagcagagccgctgccctacttcctgcaggagccacaggacgcctacattgtgaagaacaagcctgtggagctccgctgccgcgccttccccgccacacagatctacttcaagtgcaacggcgagtgggtcagccagaacgaccacgtcacacaggaaggcctggatgaggccaccggcctgcgggtgcgcgaggtgcagatcgaggtgtcgcggcagcaggtggaggagctctttgggctggaggattactggtgccagtgcgtggcctggagctccgcgggcaccaccaagagtcgccgagcctacgtccgcatcgcctacctgcgcaagaacttcgatcaggagcctctgggcaaggaggtgcccctggaccatgaggttctcctgcagtgccgcccgccggagggggtgcctgtggccgaggtggaatggctcaagaatgaggatgtcatcgaccccacccaggacaccaacttcctgctcaccatcgaccacaacctcatcatccgccaggcccgcctgtcggacactgccaactatacctgcgtggccaagaacatcgtggccaaacgccggagcaccactgccaccgtcatcgtctacgtgaatggcggctggtccagctgggcagagtggtcaccctgctccaaccgctgtggccgaggctggcagaagcgcacccggacctgcaccaaccccgctccactcaacggaggggccttctgcgagggccaggcattccagaagaccgcctgcaccaccatctgcccagtcgatggggcgtggacggagtggagcaagtggtcagcctgcagcactgagtgtgcccactggcgtagccgcgagtgcatggcgcccccaccccagaacggaggccgtgactgcagcgggacgctgctcgactctaagaactgcacagatgggctgtgcatgcaaaataagaaaactctaagcgaccccaacagccacctgctggaggcctcaggggatgcggcgctgtatgcggggctcgtggtggccatcttcgtggtcgtggcaatcctcatggcggtgggggtggtggtgtaccgccgcaactgccgtgacttcgacacagacatcactgactcatctgctgccctgactggtggtttccaccccgtcaactttaagacggcaaggcccagcaacccgcagctcctacacccctctgtgcctcctgacctgacagccagcgccggcatctaccgcggacccgtgtatgccctgcaggactccaccgacaaaatccccatgaccaactctcctctgctggaccccttacccagccttaaggtcaaggtctacagctccagcaccacgggctctgggccaggcctggcagatggggctgacctgctgggggtcttgccgcctggcacataccctagcgatttcgcccgggacacccacttcctgcacctgcgcagcgccagcctcggttcccagcagctcttgggcctgccccgagacccagggagcagcgtcagcggcacctttggctgcctgggtgggaggctcagcatccccggcacaggggtcagcttgctggtgcccaatggagccattccccagggcaagttctacgagatgtatctactcatcaacaaggcagaaagtaccctcccgctttcagaagggacccagacagtattgagcccctcggtgacctgtggacccacaggcctcctgctgtgccgccccgtcatcctcaccatgccccactgtgccgaagtcagtgcccgtgactggatctttcagctcaagacccaggcccaccagggccactgggaggaggtggtgaccctggatgaggagaccctgaacacaccctgctactgccagctggagcccagggcctgtcacatcctgctggaccagctgggcacctacgtgttcacgggcgagtcctattcccgctcagcagtcaagcggctccagctggccgtcttcgcccccgccctctgcacctccctggagtacagcctccgggtctactgcctggaggacacgcctgtagcactgaaggaggtgctggagctggagcggactctgggcggatacttggtggaggagccgaaaccgctaatgttcaaggacagttaccacaacctgcgcctctccctccatgacctcccccatgcccattggaggagcaagctgctggccaaataccaggagatccccttctatcacatttggagtggcagccagaaggccctccactgcactttcaccctggagaggcacagcttggcctccacagagctcacctgcaagatctgcgtgcggcaagtggaaggggagggccagatattccagctgcataccactctggcagagacacctgctggctccctggacactctctgctctgcccctggcagcactgtcaccacccagctgggaccttatgccttcaagatcccactgtccatccgccagaagatatgcaacagcctagatgcccccaactcacggggcaatgactggcggatgttagcacagaagctctctatggaccggtacctgaattactttgccaccaaagcgagccccacgggtgtgatcctggacctctgggaagctctgcagcaggacgatggggacctcaacagcctggcgagtgccttggaggagatgggcaagagtgagatgctggtggctgtggccaccgacggggactgctgagcctcctgggacagcgggctggcagggactggcaggaggcaggtgcagggaggcctggggcagcctcctgatggggatgtttggcctctgcttcctcccagttcacagccagagttgcctctcctcctcctcttccccaacccccagaccatgaccagccttagaaaatccatgtactctgttgttagagggcccagagttccttctccacccccgctctctctctcttggcctgagatctctgtgcaggaaccaagatggggctgaagcctctggaggcagttggttgggggcgggcaggcaggaggccctccctccacccccccaccctcagcccggcaacttctgggttccatgggttttagttccgttctcgttttcttcctccgttattgatttctcctttctccctaagcccccttctgcttccacgcccttttcctctttgaagagtcaagtacaattcagacaaactgctttctcctgtccaaaagcaaaaaggcaaaggaaagaaagaaagcttcagaccgctagtaaggctcaaagaagaagaaaaacaccaaaaccacaagggaaaagaaaaacccagtttcttaggaaacgcaaacgatttattatccagattatttggataagtcctttttaagaaaaaaaaagaaaatgaaaaacaacacaaaaaaaatagaaaactcttttcttgagtgtggatgagaatgggcacgctcacacttctggccaggagtgaatgtgcctgtgtgtgtgtgtgtgtgtgtgtgtgtgtgtgtacatgtacgcgtgtgcattgaggagagagagactgaacagagagtactttgctgctaacgaatccatcttggactaaattctgacaaggcctcagtttccccagttgtgcagggagtaggtcagacagggttttcactgtctagatttagctggttagattttcctctaaaatcttaagcagatgctgaatccataaagccaaggagtgctgagggctggagtgggtgggccctccctcccacagccccagggagatacatctggactcctgggaatctggattaagaaagttgggatgaaagaggaggactgctcaggccagttgtgagccagggagaatgttccagtctggttttggtctggtggctcctagaaagggatgtggcccagaagtgggactcaaacagagagatgaagtaggggaggggagtcctccacgggcatctctctcctggcggctggatagctttaccctagggtggggccagccctgacaccctcatcccctcctcagcccagcagcctctagagcagcgtggtgctctcttgatggccaggaatccagaatctgcccttccccaaccttggtttctccttctgtaaagcagagtgatggctgagaagtcctctctagctgcagaagcctgagcttcccggtgtcagtcagctctgcaacgtgggagccttggaggcgggtggcctggctgtgcttcatatgcccaggagtggagaaggaggctgagaagctggtttcccagctctgatctccacaggcacctcctataaccctcctctcacccaccccgctacggtctgagagatctgaaataacctttcccagtgggcagggttgccagggttgaggggacagcacataccacccccacccaacctgttcgaggggccctgcatggcacgggatgagtccctgccctgtgcagctgcctggcagtggctgggacaaggatcttgcagccagcacagaggcctcttcaaaggcctctccctcttggcactccaggcaaggcaggtgcccgcttccccaacacctccaggcagtgaccctagggcatgccccagcaggtctccgagcagccactgggacccgtctcagcacatcctggcctttgaaagtctgatatcctgagaggagggcaggttttagggccgcagttccagccagcgtccccagcctggcttccctgccatggactcagtagctcgtggggcttcttaccacccaccagccccgctggggtgcggcctggctgtgggcaaaggaggacttgcctggagatttgagagaagattccttctaccagggctgctgaggggccaggcctgcatcaggggctaggctctggctgggcccggaggctgagactaaggctttcgaccctggtgcctccatgtggatgctgcctcagacaaaggcagtgagccttccctgccaaagtgcccatcccatgggctcggcctcactggtcactgttagcccatgaacacgtgtgggcctcggtcacgtggctttgagggcagtctgaccaggctagaccacacgtgccgtgacagggggtgccattcccctcgcaggctctaatgtgcccacatgtagcctggcagtccaaagaccaagaatcaacttgcaaatctgccattaaactgctgtgcgacttcaggcatatcactgccttctctgggcttcagtgtccttttcatacctagaagtctgcggtctgaggctctttgggttcagacacactgttctaggcttctgtaggggaccttgtgatctgccgtgcccctcctccctgttcttttctgtcctccccaccccaccctcagaagctgcttgctctgcccccaggacaggagcttgacggatgaagtgcagccagccacccaggtgccatttccagtctgacttccagaaatgtgcaccatgtcctagagcacagacccattggctggagcctcctgggagggttcaaaccatcagctctatgagaaatgcccagaaaggctttgccgactccatccgtctgtggaggctgcctgcctccggggtgggatgggtggtttctcctccaattcagacccaagaggtagcccccgagggcatgtacctggtgggaagcagctcaggtacccttgggggttgcagggcccttacgcaggtatttctctctctctcctctctggggtgcgtgtgtgcgtgcgcgtgtgcgtgcctatgcttttctctgtgggcacatcaggatgcccctcggagagcatgtgcacgtgtccccacctgagcgagcgtgtgtgtgtgctcctctgcgtcccaggtttggacgtctagggtttggtgtgcctgtcttctgccctccctgagcccacagggtcagtcaatgtatcttctacgtgcctctccctctgccttctctcacagtgcccccggctccagagctcaggggtaggggttctcctgagggtgcaggggatccttctcatctcctggaccctccagggcactctggtccctattccccagctcctaggcagctgagccgggtcccttaggggaggtgaccaggagctttggtgcagggagctcttggtggggcaaagggctggacccctgccaggtctgtggacatggttatatgcccgggagaggggggtgcagggccccagggatggcccccaatcccacctctgtttattctgtaaactgcaacctataaataacctttagcattcctattgtaacaaaattaatttttatgaaataaattatatttcctagtctaataaaa

SEQ ID NO: 247299 - protein, 122 aa, Artificial Sequence
  derived and/or modified sequence
MAPRGRKRKAEAAVVAVAEKREKLANGGEGMEEATVVIEHCTSCRVYGRNAAALSQALRLEAPELPVKVNPTKPRRGSFEVTLLRPDGSSAELWTGIKKGPPRKLKFPEPQEVVEELKKYLS

SEQ ID NO: 247300 - protein, 94 aa, Artificial Sequence
  derived and/or modified sequence
  misc_feature (1)..(1): Xaa can be any naturally occurring amino acid
XGMEEATVVIEHCTSCRVYGRNAAALSQALRLEAPELPVKVNPTKPRRGSFEVTLLRPDGSSAELWTGIKKGPPRKLKFPEPQEVVEELKKYLS

SEQ ID NO: 247301 - DNA, 833 bp, Artificial Sequence
  derived and/or modified sequence
attctcggccgggctctaggcgccatggctccccgcgggaggaagcgtaaggctgaggccgcggtggtcgccgtagccgagaagcgagagaagctggcgaacggcggggagggaatggaggaggcgaccgttgttatcgagcattgcactagctgacgcgtctatgggcgcaacgccgcggccctgagccaggcgctgcgcctggaggccccagagcttccagtaaaggtgaacccgacgaagccccggaggggcagcttcgaggtgacgctgctgcgcccggacggcagcagtgcggagctctggactgggattaagaaggggcccccacgcaaactcaaattccctgagcctcaagaggtggtggaagagttgaagaagtacctgtcgtagggagatttgggtagaagccctcatgctgaggtttgaaatgggaagtggggggcgcgaccgctgttgaggaagagaaggcattgatcttggtgtggctacaagtacccacctggcgtgggtagctcacgcctgcaatcccagcactctgggaggtcgaggcaggagtggatggccaacacagggagaccctatttgaaaacaaaaaacaaaaaaaagacacaatattgttttctgtctagtgtgccctaagtggaatttatgtcctttgggagactgtagttgacttgccctgggggtatggacaagttttccatttggaagtttatttcatgttacttcatttatgcttatccctaccctcttctgtttggttcttgggtgttctgttactgtcctgtgttaacactgcattacaataccattaaatttggttacaagga

SEQ ID NO: 247302 - DNA, 469 bp, Artificial Sequence
  derived and/or modified sequence
gggaatggaggaggcgaccgttgttatcgagcattgcactagctgacgcgtctatgggcgcaacgccgcggccctgagccaggcgctgcgcctggaggccccagagcttccagtaaaggtgaacccgacgaagccccggaggggcagcttcgaggtgacgctgctgcgcccggacggcagcagtgcggagctctggactgggattaagaaggggcccccacgcaaactcaaattccctgagcctcaagaggtggtggaagagttgaagaagtacctgtcgtagggagatttggctttgtgtccctggtgatgttggaacattaatgatggaacatggccaaacttcagtcatgatcctgaagccatggtttcttccctgccagaaatgaaggttcagttatgaggcaaccctctagtaaggcattgtaaaagttactggatttggtttaataaaagttgaaataaagta

SEQ ID NO: 247303 - DNA, 818 bp, Artificial Sequence
  derived and/or modified sequence
gtggttccgtcaggcgcttcccgcaccttcccgctccctgcttgcaaagtggttgtgccccaaggtccgcctccaggccacgtgggtgctgcgggccaagctttcccttcctttgagagaggtttccgctgtaggagcagagcttccgggctgcgctcttcgttgcccagtttccgctcagtggtcgcgtctccgccccccacccaccagtcccgctgcattctcggccgggctctaggcgccatggctccccgcgggaggaagcgtaaggctgaggccgcggtggtcgccgtagccgagaagcgagagaagctggcgaacggcggggagggaatggaggaggcgaccgttgttatcgagcattgcactagctgacgcgtctatgggcgcaacgccgcggccctgagccaggcgctgcgcctggaggccccagagcttccagtaaaggtgaacccgacgaagccccggaggggcagcttcgaggtgacgctgctgcgcccggacggcagcagtgcggagctctggactgggattaagaaggggcccccacgcaaactcaaattccctgagcctcaagaggtggtggaagagttgaagaagtacctgtcgtagggagatttgggtagaagccctcatgctgagctttgtgtccctggtgatgttggaacattaatgatggaacatggccaaacttcagtcatgatcctgaagccatggtttcttccctgccagaaatgaaggttcagttatgaggcaaccctctagtaaggcattgtaaaagttactggatttggtttaataaaagttgaaataaagta

SEQ ID NO: 247304 - DNA, 369 bp, Artificial Sequence
  derived and/or modified sequence
atggcccccagaggcagaaagagaaaggccgaggccgccgtggtggccgtggccgagaagagagagaagctggccaacggcggcgagggcatggaggaggccaccgtggtgatcgagcactgcaccagctgaagagtgtacggcagaaacgccgccgccctgagccaggccctgagactggaggcccccgagctgcccgtgaaggtgaaccccaccaagcccagaagaggcagcttcgaggtgaccctgctgagacccgacggcagcagcgccgagctgtggaccggcatcaagaagggcccccccagaaagctgaagttccccgagccccaggaggtggtggaggagctgaagaagtacctgagctag

SEQ ID NO: 247305 - DNA, 285 bp, Artificial Sequence
  derived and/or modified sequence
tgaggcatggaggaggccaccgtggtgatcgagcactgcaccagctgaagagtgtacggcagaaacgccgccgccctgagccaggccctgagactggaggcccccgagctgcccgtgaaggtgaaccccaccaagcccagaagaggcagcttcgaggtgaccctgctgagacccgacggcagcagcgccgagctgtggaccggcatcaagaagggcccccccagaaagctgaagttccccgagccccaggaggtggtggaggagctgaagaagtacctgagctag

SEQ ID NO: 247306 - DNA, 369 bp, Artificial Sequence
  derived and/or modified sequence
atggcaccaagggggagaaaaaggaaggctgaggctgcagtggtggccgtagcagagaagcgagaaaaactcgcaaatggcggagagggaatggaggaggctaccgtcgtgattgaacattgcacatcttgaagagtctatggacggaatgccgctgccctgagtcaggccttaaggttagaagcccccgagctccctgtaaaagtgaatccaaccaaacctcggcgggggtctttcgaagtaacccttctcagaccggatggaagctcagccgaactctggaccggtatcaaaaaaggaccaccaagaaaattaaaatttcctgaaccccaagaagtggtggaggaactgaaaaaatatctgtcgtag

SEQ ID NO: 247307 - DNA, 285 bp, Artificial Sequence
  derived and/or modified sequence
tgaggtatggaagaagcaacagtcgtgatagaacattgcacgtcttgaagagtttacggccgcaatgctgccgccctcagccaggccctaagacttgaggcgcctgaattgccagtgaaggttaacccaaccaagccccggaggggcagcttcgaagtgacccttttgcgtcccgatggcagttcggcagaactctggactggcatcaaaaagggacctccaaggaaactcaaattccccgaaccccaggaggttgtcgaggagttgaagaagtacttgtcatag

SEQ ID NO: 247308 - DNA, 369 bp, Artificial Sequence
  derived and/or modified sequence
atggctccacgtgggcgcaagcggaaggcagaagccgctgtggtggcagtggcagaaaagcgggaaaaactcgccaacggaggcgaaggcatggaggaggcgacagttgtgatcgaacactgcacaagttgacgtgtgtacggccgtaatgctgctgctcttagtcaggctctgcgactcgaggctccagagctaccggtgaaagtgaatcccactaagccccggcgcggatcatttgaggtgactctgcttcggcctgacggctcatccgccgagctctggactgggattaaaaaagggccgccgcggaaactgaaattccctgagccacaggaagtcgtggaagaactgaaaaagtacctctcatag

SEQ ID NO: 247309 - DNA, 363 bp, Artificial Sequence
  derived and/or modified sequence
atggccccccggggcaggaagaggaaggccgaggccgctgtggtggccgtggccgagaagcgggagaagctggccaacggcggggagggcatggaggaggccaccgtggtgattgagcactgcaccagggtgtatggaagaaatgctgctgccctgagccaggccctgcggctggaggcccctgagctgcctgtgaaggtgaaccccaccaagccccggcggggcagctttgaggtgaccctgctgcggccagatggcagcagcgctgagctgtggacaggcatcaagaagggcccccccaggaagctgaagtttcctgagccccaggaggtggtggaggagctgaagaagtacctgtcctag

SEQ ID NO: 247310 - DNA, 279 bp, Artificial Sequence
  derived and/or modified sequence
tgaggcatggaggaggccaccgtggtgattgagcactgcaccagggtgtatggaagaaatgctgctgccctgagccaggccctgcggctggaggcccctgagctgcctgtgaaggtgaaccccaccaagccccggcggggcagctttgaggtgaccctgctgcggccagatggcagcagcgctgagctgtggacaggcatcaagaagggcccccccaggaagctgaagtttcctgagccccaggaggtggtggaggagctgaagaagtacctgtcctag

SEQ ID NO: 247311 - DNA, 369 bp, Artificial Sequence
  derived and/or modified sequence
atggccccccggggccggaagcggaaggccgaggccgccgtggtggcagttgccgaaaaacgggagaagttggcaaacggcggagaaggcatggaggaagcaacggttgtgatagaacactgcactagttgacgcgtgtatggcaggaacgctgccgccttgtcccaagcactgcggctggaggccccagaacttcctgttaaggtgaacccaaccaagcccagacgcggaagctttgaagtgacattgctgaggcccgacggtagctcggccgagctctggacaggaatcaagaagggtcctccacggaagcttaagtttcctgaaccacaggaggtggtggaggagttgaaaaagtacttatcatag

SEQ ID NO: 247312 - DNA, 285 bp, Artificial Sequence
  derived and/or modified sequence
tgaggcatggaggaggccaccgtggtgatcgagcactgcaccagctgaagagtgtatggaagaaacgccgctgcattgagccaggcactgcggctggaagctccagagcttcctgtaaaagttaatccaacaaaacctcgacggggatcgttcgaggttaccctactccgcccagacggttccagcgctgagttgtggactgggattaagaaagggcctccccggaaattaaagttccccgagcctcaggaggtcgtggaggagttaaaaaagtatttgtcatag

SEQ ID NO: 247313 - DNA, 369 bp, Artificial Sequence
  derived and/or modified sequence
atggccccccggggccggaagcggaaggccgaggccgccgtggtggctgttgctgaaaaacgggagaagcttgctaacggaggtgaaggtatggaagaggccaccgtggtgatcgagcactgtacctcgtgacgcgtttatgggaggaatgccgctgctctgtcccaggcgctcaggctggaagcacccgagctgcccgtaaaggtcaatcctacaaaacctcgtcgaggctctttcgaggtaactttgttgaggcctgacgggagttcagctgaactctggaccggaatcaaaaaggggccaccccggaagctcaaattccccgaaccgcaggaagtggttgaggaacttaagaaatacctatcttag

SEQ ID NO: 247314 - DNA, 369 bp, Artificial Sequence
  derived and/or modified sequence
atggcacctcgaggaaggaagcgaaaagcagaagccgctgtggtagcagtggctgaaaagcgcgagaaacttgctaacggcggagaagggatggaagaggccaccgtcgttatcgagcattgcacaagttgacgtgtatatggcagaaacgctgcagcactatcacaagccttgcgtctcgaggctcccgagctgcctgtaaaggttaacccaaccaaaccgcgtagaggatcatttgaagtgactctgttgcgcccagatggcagctctgcagagctgtggaccggcataaagaagggcccacccagaaagttaaaatttcctgagccccaggaggtggtggaggagctcaagaagtatctctcttag

SEQ ID NO: 247315 - DNA, 285 bp, Artificial Sequence
  derived and/or modified sequence
taaggaatggaagaggctacagtagtgatcgagcattgcacatcttgacgtgtctacgggcgaaacgctgccgctctgtctcaagcccttcgtctggaggcgcctgagctacccgtgaaagtgaatccaactaagccacgaaggggtagttttgaagttacacttctacgacctgacggtagctctgccgaactgtggacgggcataaaaaaaggtcccccaagaaagctgaagtttcccgagccacaggaagtggtggaagaattgaaaaagtatctctcctag

SEQ ID NO: 247316 - DNA, 369 bp, Artificial Sequence
  derived and/or modified sequence
atggcgcctcgcggtcgtaagcgtaaagcagaggcggctgtggtcgccgtagcggaaaaacgtgagaagctcgccaatggtggtgaaggaatggaagaagcaacagtcgtgatagagcactgtacttcatgaagggtctatggcagaaacgccgcagccttgtctcaggctctgcgcttagaagctcctgagctgccggtcaaggtgaaccctactaagcccaggcgtgggtccttcgaggttacacttctgcgccctgacggcagctctgcagaactgtggacaggcattaaaaaggggcctcctcgcaagctcaagttcccagagccacaggaagtggtggaggagctgaagaaatacctgtcatag

SEQ ID NO: 247317 - protein, 151 aa, Artificial Sequence
  derived and/or modified sequence
MEGCVSNLMVCNLAYSGKLEELKESILADKSLATRTDQDSRTALHWACSAGHTEIVEFLLQLGVPVNDKDDAGWSPLHIAASAGRDEIVKALLGKGAQVNAVNQNGCTPLHYAASKNRHEIAVMLLEGGANPDAKDHYEATAMHRAAAKDT

SEQ ID NO: 247318 - protein, 110 aa, Artificial Sequence
  derived and/or modified sequence
MEGCVSNLMVCNLAYSGKLEELKESILADKSLATRTDQDSRTALHWACSAGHTEIVEFLLQLGVPVNDKDDAASKNRHEIAVMLLEGGANPDAKDHYEATAMHRAAAKDT

SEQ ID NO: 247319 - DNA, 456 bp, Artificial Sequence
  derived and/or modified sequence
atggagggctgcgtgagcaacctgatggtgtgcaacctggcctacagcggcaagctggaggagctgaaggagagcatcctggccgacaagagcctggccaccagaaccgaccaggacagcagaaccgccctgcactgggcctgcagcgccggccacaccgagatcgtggagttcctgctgcagctgggcgtgcccgtgaacgacaaggacgacgccggctggagccccctgcacatcgccgccagcgccggcagagacgagatcgtgaaggccctgctgggcaagggcgcccaggtgaacgccgtgaaccagaacggctgcacccccctgcactacgccgccagcaagaacagacacgagatcgccgtgatgctgctggagggcggcgccaaccccgacgccaaggaccactacgaggccaccgccatgcacagagccgccgccaaggacacctag

SEQ ID NO: 247320 - DNA, 333 bp, Artificial Sequence
  derived and/or modified sequence
atggagggctgcgtgagcaacctgatggtgtgcaacctggcctacagcggcaagctggaggagctgaaggagagcatcctggccgacaagagcctggccaccagaaccgaccaggacagcagaaccgccctgcactgggcctgcagcgccggccacaccgagatcgtggagttcctgctgcagctgggcgtgcccgtgaacgacaaggacgacgccgccagcaagaacagacacgagatcgccgtgatgctgctggagggcggcgccaaccccgacgccaaggaccactacgaggccaccgccatgcacagagccgccgccaaggacacctag

SEQ ID NO: 247321 - DNA, 456 bp, Artificial Sequence
  derived and/or modified sequence
atggagggctgcgtctctaacttgatggtgtgtaaccttgcatatagtggtaagctggaggaattgaaagagtccatcctggccgacaagtcactggcaaccagaacagatcaggattcacgcaccgcccttcactgggcctgctccgccggccacaccgagatagtcgaattcctgttgcagctaggggtcccggtgaatgataaagatgatgccggttggtcccctcttcacatcgccgcttctgccggacgcgatgaaatcgtgaaggcactgttgggcaagggagcccaggtaaacgccgtgaatcagaatggatgtacccccttgcactacgccgcttcaaaaaaccgccatgagatcgccgtgatgctgcttgaaggtggtgcgaacccagatgccaaggatcactacgaggcaactgcgatgcaccgggccgctgctaaggacacgtag

SEQ ID NO: 247322 - DNA, 333 bp, Artificial Sequence
  derived and/or modified sequence
atggaggggtgcgtctcaaacctcatggtctgcaacctggcgtacagtggaaagcttgaagaactgaaagagtctatccttgccgataaaagtcttgcgaccagaaccgaccaggacagtagaacggctcttcattgggcttgctccgcggggcataccgagatagtcgagtttctacttcagctcggcgttccggtcaacgataaggatgacgcagccagtaagaaccgccacgaaattgctgtgatgctgctggagggaggtgcaaaccccgatgcgaaggaccactatgaggctaccgccatgcatcgggcagcagcaaaagacacctag

SEQ ID NO: 247323 - DNA, 768 bp, Artificial Sequence
  derived and/or modified sequence
aagtagttgctgggacagcgaaatggaggggtgtgtgtctaacctaatggtctgcaacctggcctacagcgggaagctggaagagttgaaggagagtattctggccgataaatccctggctactagaactgaccaggacagcagaactgcattgcactgggcatgctcagctggacatacagaaattgttgaatttttgttgcaacttggagtgccagtgaatgataaagacgatgcaggttggtctcctcttcatattgcggcttctgctggccgggatgagattgtaaaagcccttctgggaaaaggtgctcaagtgaatgctgtcaatcaaaatggctgtactcccttacattatgcagcttcgaaaaacaggcatgagatcgctgtcatgttactggaaggcggggctaatccagatgctaaggaccattatgaggctacagcaatgcaccgggcagcagccaaggacacttagcctgtgatgaggagagagtggaagaagcaaaactgctggtgtcccaaggagcaagtatttacattgagaataaagaagaaaagacacccctgcaagtggccaaaggtggcctgggtttaatactcaagagaatggtggaaggttaaacagcttggatttattcttactttgtatgttgtgttgttgtccccagtgtcctacaaactaatgtatttgtgcacaagacatcatctatgaatgatgaagttttctcaccttcaaagtcttataaacatgttgactcttgttcc

SEQ ID NO: 247324 - DNA, 456 bp, Artificial Sequence
  derived and/or modified sequence
atggagggctgtgtgagcaacctgatggtgtgcaacctggcctacagcggcaagctggaggagctgaaggagagcatcctggccgacaagagcctggccaccaggacagaccaggacagcaggacagccctgcactgggcctgcagcgctggccacacagaaattgtggagttcctgctgcagctgggcgtgcctgtgaatgacaaggatgatgctggctggagccccctgcacatcgccgccagcgctggaagagatgagatcgtgaaggccctgctgggcaaaggagcccaggtgaatgctgtgaaccagaatggctgcacccccctgcactatgctgccagcaagaacagacatgaaattgctgtgatgctgctggagggcggggccaacccagatgccaaggaccactatgaggccacagccatgcacagagctgctgccaaggacacctag

SEQ ID NO: 247325 - DNA, 333 bp, Artificial Sequence
  derived and/or modified sequence
atggagggctgtgtgagcaacctgatggtgtgcaacctggcctacagcggcaagctggaggagctgaaggagagcatcctggccgacaagagcctggccaccaggacagaccaggacagcaggacagccctgcactgggcctgcagcgctggccacacagaaattgtggagttcctgctgcagctgggcgtgcctgtgaatgacaaggatgatgctgccagcaagaacagacatgaaattgctgtgatgctgctggagggcggggccaacccagatgccaaggaccactatgaggccacagccatgcacagagctgctgccaaggacacctag

SEQ ID NO: 247326 - DNA, 456 bp, Artificial Sequence
  derived and/or modified sequence
atggagggctgcgtgagcaacctgatggtgtgcaacctggcctacagcgggaaacttgaggagttgaaggaatccattcttgctgacaagtcgctggcgactagaacagaccaagactctaggacagccctgcattgggcctgctctgccggccacactgagatagtcgaatttctgctgcaactgggggtaccggtcaatgacaaagacgacgcaggctggtctccactgcatattgccgcctctgcaggacgcgatgagattgttaaggctctgctcggcaagggggctcaggtcaacgcagtgaatcaaaacggttgcacacctttacactatgctgcgagcaagaatagacatgagatcgcagttatgcttttagaaggcggagcaaaccccgacgccaaggaccactacgaggcgacagctatgcatagggccgccgctaaggacacgtag

SEQ ID NO: 247327 - DNA, 333 bp, Artificial Sequence
  derived and/or modified sequence
atggagggctgcgtgagcaacctgatggtgtgcaacctggcctactcagggaagctcgaggaactgaaggagagtatcctggcagataaatcccttgctactcgcacagaccaggattcccgcactgcccttcactgggcatgctctgcgggtcacactgagattgttgaatttcttcttcagctgggagtgcccgtcaatgacaaagatgatgcggctagtaaaaacaggcacgagatcgcggtcatgttgcttgaagggggcgccaacccagacgccaaagatcactatgaggccactgccatgcacagagcggcagccaaagatacttag

SEQ ID NO: 247328 - DNA, 456 bp, Artificial Sequence
  derived and/or modified sequence
atggagggatgcgtcagcaacctgatggtctgtaatctcgcgtacagcggcaaactcgaggagctgaaagaatcaatcctggcagataagtctctcgcaactagaacagaccaagatagtaggaccgcgctccactgggcctgttcagcgggacatactgagatcgtggaatttctgctgcaattgggggtcccagtgaacgataaagatgacgcaggatggagcccattgcatattgctgcctccgcgggaagggacgaaatcgtgaaggcgctgctggggaagggcgcacaggttaacgctgtcaaccagaatggatgtaccccattacactacgctgcttctaaaaaccggcacgagatcgccgtgatgttattagaggggggtgctaaccctgacgcaaaagaccattacgaagccaccgccatgcatagggcagctgccaaagacacatag

SEQ ID NO: 247329 - DNA, 333 bp, Artificial Sequence
  derived and/or modified sequence
atggaaggatgcgtctctaatttaatggtgtgcaacctcgcctattcaggaaagctggaggagcttaaagagtccatactcgctgacaagagcttggctacacggactgatcaggactccaggactgccctgcattgggcttgcagtgcgggtcacaccgaaatagtggaattcctgctgcagctgggcgtccccgtcaatgataaagatgacgccgcatctaaaaaccgacatgaaatcgccgtcatgctcttggagggcggagcaaatcccgatgccaaggaccattatgaagccacagccatgcatagggctgctgcgaaggatacctag

SEQ ID NO: 247330 - protein, 1409 aa, Artificial Sequence
  derived and/or modified sequence
MKSSGPVERLLRALGRRDSSRAASRPRKAEPHSFREKVFRKKPPVCAVCKVTIDGTGVSCRVCKVATHRKCEAKVTSACQALPPVELRRNTAPVRRIEHLGSTKSLNHSKQRSTLPRSFSLDPLMERRWDLDLTYVTERILAAAFPARPDEQRHRGHLRELAHVLQSKHRDKYLLFNLSEKRHDLTRLNPKVQDFGWPELHAPPLDKLCSICKAMETWLSADPQHVVVLYCKGNKGKLGVIVSAYMHYSKISAGADQALATLTMRKFCEDKVATELQPSQRRYISYFSGLLSGSIRMNSSPLFLHYVLIPMLPAFEPGTGFQPFLKIYQSMQLVYTSGVYHIAGPGPQQLCISLEPALLLKGDVMVTCYHKGGRGTDRTLVFRVQFHTCTIHGPQLTFPKDQLDEAWTDERFPFQASVEFVFSSSPEKIKGSTPRNDPSVSVDYNTTEPAVRWDSYENFNQHHEDSVDGSLTHTRGPLDGSPYAQVQRPPRQTPPAPSPEPPPPPMLSVSSDSGHSSTLTTEPAAESPGRPPPTAAERQELDRLLGGCGVASGGRGAGRETAILDDEEQPTVGGGPHLGVYPGHRPGLSRHCSCRQGYREPCGVPNGGYYRPEGTLERRRLAYGGYEGSPQGYAEASMEKRRLCRSLSEGLYPYPPEMGKPATGDFGYRAPGYREVVILEDPGLPALYPCPACEEKLALPTAALYGLRLEREAGEGWASEAGKPLLHPVRPGHPLPLLLPACGHHHAPMPDYSCLKPPKAGEEGHEGCSYTMCPEGRYGHPGYPALVTYSYGGAVPSYCPAYGRVPHSCGSPGEGRGYPSPGAHSPRAGSISPGSPPYPQSRKLSYEIPTEEGGDRYPLPGHLASAGPLASAESLEPVSWREGPSGHSTLPRSPRDAPCSASSELSGPSTPLHTSSPVQGKESTRRQDTRSPTSAPTQRLSPGEALPPVSQAGTGKAPELPSGSGPEPLAPSPVSPTFPPSSPSDWPQERSPGGHSDGASPRSPVPTTLPGLRHAPWQGPRGPPDSPDGSPLTPVPSQMPWLVASPEPPQSSPTPAFPLAASYDTNGLSQPPLPEKRHLPGPGQQPGPWGPEQASSPARGISHHVTFAPLLSDNVPQTPEPPTQESQSNVKFVQDTSKFWYKPHLSRDQAIALLKDKDPGAFLIRDSHSFQGAYGLALKVATPPPSAQPWKGDPVEQLVRHFLIETGPKGVKIKGCPSEPYFGSLSALVSQHSISPISLPCCLRIPSKDPLEETPEAPVPTNMSTAADLLRQGAACSVLYLTSVETESLTGPQAVARASSAALSCSPRPTPAVVHFKVSAQGITLTDNQRKLFFRRHYPVNSITFSSTDPQDRRWTNPDGTTSKIFGFVAKKPGSPWENVCHLFAELDPDQPAGAIVTFITKVLLGQRK

SEQ ID NO: 247331 - protein, 1285 aa, Artificial Sequence
  derived and/or modified sequence
MERRWDLDLTYVTERILAAAFPARPDEQRHRGHLRELAHVLQSKHRDKYLLFNLSEKRHDLTRLNPKVQDFGWPELHAPPLDKLCSICKAMETWLSADPQHVVVLYCKGNKGKLGVIVSAYMHYSKISAGADQALATLTMRKFCEDKVATELQPSQRRYISYFSGLLSGSIRMNSSPLFLHYVLIPMLPAFEPGTGFQPFLKIYQSMQLVYTSGVYHIAGPGPQQLCISLEPALLLKGDVMVTCYHKGGRGTDRTLVFRVQFHTCTIHGPQLTFPKDQLDEAWTDERFPFQASVEFVFSSSPEKIKGSTPRNDPSVSVDYNTTEPAVRWDSYENFNQHHEDSVDGSLTHTRGPLDGSPYAQVQRPPRQTPPAPSPEPPPPPMLSVSSDSGHSSTLTTEPAAESPGRPPPTAAERQELDRLLGGCGVASGGRGAGRETAILDDEEQPTVGGGPHLGVYPGHRPGLSRHCSCRQGYREPCGVPNGGYYRPEGTLERRRLAYGGYEGSPQGYAEASMEKRRLCRSLSEGLYPYPPEMGKPATGDFGYRAPGYREVVILEDPGLPALYPCPACEEKLALPTAALYGLRLEREAGEGWASEAGKPLLHPVRPGHPLPLLLPACGHHHAPMPDYSCLKPPKAGEEGHEGCSYTMCPEGRYGHPGYPALVTYSYGGAVPSYCPAYGRVPHSCGSPGEGRGYPSPGAHSPRAGSISPGSPPYPQSRKLSYEIPTEEGGDRYPLPGHLASAGPLASAESLEPVSWREGPSGHSTLPRSPRDAPCSASSELSGPSTPLHTSSPVQGKESTRRQDTRSPTSAPTQRLSPGEALPPVSQAGTGKAPELPSGSGPEPLAPSPVSPTFPPSSPSDWPQERSPGGHSDGASPRSPVPTTLPGLRHAPWQGPRGPPDSPDGSPLTPVPSQMPWLVASPEPPQSSPTPAFPLAASYDTNGLSQPPLPEKRHLPGPGQQPGPWGPEQASSPARGISHHVTFAPLLSDNVPQTPEPPTQESQSNVKFVQDTSKFWYKPHLSRDQAIALLKDKDPGAFLIRDSHSFQGAYGLALKVATPPPSAQPWKGDPVEQLVRHFLIETGPKGVKIKGCPSEPYFGSLSALVSQHSISPISLPCCLRIPSKDPLEETPEAPVPTNMSTAADLLRQGAACSVLYLTSVETESLTGPQAVARASSAALSCSPRPTPAVVHFKVSAQGITLTDNQRKLFFRRHYPVNSITFSSTDPQDRRWTNPDGTTSKIFGFVAKKPGSPWENVCHLFAELDPDQPAGAIVTFITKVLLGQRK

SEQ ID NO: 247332 - protein, 781 aa, Artificial Sequence
  derived and/or modified sequence
MKSSGPVERLLRALGRRDSSRAASRPRKAEPHSFREKVFRKKPPVCAVCKVTIDGTGVSCRVCKVATHRKCEAKVTSACQALPPVELRRNTAPVRRIEHLGSTKSLNHSKQRSTLPRSFSLDPLMERRWDLDLTYVTERILAAAFPARPDEQRHRGHLRELAHVLQSKHRDKYLLFNLSEKRHDLTRLNPKVQDFGWPELHAPPLDKLCSICKAMETWLSADPQHVVVLYCKGNKGKLGVIVSAYMHYSKISAGADQALATLTMRKFCEDKVATELQPSQRRYISYFSGLLSGSIRMNSSPLFLHYVLIPMLPAFEPGTGFQPFLKIYQSMQLVYTSGVYHIAGPGPQQLCISLEPALLLKGDVMVTCYHKGGRGTDRTLVFRVQFHTCTIHGPQLTFPKDQLDEAWTDERFPFQASVEFVFSSSPEKIKGSTPRNDPSVSVDYNTTEPAVRWDSYENFNQHHEDSVDGSLTHTRGPLDGSPYAQVQRPPRQTPPAPSPEPPPPPMLSVSSDSGHSSTLTTEPAAESPGRPPPTAAERQELDRLLGGCGVASGGRGAGRETAILDDEEQPTVGGGPHLGVYPGHRPGLSRHCSCRQGYREPCGVPNGGYYRPEGTLERRRLAYGGYEGSPQGYAEASMEKRRLCRSLSEGLYPYPPEMGKPATGDFGYRASSAALSCSPRPTPAVVHFKVSAQGITLTDNQRKLFFRRHYPVNSITFSSTDPQDRRWTNPDGTTSKIFGFVAKKPGSPWENVCHLFAELDPDQPAGAIVTFITKVLLGQRK

SEQ ID NO: 247333 - protein, 1399 aa, Artificial Sequence
  derived and/or modified sequence
MKSSGPVERLLRALGRRDSSRAASRPRKAEPHSFREKVFRKKPPVCAVCKVTIDGTGVSCRVCKVATHRKCEAKVTSACQALPPVELRRNTAPVRRIEHLGSTKSLNHSKQRSTLPRSFSLDPLMERRWDLDLTYVTERILAAAFPARPDEQRHRGHLRELAHVLQSKHRDKYLLFNLSEKRHDLTRLNPKVQDFGWPELHAPPLDKLCSICKAMETWLSADPQHVVVLYCKGNKGKLGVIVSAYMHYSKISAGADQALATLTMRKFCEDKVATELQPSQRRYISYFSGLLSGSIRMNSSPLFLHYVLIPMLPAFEPGTGFQPFLKIYQSMQLVYTSGVYHIAGPGPQQLCISLEPALLLKGDVMVTCYHKGGRGTDRTLVFRVQFHTCTIHGPQLTFPKDQLDEAWTDERFPFQASVEFVFSSSPEKIKGSTPRNDPSVSVDYNTTEPAVRWDSYENFNQHHEDSVDGSLTHTRGPLDGSPYAQVQRPPRQTPPAPSPEPPPPPMLSVSSDSGHSSTLTTEPAAESPGRPPPTAAERQELDRLLGGCGVASGGRGAGRETAILDDEEQPTVGGGPHLGVYPGHRPGLSRHCSCRQGYREPCGVPNGGYYRPEGTLERRRLAYGGYEGSPQGYAEASMEKRRLCRSLSEGLYPYPPEMGKPATGDFGYRAPGYREVVILEDPGLPALYPCPASLYGLRLEREAGEGWASEAGKPLLHPVRPGHPLPLLLPACGHHHAPMPDYSCLKPPKAGEEGHEGCSYTMCPEGRYGHPGYPALVTYSYGGAVPSYCPAYGRVPHSCGSPGEGRGYPSPGAHSPRAGSISPGSPPYPQSRKLSYEIPTEEGGDRYPLPGHLASAGPLASAESLEPVSWREGPSGHSTLPRSPRDAPCSASSELSGPSTPLHTSSPVQGKESTRRQDTRSPTSAPTQRLSPGEALPPVSQAGTGKAPELPSGSGPEPLAPSPVSPTFPPSSPSDWPQERSPGGHSDGASPRSPVPTTLPGLRHAPWQGPRGPPDSPDGSPLTPVPSQMPWLVASPEPPQSSPTPAFPLAASYDTNGLSQPPLPEKRHLPGPGQQPGPWGPEQASSPARGISHHVTFAPLLSDNVPQTPEPPTQESQSNVKFVQDTSKFWYKPHLSRDQAIALLKDKDPGAFLIRDSHSFQGAYGLALKVATPPPSAQPWKGDPVEQLVRHFLIETGPKGVKIKGCPSEPYFGSLSALVSQHSISPISLPCCLRIPSKDPLEETPEAPVPTNMSTAADLLRQGAACSVLYLTSVETESLTGPQAVARASSAALSCSPRPTPAVVHFKVSAQGITLTDNQRKLFFRRHYPVNSITFSSTDPQDRRWTNPDGTTSKIFGFVAKKPGSPWENVCHLFAELDPDQPAGAIVTFITKVLLGQRK

SEQ ID NO: 247334 - DNA, 4230 bp, Artificial Sequence
  derived and/or modified sequence
atgaagagcagcggccccgtggagagactgctgagagccctgggcagaagagacagcagcagagccgccagcagacccagaaaggccgagccccacagcttcagagagaaggtgttcagaaagaagccccccgtgtgcgccgtgtgcaaggtgaccatcgacggcaccggcgtgagctgcagagtgtgcaaggtggccacccacagaaagtgcgaggccaaggtgaccagcgcctgccaggccctgccccccgtggagctgagaagaaacaccgcccccgtgagaagaatcgagcacctgggcagcaccaagagcctgaaccacagcaagcagagaagcaccctgcccagaagcttcagcctggaccccctgatggagagaagatgggacctggacctgacctacgtgaccgagagaatcctggccgccgccttccccgccagacccgacgagcagagacacagaggccacctgagagagctggcccacgtgctgcagagcaagcacagagacaagtacctgctgttcaacctgagcgagaagagacacgacctgaccagactgaaccccaaggtgcaggacttcggctggcccgagctgcacgccccccccctggacaagctgtgcagcatctgcaaggccatggagacctggctgagcgccgacccccagcacgtggtggtgctgtactgcaagggcaacaagggcaagctgggcgtgatcgtgagcgcctacatgcactacagcaagatcagcgccggcgccgaccaggccctggccaccctgaccatgagaaagttctgcgaggacaaggtggccaccgagctgcagcccagccagagaagatacatcagctacttcagcggcctgctgagcggcagcatcagaatgaacagcagccccctgttcctgcactacgtgctgatccccatgctgcccgccttcgagcccggcaccggcttccagcccttcctgaagatctaccagagcatgcagctggtgtacaccagcggcgtgtaccacatcgccggccccggcccccagcagctgtgcatcagcctggagcccgccctgctgctgaagggcgacgtgatggtgacctgctaccacaagggcggcagaggcaccgacagaaccctggtgttcagagtgcagttccacacctgcaccatccacggcccccagctgaccttccccaaggaccagctggacgaggcctggaccgacgagagattccccttccaggccagcgtggagttcgtgttcagcagcagccccgagaagatcaagggcagcacccccagaaacgaccccagcgtgagcgtggactacaacaccaccgagcccgccgtgagatgggacagctacgagaacttcaaccagcaccacgaggacagcgtggacggcagcctgacccacaccagaggccccctggacggcagcccctacgcccaggtgcagagaccccccagacagaccccccccgcccccagccccgagcccccccccccccccatgctgagcgtgagcagcgacagcggccacagcagcaccctgaccaccgagcccgccgccgagagccccggcagacccccccccaccgccgccgagagacaggagctggacagactgctgggcggctgcggcgtggccagcggcggcagaggcgccggcagagagaccgccatcctggacgacgaggagcagcccaccgtgggcggcggcccccacctgggcgtgtaccccggccacagacccggcctgagcagacactgcagctgcagacagggctacagagagccctgcggcgtgcccaacggcggctactacagacccgagggcaccctggagagaagaagactggcctacggcggctacgagggcagcccccagggctacgccgaggccagcatggagaagagaagactgtgcagaagcctgagcgagggcctgtacccctacccccccgagatgggcaagcccgccaccggcgacttcggctacagagcccccggctacagagaggtggtgatcctggaggaccccggcctgcccgccctgtacccctgccccgcctgcgaggagaagctggccctgcccaccgccgccctgtacggcctgagactggagagagaggccggcgagggctgggccagcgaggccggcaagcccctgctgcaccccgtgagacccggccaccccctgcccctgctgctgcccgcctgcggccaccaccacgcccccatgcccgactacagctgcctgaagccccccaaggccggcgaggagggccacgagggctgcagctacaccatgtgccccgagggcagatacggccaccccggctaccccgccctggtgacctacagctacggcggcgccgtgcccagctactgccccgcctacggcagagtgccccacagctgcggcagccccggcgagggcagaggctaccccagccccggcgcccacagccccagagccggcagcatcagccccggcagccccccctacccccagagcagaaagctgagctacgagatccccaccgaggagggcggcgacagataccccctgcccggccacctggccagcgccggccccctggccagcgccgagagcctggagcccgtgagctggagagagggccccagcggccacagcaccctgcccagaagccccagagacgccccctgcagcgccagcagcgagctgagcggccccagcacccccctgcacaccagcagccccgtgcagggcaaggagagcaccagaagacaggacaccagaagccccaccagcgcccccacccagagactgagccccggcgaggccctgccccccgtgagccaggccggcaccggcaaggcccccgagctgcccagcggcagcggccccgagcccctggcccccagccccgtgagccccaccttcccccccagcagccccagcgactggccccaggagagaagccccggcggccacagcgacggcgccagccccagaagccccgtgcccaccaccctgcccggcctgagacacgccccctggcagggccccagaggcccccccgacagccccgacggcagccccctgacccccgtgcccagccagatgccctggctggtggccagccccgagcccccccagagcagccccacccccgccttccccctggccgccagctacgacaccaacggcctgagccagccccccctgcccgagaagagacacctgcccggccccggccagcagcccggcccctggggccccgagcaggccagcagccccgccagaggcatcagccaccacgtgaccttcgcccccctgctgagcgacaacgtgccccagacccccgagccccccacccaggagagccagagcaacgtgaagttcgtgcaggacaccagcaagttctggtacaagccccacctgagcagagaccaggccatcgccctgctgaaggacaaggaccccggcgccttcctgatcagagacagccacagcttccagggcgcctacggcctggccctgaaggtggccacccccccccccagcgcccagccctggaagggcgaccccgtggagcagctggtgagacacttcctgatcgagaccggccccaagggcgtgaagatcaagggctgccccagcgagccctacttcggcagcctgagcgccctggtgagccagcacagcatcagccccatcagcctgccctgctgcctgagaatccccagcaaggaccccctggaggagacccccgaggcccccgtgcccaccaacatgagcaccgccgccgacctgctgagacagggcgccgcctgcagcgtgctgtacctgaccagcgtggagaccgagagcctgaccggcccccaggccgtggccagagccagcagcgccgccctgagctgcagccccagacccacccccgccgtggtgcacttcaaggtgagcgcccagggcatcaccctgaccgacaaccagagaaagctgttcttcagaagacactaccccgtgaacagcatcaccttcagcagcaccgacccccaggacagaagatggaccaaccccgacggcaccaccagcaagatcttcggcttcgtggccaagaagcccggcagcccctgggagaacgtgtgccacctgttcgccgagctggaccccgaccagcccgccggcgccatcgtgaccttcatcaccaaggtgctgctgggccagagaaagtag

SEQ ID NO: 247335 - DNA, 3858 bp, Artificial Sequence
  derived and/or modified sequence
atggagagaagatgggacctggacctgacctacgtgaccgagagaatcctggccgccgccttccccgccagacccgacgagcagagacacagaggccacctgagagagctggcccacgtgctgcagagcaagcacagagacaagtacctgctgttcaacctgagcgagaagagacacgacctgaccagactgaaccccaaggtgcaggacttcggctggcccgagctgcacgccccccccctggacaagctgtgcagcatctgcaaggccatggagacctggctgagcgccgacccccagcacgtggtggtgctgtactgcaagggcaacaagggcaagctgggcgtgatcgtgagcgcctacatgcactacagcaagatcagcgccggcgccgaccaggccctggccaccctgaccatgagaaagttctgcgaggacaaggtggccaccgagctgcagcccagccagagaagatacatcagctacttcagcggcctgctgagcggcagcatcagaatgaacagcagccccctgttcctgcactacgtgctgatccccatgctgcccgccttcgagcccggcaccggcttccagcccttcctgaagatctaccagagcatgcagctggtgtacaccagcggcgtgtaccacatcgccggccccggcccccagcagctgtgcatcagcctggagcccgccctgctgctgaagggcgacgtgatggtgacctgctaccacaagggcggcagaggcaccgacagaaccctggtgttcagagtgcagttccacacctgcaccatccacggcccccagctgaccttccccaaggaccagctggacgaggcctggaccgacgagagattccccttccaggccagcgtggagttcgtgttcagcagcagccccgagaagatcaagggcagcacccccagaaacgaccccagcgtgagcgtggactacaacaccaccgagcccgccgtgagatgggacagctacgagaacttcaaccagcaccacgaggacagcgtggacggcagcctgacccacaccagaggccccctggacggcagcccctacgcccaggtgcagagaccccccagacagaccccccccgcccccagccccgagcccccccccccccccatgctgagcgtgagcagcgacagcggccacagcagcaccctgaccaccgagcccgccgccgagagccccggcagacccccccccaccgccgccgagagacaggagctggacagactgctgggcggctgcggcgtggccagcggcggcagaggcgccggcagagagaccgccatcctggacgacgaggagcagcccaccgtgggcggcggcccccacctgggcgtgtaccccggccacagacccggcctgagcagacactgcagctgcagacagggctacagagagccctgcggcgtgcccaacggcggctactacagacccgagggcaccctggagagaagaagactggcctacggcggctacgagggcagcccccagggctacgccgaggccagcatggagaagagaagactgtgcagaagcctgagcgagggcctgtacccctacccccccgagatgggcaagcccgccaccggcgacttcggctacagagcccccggctacagagaggtggtgatcctggaggaccccggcctgcccgccctgtacccctgccccgcctgcgaggagaagctggccctgcccaccgccgccctgtacggcctgagactggagagagaggccggcgagggctgggccagcgaggccggcaagcccctgctgcaccccgtgagacccggccaccccctgcccctgctgctgcccgcctgcggccaccaccacgcccccatgcccgactacagctgcctgaagccccccaaggccggcgaggagggccacgagggctgcagctacaccatgtgccccgagggcagatacggccaccccggctaccccgccctggtgacctacagctacggcggcgccgtgcccagctactgccccgcctacggcagagtgccccacagctgcggcagccccggcgagggcagaggctaccccagccccggcgcccacagccccagagccggcagcatcagccccggcagccccccctacccccagagcagaaagctgagctacgagatccccaccgaggagggcggcgacagataccccctgcccggccacctggccagcgccggccccctggccagcgccgagagcctggagcccgtgagctggagagagggccccagcggccacagcaccctgcccagaagccccagagacgccccctgcagcgccagcagcgagctgagcggccccagcacccccctgcacaccagcagccccgtgcagggcaaggagagcaccagaagacaggacaccagaagccccaccagcgcccccacccagagactgagccccggcgaggccctgccccccgtgagccaggccggcaccggcaaggcccccgagctgcccagcggcagcggccccgagcccctggcccccagccccgtgagccccaccttcccccccagcagccccagcgactggccccaggagagaagccccggcggccacagcgacggcgccagccccagaagccccgtgcccaccaccctgcccggcctgagacacgccccctggcagggccccagaggcccccccgacagccccgacggcagccccctgacccccgtgcccagccagatgccctggctggtggccagccccgagcccccccagagcagccccacccccgccttccccctggccgccagctacgacaccaacggcctgagccagccccccctgcccgagaagagacacctgcccggccccggccagcagcccggcccctggggccccgagcaggccagcagccccgccagaggcatcagccaccacgtgaccttcgcccccctgctgagcgacaacgtgccccagacccccgagccccccacccaggagagccagagcaacgtgaagttcgtgcaggacaccagcaagttctggtacaagccccacctgagcagagaccaggccatcgccctgctgaaggacaaggaccccggcgccttcctgatcagagacagccacagcttccagggcgcctacggcctggccctgaaggtggccacccccccccccagcgcccagccctggaagggcgaccccgtggagcagctggtgagacacttcctgatcgagaccggccccaagggcgtgaagatcaagggctgccccagcgagccctacttcggcagcctgagcgccctggtgagccagcacagcatcagccccatcagcctgccctgctgcctgagaatccccagcaaggaccccctggaggagacccccgaggcccccgtgcccaccaacatgagcaccgccgccgacctgctgagacagggcgccgcctgcagcgtgctgtacctgaccagcgtggagaccgagagcctgaccggcccccaggccgtggccagagccagcagcgccgccctgagctgcagccccagacccacccccgccgtggtgcacttcaaggtgagcgcccagggcatcaccctgaccgacaaccagagaaagctgttcttcagaagacactaccccgtgaacagcatcaccttcagcagcaccgacccccaggacagaagatggaccaaccccgacggcaccaccagcaagatcttcggcttcgtggccaagaagcccggcagcccctgggagaacgtgtgccacctgttcgccgagctggaccccgaccagcccgccggcgccatcgtgaccttcatcaccaaggtgctgctgggccagagaaagtag

SEQ ID NO: 247336 - DNA, 2346 bp, Artificial Sequence
  derived and/or modified sequence
atgaagagcagcggccccgtggagagactgctgagagccctgggcagaagagacagcagcagagccgccagcagacccagaaaggccgagccccacagcttcagagagaaggtgttcagaaagaagccccccgtgtgcgccgtgtgcaaggtgaccatcgacggcaccggcgtgagctgcagagtgtgcaaggtggccacccacagaaagtgcgaggccaaggtgaccagcgcctgccaggccctgccccccgtggagctgagaagaaacaccgcccccgtgagaagaatcgagcacctgggcagcaccaagagcctgaaccacagcaagcagagaagcaccctgcccagaagcttcagcctggaccccctgatggagagaagatgggacctggacctgacctacgtgaccgagagaatcctggccgccgccttccccgccagacccgacgagcagagacacagaggccacctgagagagctggcccacgtgctgcagagcaagcacagagacaagtacctgctgttcaacctgagcgagaagagacacgacctgaccagactgaaccccaaggtgcaggacttcggctggcccgagctgcacgccccccccctggacaagctgtgcagcatctgcaaggccatggagacctggctgagcgccgacccccagcacgtggtggtgctgtactgcaagggcaacaagggcaagctgggcgtgatcgtgagcgcctacatgcactacagcaagatcagcgccggcgccgaccaggccctggccaccctgaccatgagaaagttctgcgaggacaaggtggccaccgagctgcagcccagccagagaagatacatcagctacttcagcggcctgctgagcggcagcatcagaatgaacagcagccccctgttcctgcactacgtgctgatccccatgctgcccgccttcgagcccggcaccggcttccagcccttcctgaagatctaccagagcatgcagctggtgtacaccagcggcgtgtaccacatcgccggccccggcccccagcagctgtgcatcagcctggagcccgccctgctgctgaagggcgacgtgatggtgacctgctaccacaagggcggcagaggcaccgacagaaccctggtgttcagagtgcagttccacacctgcaccatccacggcccccagctgaccttccccaaggaccagctggacgaggcctggaccgacgagagattccccttccaggccagcgtggagttcgtgttcagcagcagccccgagaagatcaagggcagcacccccagaaacgaccccagcgtgagcgtggactacaacaccaccgagcccgccgtgagatgggacagctacgagaacttcaaccagcaccacgaggacagcgtggacggcagcctgacccacaccagaggccccctggacggcagcccctacgcccaggtgcagagaccccccagacagaccccccccgcccccagccccgagcccccccccccccccatgctgagcgtgagcagcgacagcggccacagcagcaccctgaccaccgagcccgccgccgagagccccggcagacccccccccaccgccgccgagagacaggagctggacagactgctgggcggctgcggcgtggccagcggcggcagaggcgccggcagagagaccgccatcctggacgacgaggagcagcccaccgtgggcggcggcccccacctgggcgtgtaccccggccacagacccggcctgagcagacactgcagctgcagacagggctacagagagccctgcggcgtgcccaacggcggctactacagacccgagggcaccctggagagaagaagactggcctacggcggctacgagggcagcccccagggctacgccgaggccagcatggagaagagaagactgtgcagaagcctgagcgagggcctgtacccctacccccccgagatgggcaagcccgccaccggcgacttcggctacagagccagcagcgccgccctgagctgcagccccagacccacccccgccgtggtgcacttcaaggtgagcgcccagggcatcaccctgaccgacaaccagagaaagctgttcttcagaagacactaccccgtgaacagcatcaccttcagcagcaccgacccccaggacagaagatggaccaaccccgacggcaccaccagcaagatcttcggcttcgtggccaagaagcccggcagcccctgggagaacgtgtgccacctgttcgccgagctggaccccgaccagcccgccggcgccatcgtgaccttcatcaccaaggtgctgctgggccagagaaagtag

SEQ ID NO: 247337 - DNA, 4200 bp, Artificial Sequence
  derived and/or modified sequence
atgaagagcagcggccccgtggagagactgctgagagccctgggcagaagagacagcagcagagccgccagcagacccagaaaggccgagccccacagcttcagagagaaggtgttcagaaagaagccccccgtgtgcgccgtgtgcaaggtgaccatcgacggcaccggcgtgagctgcagagtgtgcaaggtggccacccacagaaagtgcgaggccaaggtgaccagcgcctgccaggccctgccccccgtggagctgagaagaaacaccgcccccgtgagaagaatcgagcacctgggcagcaccaagagcctgaaccacagcaagcagagaagcaccctgcccagaagcttcagcctggaccccctgatggagagaagatgggacctggacctgacctacgtgaccgagagaatcctggccgccgccttccccgccagacccgacgagcagagacacagaggccacctgagagagctggcccacgtgctgcagagcaagcacagagacaagtacctgctgttcaacctgagcgagaagagacacgacctgaccagactgaaccccaaggtgcaggacttcggctggcccgagctgcacgccccccccctggacaagctgtgcagcatctgcaaggccatggagacctggctgagcgccgacccccagcacgtggtggtgctgtactgcaagggcaacaagggcaagctgggcgtgatcgtgagcgcctacatgcactacagcaagatcagcgccggcgccgaccaggccctggccaccctgaccatgagaaagttctgcgaggacaaggtggccaccgagctgcagcccagccagagaagatacatcagctacttcagcggcctgctgagcggcagcatcagaatgaacagcagccccctgttcctgcactacgtgctgatccccatgctgcccgccttcgagcccggcaccggcttccagcccttcctgaagatctaccagagcatgcagctggtgtacaccagcggcgtgtaccacatcgccggccccggcccccagcagctgtgcatcagcctggagcccgccctgctgctgaagggcgacgtgatggtgacctgctaccacaagggcggcagaggcaccgacagaaccctggtgttcagagtgcagttccacacctgcaccatccacggcccccagctgaccttccccaaggaccagctggacgaggcctggaccgacgagagattccccttccaggccagcgtggagttcgtgttcagcagcagccccgagaagatcaagggcagcacccccagaaacgaccccagcgtgagcgtggactacaacaccaccgagcccgccgtgagatgggacagctacgagaacttcaaccagcaccacgaggacagcgtggacggcagcctgacccacaccagaggccccctggacggcagcccctacgcccaggtgcagagaccccccagacagaccccccccgcccccagccccgagcccccccccccccccatgctgagcgtgagcagcgacagcggccacagcagcaccctgaccaccgagcccgccgccgagagccccggcagacccccccccaccgccgccgagagacaggagctggacagactgctgggcggctgcggcgtggccagcggcggcagaggcgccggcagagagaccgccatcctggacgacgaggagcagcccaccgtgggcggcggcccccacctgggcgtgtaccccggccacagacccggcctgagcagacactgcagctgcagacagggctacagagagccctgcggcgtgcccaacggcggctactacagacccgagggcaccctggagagaagaagactggcctacggcggctacgagggcagcccccagggctacgccgaggccagcatggagaagagaagactgtgcagaagcctgagcgagggcctgtacccctacccccccgagatgggcaagcccgccaccggcgacttcggctacagagcccccggctacagagaggtggtgatcctggaggaccccggcctgcccgccctgtacccctgccccgccagcctgtacggcctgagactggagagagaggccggcgagggctgggccagcgaggccggcaagcccctgctgcaccccgtgagacccggccaccccctgcccctgctgctgcccgcctgcggccaccaccacgcccccatgcccgactacagctgcctgaagccccccaaggccggcgaggagggccacgagggctgcagctacaccatgtgccccgagggcagatacggccaccccggctaccccgccctggtgacctacagctacggcggcgccgtgcccagctactgccccgcctacggcagagtgccccacagctgcggcagccccggcgagggcagaggctaccccagccccggcgcccacagccccagagccggcagcatcagccccggcagccccccctacccccagagcagaaagctgagctacgagatccccaccgaggagggcggcgacagataccccctgcccggccacctggccagcgccggccccctggccagcgccgagagcctggagcccgtgagctggagagagggccccagcggccacagcaccctgcccagaagccccagagacgccccctgcagcgccagcagcgagctgagcggccccagcacccccctgcacaccagcagccccgtgcagggcaaggagagcaccagaagacaggacaccagaagccccaccagcgcccccacccagagactgagccccggcgaggccctgccccccgtgagccaggccggcaccggcaaggcccccgagctgcccagcggcagcggccccgagcccctggcccccagccccgtgagccccaccttcccccccagcagccccagcgactggccccaggagagaagccccggcggccacagcgacggcgccagccccagaagccccgtgcccaccaccctgcccggcctgagacacgccccctggcagggccccagaggcccccccgacagccccgacggcagccccctgacccccgtgcccagccagatgccctggctggtggccagccccgagcccccccagagcagccccacccccgccttccccctggccgccagctacgacaccaacggcctgagccagccccccctgcccgagaagagacacctgcccggccccggccagcagcccggcccctggggccccgagcaggccagcagccccgccagaggcatcagccaccacgtgaccttcgcccccctgctgagcgacaacgtgccccagacccccgagccccccacccaggagagccagagcaacgtgaagttcgtgcaggacaccagcaagttctggtacaagccccacctgagcagagaccaggccatcgccctgctgaaggacaaggaccccggcgccttcctgatcagagacagccacagcttccagggcgcctacggcctggccctgaaggtggccacccccccccccagcgcccagccctggaagggcgaccccgtggagcagctggtgagacacttcctgatcgagaccggccccaagggcgtgaagatcaagggctgccccagcgagccctacttcggcagcctgagcgccctggtgagccagcacagcatcagccccatcagcctgccctgctgcctgagaatccccagcaaggaccccctggaggagacccccgaggcccccgtgcccaccaacatgagcaccgccgccgacctgctgagacagggcgccgcctgcagcgtgctgtacctgaccagcgtggagaccgagagcctgaccggcccccaggccgtggccagagccagcagcgccgccctgagctgcagccccagacccacccccgccgtggtgcacttcaaggtgagcgcccagggcatcaccctgaccgacaaccagagaaagctgttcttcagaagacactaccccgtgaacagcatcaccttcagcagcaccgacccccaggacagaagatggaccaaccccgacggcaccaccagcaagatcttcggcttcgtggccaagaagcccggcagcccctgggagaacgtgtgccacctgttcgccgagctggaccccgaccagcccgccggcgccatcgtgaccttcatcaccaaggtgctgctgggccagagaaagtag

SEQ ID NO: 247338 - DNA, 4230 bp, Artificial Sequence
  derived and/or modified sequence
atgaaatcctccgggcccgtagaaaggctcctgagggccttaggacgacgggactcaagtcgggccgctagccggccacggaaagcagagccacactcctttagagaaaaggtgtttagaaagaagccacccgtgtgtgctgtgtgcaaagtaaccatcgacggtactggggtgtcatgccgcgtgtgtaaagtggcaacgcatcgcaagtgtgaagccaaagttacttcggcatgccaggctctgccacctgtcgaactccgccggaacaccgcccctgtccggcgcatcgaacatctgggctccacgaaaagtctaaaccactccaagcagaggtctaccctgccgcgttccttctcattggacccattaatggagaggcgctgggaccttgacttgacctatgttaccgagagaattcttgctgccgcatttcctgctagacccgacgagcagaggcacagaggacacctccgggaactggcacatgtgctgcagagtaagcacagagacaagtatctgctctttaacctgtccgagaaacggcacgatctaacccggctgaatcctaaggtgcaggacttcgggtggcctgagttgcacgccccaccgctggacaagctgtgtagcatttgtaaggcgatggaaacttggctgtcggcagaccctcagcatgtggtggtgctgtattgcaaggggaataaaggcaaattgggggtcatcgtctctgcctacatgcattacagcaagatctctgccggcgctgaccaggccctggcgactcttactatgcggaagttttgtgaggacaaggtcgctaccgagctccagccgtctcagcggcgatacattagttattttagcgggctgctatcaggcagcatcagaatgaactcaagccccctctttctccattatgttttgatccctatgcttcctgctttcgagcccggcacaggttttcagccgtttctcaagatctaccagagtatgcaacttgtgtacacatctggcgtctatcacatagccgggccaggcccacagcagctatgcatatcactggaacctgcgctcctgctcaagggggatgtgatggttacatgttaccataaaggcggcaggggcacagaccggacccttgtctttcgggtccaattccacacttgcactattcacgggccacagttgacatttccaaaggatcagctcgacgaggcgtggaccgacgagagattcccatttcaggccagcgtggaattcgtgttttccagctcccccgaaaagataaaaggttccacaccccggaacgatccgagtgttagtgtggactacaacactacagaacccgccgttcgctgggactcttatgagaacttcaatcagcatcacgaggacagcgtcgatggctccttgacgcacacccgcgggccgttggacggctccccttatgctcaggtacaaagacctccacgccaaaccccccctgcaccctcacccgaacctccacctcccccaatgctttcagtgtcctctgattccgggcattcttcaactctgacgaccgaacctgccgcagagagtccaggacggcctccccccacggctgccgagcgccaggagctggataggttgctgggcggctgcggcgtggcctctggcggccgtggagcaggacgcgagactgctattttagatgacgaagagcagccaactgtgggcggaggtcctcacctgggggtgtacccgggccatcggcccggactgagtaggcactgttcatgcagacagggctatcgagagccttgcggggtgcccaatggtgggtactatcgcccagaaggcacactagagcgaaggagactggcctatgggggttatgaaggctccccgcagggctatgcagaagcctcaatggagaaaagaagactctgccgatcacttagcgaagggttatatccttatccacctgaaatgggaaagcccgccaccggagatttcggttatcgagcaccaggatatagggaggttgtgattttggaggatcccggactccccgcactgtacccttgcccagcatgcgaagagaaactggctctcccgactgcggccttgtacggactgcgtctcgagagggaagctggggaaggctgggcctcagaagcaggcaaaccattacttcatcctgtgcggcccggacatcccctcccgctcctgctccctgcctgtggacatcatcatgcccccatgcctgactattcttgcctgaaaccacccaaggccggcgaggagggccacgagggctgcagctacaccatgtgtccagagggccggtacgggcaccccggctacccggcactggtcacctattcttacggcggggcagtgccatcctactgtcctgcctacgggcgggttccacactcctgtgggtctccgggggaaggcagggggtacccttcaccgggcgcccatagcccccgagcagggagcatttcgccgggatcccccccgtatccccagtcccgaaagctgagctacgaaatccccaccgaagagggtggcgatagatatccccttccagggcacctggcgtctgcaggccccctggcctctgctgagtcactggagcctgtaagctggcgggaaggaccctccggtcattcaacacttccaagatcgccaagggacgctccctgcagcgcatcaagtgaattatctggaccgagtactcccctgcatacctcgtctcctgtgcaggggaaggagtctacaaggcgccaggacaccagatctccaactagtgcccccacacaaagactgagcccgggggaagccctccctcccgtatcacaggctggcaccggcaaagccccagaactgccaagtggcagtggaccagaacctctggcccccagcccagtctctcccaccttccccccctcatcccctagtgattggccgcaggaacggtcacccggaggtcattcagacggagccagcccccggagtcccgtaccaacgaccctaccaggccttagacatgccccttggcaaggccctagaggccctcctgactcaccggacggatcacccctcacgccagttccttcccagatgccctggttggtcgctagtcctgaaccgccccagagttcacccactccagcattcccgctcgccgccagctatgacactaacgggctgtctcagcccccactgcctgagaagaggcacctgccaggccctgggcaacaacccgggccatggggtccagagcaagcgtcttccccagcacgaggcatttctcatcatgtgaccttcgctccacttctctcagacaatgtgcctcagacaccagagccgccaacccaggaatcgcaatctaacgtgaagttcgttcaggatacgtcaaagttttggtataaaccccatctgtccagggatcaggctatcgctctgcttaaagataaagaccccggagccttcctcatcagggattctcactccttccaaggggcctatggtcttgccttaaaggtagccacccctcctcctagtgcgcagccatggaaaggagaccccgtagaacagctcgtgaggcattttttgattgagacagggcccaagggagttaaaattaagggatgtccttcagaaccttacttcgggagtctgtcagccctggtatcccagcacagcatttcccccattagcttaccctgttgcctgaggataccgtccaaagaccctctcgaggagactcccgaagcgcccgttcccacaaacatgagcacagcagccgacctgctgaggcagggagccgcctgcagcgtgctgtatctgacaagcgtcgaaacagagtctttgactgggcctcaggcagtcgccagagctagtagtgcagccctgtcttgcagtcccagacccacccctgctgtcgtgcattttaaggtgtctgcccagggtattacccttacagacaaccagcgaaagctgttctttcggcgacattacccagtcaactccatcacattttctagtacagatccacaggatcgtcgttggaccaacccagacggtacaacttcaaaaatctttggatttgtggcaaaaaaacctgggagcccttgggagaatgtatgccacctcttcgcagagctggaccctgatcagcctgctggtgctattgtgacgtttatcactaaggtgctcctcgggcagagaaagtag

SEQ ID NO: 247339 - DNA, 3858 bp, Artificial Sequence
  derived and/or modified sequence
atggaacgtcgttgggacctggacctgacgtacgttacagagagaattttggccgccgccttccccgcaaggcctgatgagcaaagacatcgtggccatctgagggaactggcccatgtgctgcagagtaaacaccgggacaagtaccttctcttcaacttatccgaaaaaagacatgatctgacacgtttaaatccgaaggtccaagacttcggctggccggagttacacgctcctccattggacaagctgtgcagcatatgcaaggctatggaaacctggctgtcagcagacccccagcatgtggtcgtcttatactgcaaggggaataaggggaaactgggggtgattgtcagtgcgtacatgcactactccaagattagtgcaggcgctgatcaggccttagccacgctgaccatgagaaagttctgcgaggacaaagttgctacggaacttcaaccgtctcagcggaggtacatcagttatttctcaggcttgctgtcaggaagtataaggatgaacagctctcctctgttcttgcactatgtgctgattccaatgttgcccgcttttgagcccgggaccggctttcagccttttctaaaaatctaccaaagcatgcagctggtatacacctccggggtgtaccatatagcgggacctggtccacaacagctgtgtatctctctcgagcccgctctccttctcaagggtgacgttatggtaacgtgctatcacaaaggcggaaggggcactgatcgcactctggtctttagagtccaatttcatacttgtactatccacgggcctcagcttacctttcctaaagatcagctagatgaggcatggacagacgaacgcttcccgttccaggcctctgtagagttcgtgttcagcagcagccctgagaaaattaaaggaagtaccccaagaaatgatcccagcgtttccgtggattataacaccaccgagccggccgtacggtgggattcctatgaaaacttcaatcagcaccatgaagactccgtagacggcagtttaactcacacccgcggcccccttgatggctccccttatgcgcaggtgcagaggccccctagacagactccccctgctccctcgcctgagccccctcctccccctatgctgtcggttagctcagatagcggacactctagcaccttaaccacggaaccagccgccgagtcccccggcaggccaccacccacggccgccgagcggcaggagctggacaggttactgggaggctgtggggtggcgtcaggaggccggggagccggccgagagacagctattctcgatgatgaagagcagcccacggtggggggcggcccacatctgggggtctatcccggacacagaccaggcttgtctaggcactgtagctgccggcagggataccgcgaaccgtgcggggtgccaaacggcgggtattacagacctgaaggcaccctcgagcgccggcggttagcctacgggggctatgagggtagccctcaaggttacgccgaggcgagtatggagaaacgacgactgtgtaggtcactgtcggagggcctgtatccctatccgcccgaaatgggcaaaccagcaacaggcgacttcggttaccgggcgcctggctaccgcgaagtcgtgattttagaggaccctggattgccagctctttatccatgcccagcctgcgaggagaagctcgccctgcctactgcggcactctatggactccgtctcgagagagaagctggagaaggatgggccagcgaagccggtaagccccttttacatcccgtgaggcccgggcaccccctccctctgctcctgccagcctgtgggcatcaccacgcgcccatgccggactacagctgcctgaagccacctaaggcgggcgaggagggccacgaggggtgctcttatactatgtgccctgaaggaaggtacgggcaccccggctatccggcactagtgacctatagctatggaggggctgtcccttcatactgcccagcatatgggcgggtgccgcattcctgcggcagccctggggaagggcgaggctatccttcccccggcgctcactctccccgggccgggtccatctcccccggttcacccccctacccccaatcacgcaagctcagttatgagatcccaactgaggagggcggcgatcggtaccccttgccaggacacctcgcgtccgccgggccactcgcatccgctgagagtcttgaacccgtgagctggcgagagggcccctctgggcattccacactgccccgcagtccgcgggacgcgccttgtagcgccagttcagaactgtcagggccgagcacgcccctacatacttcttcacctgtgcaaggaaaggagtctacccggcggcaagacacaaggtctcctacaagcgccccaacccagcggctgtcccccggagaggccctgcctccggtctcccaggctggcacgggcaaggccccagagcttccaagcggaagtggcccagaaccactggctccctcccctgtctcccctacattcccaccatcctcgcctagcgactggccacaggagaggtcccccggagggcattcagacggggcatcccctagatcacccgtccctacaacactccccggattgcgccatgccccttggcagggcccacggggccctcccgattcacccgacggctccccactcaccccagtgccatctcagatgccatggctcgtggcgtcccctgaaccccctcagtcttctcccaccccagcattccctctggccgcctcctatgatacaaacgggctcagccaacctcccctgcctgagaagaggcatctacctggaccgggacagcaaccgggcccttggggccctgagcaggcctccagtccagctcgcgggatcagtcatcacgttacgttcgcacctttgctgtcagacaacgtcccccagactcctgagcccccgactcaagagtcccagtccaacgtgaagttcgttcaagacacctccaaattttggtacaagccccatttgtcacgggatcaagccattgccctgttgaaggacaaggatcccggcgcatttttaatccgggatagccacagcttccagggtgcttatggcctcgccctcaaagtggcaactccccctcccagcgctcagccctggaagggcgacccagtggagcagttagtgcgccactttctaatcgagaccggcccgaaaggcgtaaagataaaggggtgccccagtgaaccctactttggcagtttgagtgccctcgtgtcacaacactcgatttcccctatcagcctgccatgctgtctcagaattccctctaaggaccctcttgaggaaactccggaggctcctgtccctacaaacatgtcaaccgctgcggacctgctcagacagggggccgcctgctcggtgctctatctgacttccgtggagaccgagagtctcactgggccgcaggctgtggcacgagcctccagcgctgccctcagttgcagccccagaccaactcctgccgtcgttcacttcaaagtttcagcacaggggatcaccctaacagacaatcaaaggaaactgttcttccggcgccactacccggtcaactctataacattcagcagtactgatccacaggacagaagatggaccaatcctgacggcaccacctccaagatatttgggttcgtggcaaaaaagccaggtagcccttgggagaacgtctgtcacctgtttgccgagctggacccagaccagcccgctggagcgatcgtcactttcattactaaagtcctgcttggacagcggaagtag

SEQ ID NO: 247340 - DNA, 2346 bp, Artificial Sequence
  derived and/or modified sequence
atgaaatcgagcggacctgttgagcggctcttacgcgccttaggcagaagagattcctcacgagctgccagcaggccaagaaaggctgaacctcacagcttccgggaaaaagtttttcgtaagaagcccccagtgtgtgcagtgtgtaaagttactattgacggtactggcgtgtcctgtagggtctgtaaagtggcaacccataggaaatgtgaggccaaggtgacaagcgcatgccaggcactgccaccagtggaactcaggaggaacacagccccagtgcgacggatcgaacacctcgggtcaacgaagagcctcaaccattctaagcagcggtctacactcccgcgaagcttttctcttgacccgctgatggaaagacgctgggatttggaccttacatacgtcactgagcggatactagctgccgcctttcctgcccgacccgacgagcagcgccatcgggggcacttgagggaactggctcatgtgttgcagtccaaacatcgggataaatatctgctatttaacctatccgagaagcgccacgacctgacaaggctgaaccctaaagtgcaggacttcggctggcccgagctccatgctcctcccctggacaagctttgctcaatttgtaaggcgatggaaacttggctgtccgcggacccacagcatgtggtggtgctgtactgtaaggggaacaagggtaagttgggagtaatcgtctccgcatatatgcactatagcaaaattagtgcgggagcagatcaggctctggcaacattaaccatgagaaaattctgtgaagataaagtcgccaccgagctacagccttcccaacgaagatacatttcctacttctcgggcctgttgtccggttccattcgaatgaactcttcccctctgttcttacactatgtccttattcccatgctgccagcctttgagcctggcacagggttccagccctttctaaaaatttatcagagcatgcagctcgtgtatacttccggcgtttaccatatcgctggccctggaccacagcagctctgcatttccctggaacctgcactcctgctaaagggggatgttatggtgacctgttaccacaaaggcgggagaggaacagatcgtacgctcgtgttccgcgtccagttccacacctgtaccatccacggtccacaacttacttttccaaaggatcagctcgatgaggcatggacagacgaacgtttccccttccaggcaagtgtcgagtttgtgtttagcagttctcctgaaaagatcaaaggatccacacctagaaatgacccatctgtctcggtggactacaataccaccgagcctgccgtgcggtgggactcttacgaaaatttcaatcagcatcatgaagactctgtcgacggatctttaacacacacccgaggccctctcgatgggtcgccttatgctcaagtgcagcgcccacctcgacagacccctccagcaccctcacccgagcctccaccaccccccatgctgtcagtcagctcagattctggccatagtagcacccttaccaccgaacccgctgccgaatcgcccggtcgacccccgcccaccgcagccgaacggcaagagctcgaccgcctgttaggtggctgcggagtggcttccggaggcaggggagcagggcgcgagaccgcgattctagatgatgaggagcaacctacagtgggcgggggaccgcacctcggagtttatccgggtcacagaccgggcttgagtaggcattgttcctgccgccagggctatcgcgaaccttgcggagtgcccaatggaggatactaccggcctgaggggactttggaacgcaggagattggcttatggcgggtatgaaggttcgccacagggatacgcagaagctagcatggaaaaacgacggctttgcaggagcctgtcagagggcctttatccttacccccccgagatgggaaagccagctacaggagactttggctatcgggctagctcagctgcacttagctgctctcccaggcctacgccagcggtggttcacttcaaggtttctgcccaaggaatcactctcacagacaatcagcggaagctgttttttaggcgacactatccagtcaatagcattacattcagttccactgacccccaggaccgaaggtggacaaatcctgacggcaccacctccaagatctttggattcgtcgctaagaagccagggtccccctgggagaacgtgtgtcatctctttgccgagttggaccccgaccagcctgccggggccattgtcacgttcattaccaaggtattgttagggcaaaggaaatag

SEQ ID NO: 247341 - DNA, 4200 bp, Artificial Sequence
  derived and/or modified sequence
atgaagtcatctggacctgtcgaacgcctgctgagggcccttggccggcgggacagttcccgtgctgctagtagaccccgcaaggctgaaccacacagtttccgggaaaaagtgttcaggaagaaaccgcctgtgtgtgcagtctgtaaggtgaccattgacggcacaggcgtgagctgcagagtctgcaaagtcgccactcatcgaaagtgtgaggccaaagtcactagtgcttgtcaagcacttccaccggtggagctccggcgaaatacggctcccgtgagacgcatcgagcacctggggtcaactaagagcttgaatcactcgaagcagcgtagcacccttccgcgctcattctccctggatcccctcatggagaggcgatgggatcttgacctgacttatgtaaccgaaagaattctcgccgctgctttcccagcacgccctgacgagcagcgccaccgcggtcatctgcgggagctggcccatgttcttcagtccaaacaccgagacaaatacttgctgttcaacctgtccgaaaagagacacgatttaactcgtctgaatccaaaagttcaggattttgggtggccagaactgcacgcccctcccttggacaaactgtgcagcatttgcaaagccatggaaacttggttgtcagctgatccacagcatgtcgtagttctctattgcaaaggaaacaaagggaaactaggggtcattgtaagtgcttacatgcactattccaaaatctctgccggagccgaccaagccctcgccactttaacgatgagaaagttttgcgaggataaagtggccactgagttgcagccgtcccagaggcgctacatttcctatttttcaggtttattatctggaagcattcggatgaatagttcacccttatttctgcattacgtgcttatacccatgttaccggcctttgagccggggacgggatttcagccgttcctgaagatttaccagagtatgcagctggtctacacctccggagtgtaccacattgctggtccagggccacagcagctctgtatatcgctggagccagcgctgttactgaagggggatgtaatggtcacgtgttatcataaaggcggtcgcggtactgatcgaacgttggtgttccgcgtgcagttccacacatgtaccattcatggtccacagctgacgtttcctaaggaccagctcgatgaagcttggacagatgagcggtttccgttccaggctagcgtcgagttcgttttcagcagttcccccgaaaaaatcaagggctccaccccccgcaacgacccgtccgtgtcagttgattataatactacagaaccagccgtgcggtgggattcttatgaaaatttcaatcaacaccacgaggatagtgtcgacggatccctcacacatacaagaggcccgcttgacggaagcccttacgcgcaggtgcagcgacccccaagacagaccccccctgctccctctcctgagccaccccctccaccaatgttgagtgtatcctccgacagcggacatagctccacccttactactgaaccagccgccgaaagcccagggcgacctccacccactgctgcggaacggcaagagttggaccggcttctcgggggatgcggagtcgcgtccgggggtcgaggtgcaggccgggaaactgctattcttgatgatgaggagcagccaacagttggcgggggtccccacttgggcgtgtaccccggtcataggccagggctgtctcggcactgctcatgcaggcagggctatagggaaccttgcggcgtgcccaacggtggatactatcgtccagaaggaacattagaacgccggcggttagcctatggaggctacgaaggctctccgcaaggctacgcagaggcatcaatggaaaaaagacgcttgtgccgatccctgagcgagggtctatacccttatccaccggagatgggaaagcccgcaacgggagattttggctacagagcaccaggttatcgcgaggttgtgattttggaggacccagggctgccagccttgtacccttgcccagcgagcctttacggtctgcggctggagagggaagctggggaaggctgggctagcgaagctggaaagcccctgctgcacccagtgcgaccaggtcatcctcttcccctgctcctccctgcctgcggtcatcatcatgcccccatgcccgactacagctgtctcaaacctcctaaagctggtgaagaggggcacgagggatgctcctacactatgtgcccagagggccgctatgggcaccctggatatccagcgctggtgacctattcctatggcggcgccgttcccagctactgtccagcctacggacgtgtccctcactcttgcggcagtccaggggagggccgcggctaccctagcccgggggcacactcccccagagccggcagcatttcccccggcagccctccctatccccaatctaggaagctgagctacgaaatccctacagaagaaggcggtgatagatatccactgccaggccacctggcctctgcagggcctctcgcctccgctgaatctcttgagcctgtgagctggagagaaggtccttccggtcattccactctcccgagatccccgcgggatgcaccgtgctcagccagtagtgaactgagcgggccttcaacacccctccacacctcatctcctgttcaaggaaaggagtccaccagacgtcaggacaccagaagtccaacttctgcacccacgcaacgactctccccaggcgaggctttgccaccagtatcccaggctggaacaggcaaggcgccagagctgccgtccggtagcggcccagaacccctcgccccctctcccgtaagtcccacatttcctccatccagtccctcagattggccacaggagcgctcccccggtggtcactccgacggcgcgagcccacgctctccagttcccacgaccctacctgggctgcgacacgctccatggcagggtccaagaggcccaccagattcaccagatgggagccctctgacgccggtccctagccagatgccttggctggtggcttcgcctgagcccccacagtctagtcccaccccagcctttccccttgctgcaagttatgatactaatgggctctctcagcctcccctccccgaaaaacgacacttgcctgggcccggccagcaacccgggccatggggtccggagcaggcatcttcccctgcacgcggaatctcacatcatgttactttcgccccattgcttagtgataacgtaccgcaaaccccggaacctcctacacaggaatcacagagcaacgtcaagtttgtgcaagacacctcaaaattttggtataaaccacatttgagccgggatcaggccattgctctgctgaaagacaaagaccccggagcgtttctgattcgcgattcccacagttttcagggggcctatgggctggcactcaaggtggctaccccacctccttctgcccagccgtggaaaggcgacccggttgaacagttggttaggcattttctgatcgagaccggaccaaagggggtcaagatcaaaggctgtcccagcgagccttacttcgggtccctgtctgctctcgtatcccagcacagtatctccccgatttctctgccttgttgcctgaggatacccagcaaagacccacttgaagaaacccctgaggctcctgttcccaccaatatgagcactgctgccgatctgctgcggcagggagcggcctgttcggtcctttatctcacaagcgtcgaaacagaatctctgacagggccgcaggccgtggccagagcttcttcagcagcgctgagctgctcccctcgccccacccctgctgtggtccattttaaagtgtctgcccagggtattaccctaacagacaatcaacgaaaactgtttttccgacgtcactaccccgtcaacagcatcaccttttccagtaccgaccctcaggacaggcggtggaccaatcccgacggcaccaccagcaagatttttggcttcgttgccaaaaagcccggttctccctgggaaaacgtttgccacctgtttgccgaactcgatcccgaccaacctgccggtgccatcgttacattcattacaaaggtgttgctaggacaacgcaaatag

SEQ ID NO: 247342 - DNA, 4230 bp, Artificial Sequence
  derived and/or modified sequence
atgaagagcagcggccctgtggagcggctgctgcgggccctgggccggcgggacagcagccgggccgccagccggcccaggaaggccgagccccacagcttccgggagaaggtgttcaggaagaagccccctgtgtgtgctgtgtgcaaggtgaccattgatggcaccggggtgtcctgccgggtgtgcaaggtggccacccacaggaaatgtgaggccaaggtgaccagcgcctgccaggccctgccccctgtggagctgcggaggaacacagcccctgtgagaagaattgagcacctgggcagcaccaagagcctgaaccacagcaagcagaggagcaccctgcccaggagcttcagcctggaccccctgatggagcggcgctgggacctggacctgacctacgtgacagagcgcatcctggccgccgccttccctgcccggccagatgagcagaggcaccggggccacctgcgggagctggcccacgtgctgcagagcaagcaccgggacaagtacctgctcttcaacctgtctgagaagagacatgacctgacccggctgaaccccaaggtgcaggactttggctggccagagctgcacgccccacccctggacaagctgtgcagcatctgcaaggccatggagacctggctgtctgctgacccccagcacgtggtggtgctgtactgcaagggcaacaagggcaagctgggcgtgattgtgtctgcctacatgcactacagcaagatctctgctggagctgaccaggccctggccaccctgaccatgaggaagttctgtgaggacaaggtggccacagagctgcagcccagccagaggcgctacatctcctacttcagcggcctgctgagcggcagcatccgcatgaacagcagccccctcttcctgcactacgtgctgatccccatgctgcctgcctttgagcccggcaccggcttccagcccttcctgaagatctaccagagcatgcagctggtgtacaccagcggcgtgtaccacatcgccggccctggcccccagcagctgtgcatcagcctggagcccgccctgctgctgaagggagatgtgatggtgacctgctaccacaagggcggccggggcacagacaggaccctggtgttccgggtgcagttccacacctgcaccatccacggcccccagctgaccttccccaaggaccagctggatgaggcctggacagatgagcgcttccccttccaggcctctgtggagtttgtgttcagcagcagccctgagaagatcaagggcagcaccccaagaaatgaccccagcgtgtctgtggactacaacaccacagagcctgctgtgcgctgggacagctatgagaacttcaaccagcaccacgaggacagcgtggatggcagcctgacccacacccggggccccctggatggcagcccctatgcccaggtgcagaggcctccccggcagaccccaccagcccccagccctgagcccccacctccacccatgctgtctgtgtccagtgacagcggccacagcagcaccctgaccacagagcctgctgctgagagccctggccggcccccacccacagctgctgagcggcaggagctggaccggctgctgggcggctgcggcgtggccagcggcggcagaggagctggccgggagacagccatcctggatgatgaggagcagcccaccgtgggcggcggcccccacctgggcgtgtacccaggccaccggcccggcctgagccgccactgcagctgccggcagggctaccgggagccctgtggggtgcccaacggcggctactacagacctgagggcaccctggagcggcggcggctggcctatggaggctatgagggcagcccccagggctacgccgaggcctccatggagaagaggcggctgtgccgcagcctgtctgagggcctgtacccctacccacctgagatgggcaagccagccactggagactttggctaccgggcccctggctaccgggaggtggtgatcctggaggaccccggcctgcctgccctgtacccctgcccagcctgtgaggagaagctggccctgcccacagctgccctgtatggcctgcggctggagcgggaggccggggagggctgggccagcgaggccggcaagcccctgctgcaccctgtgcggcccggccaccccctgcccctgctgctgcctgcctgtggccaccaccacgcccccatgccagactacagctgcctgaagccacccaaggccggggaggagggccacgagggctgcagctacaccatgtgcccagagggccgctatggccaccctggctacccagccctggtgacctacagctatggaggagctgtgcccagctactgcccagcctacggccgggtgccccacagctgtggcagccctggagagggccggggctaccccagccctggggcccacagcccccgggccggcagcatcagccctggcagccccccctacccccagagcaggaagctgtcctatgagatccccacagaggagggcggggaccgctaccccctgcccggccacctggccagcgctggccccctggccagcgctgagagcctggagcctgtgtcctggagggagggccccagcggccacagcaccctgcccaggagccccagagatgccccctgcagcgccagcagcgagctgagcggccccagcacccccctgcacaccagcagccctgtgcagggcaaggagagcacccggcggcaggacaccaggagccccaccagcgcccccacccagaggctgagccctggagaggccctgccccctgtgtcccaggccggcaccgggaaggcccctgagctgcccagcggcagcggccctgagcccctggcccccagccctgtgagccccaccttcccccccagcagccccagcgactggccccaggagaggagccctgggggccacagtgatggagccagccccaggagccctgtgcccaccaccctgcccggcctgcggcatgccccctggcagggcccccggggccccccagacagcccagatggcagccccctgacccctgtgcccagccagatgccctggctggtggccagccctgagcccccccagagcagccccaccccagccttccccctggccgccagctatgacaccaacggcctgagccagccccccctgcctgagaagaggcacctgcccggccctggccagcagcccggcccctggggccctgagcaggccagcagccctgcccggggcatcagccaccacgtgacctttgcccccctgctgagtgacaacgtgccccagaccccagagccccccacccaggagagccagagcaatgtgaagtttgtgcaggacaccagcaagttctggtacaagccccacctgagccgggaccaggccatcgccctgctgaaggacaaggaccccggggccttcctgatccgggacagccacagcttccagggcgcctacggcctggccctgaaggtggccaccccaccacccagcgcccagccctggaagggggaccctgtggagcagctggtgcgccacttcctgattgagaccggccccaagggcgtgaagatcaagggctgccccagcgagccctacttcggcagcctgagcgccctggtgtcccagcacagcatcagccccatcagcctgccctgctgcctgcgcatccccagcaaggaccccctggaggagaccccagaggcccctgtgcccaccaacatgagcacagctgctgacctgctgcggcagggcgccgcctgcagcgtgctgtacctgacctctgtggagacagagagcctgaccggcccccaggccgtggcccgggccagcagcgctgccctgagctgcagcccccggcccaccccagctgtggtgcacttcaaggtgtctgcccagggcatcaccctgacagacaaccagaggaagctgttcttcagaagacactaccctgtgaacagcatcaccttcagcagcacagacccccaggaccggcgctggaccaacccagatggcaccaccagcaagatcttcggctttgtggccaagaagccaggcagcccctgggagaatgtgtgccacctgtttgctgagctggaccctgaccagcctgctggggccatcgtgaccttcatcaccaaggtgctgctgggccagaggaagtag

SEQ ID NO: 247343 - DNA, 3858 bp, Artificial Sequence
  derived and/or modified sequence
atggagcggcgctgggacctggacctgacctacgtgacagagcgcatcctggccgccgccttccctgcccggccagatgagcagaggcaccggggccacctgcgggagctggcccacgtgctgcagagcaagcaccgggacaagtacctgctcttcaacctgtctgagaagagacatgacctgacccggctgaaccccaaggtgcaggactttggctggccagagctgcacgccccacccctggacaagctgtgcagcatctgcaaggccatggagacctggctgtctgctgacccccagcacgtggtggtgctgtactgcaagggcaacaagggcaagctgggcgtgattgtgtctgcctacatgcactacagcaagatctctgctggagctgaccaggccctggccaccctgaccatgaggaagttctgtgaggacaaggtggccacagagctgcagcccagccagaggcgctacatctcctacttcagcggcctgctgagcggcagcatccgcatgaacagcagccccctcttcctgcactacgtgctgatccccatgctgcctgcctttgagcccggcaccggcttccagcccttcctgaagatctaccagagcatgcagctggtgtacaccagcggcgtgtaccacatcgccggccctggcccccagcagctgtgcatcagcctggagcccgccctgctgctgaagggagatgtgatggtgacctgctaccacaagggcggccggggcacagacaggaccctggtgttccgggtgcagttccacacctgcaccatccacggcccccagctgaccttccccaaggaccagctggatgaggcctggacagatgagcgcttccccttccaggcctctgtggagtttgtgttcagcagcagccctgagaagatcaagggcagcaccccaagaaatgaccccagcgtgtctgtggactacaacaccacagagcctgctgtgcgctgggacagctatgagaacttcaaccagcaccacgaggacagcgtggatggcagcctgacccacacccggggccccctggatggcagcccctatgcccaggtgcagaggcctccccggcagaccccaccagcccccagccctgagcccccacctccacccatgctgtctgtgtccagtgacagcggccacagcagcaccctgaccacagagcctgctgctgagagccctggccggcccccacccacagctgctgagcggcaggagctggaccggctgctgggcggctgcggcgtggccagcggcggcagaggagctggccgggagacagccatcctggatgatgaggagcagcccaccgtgggcggcggcccccacctgggcgtgtacccaggccaccggcccggcctgagccgccactgcagctgccggcagggctaccgggagccctgtggggtgcccaacggcggctactacagacctgagggcaccctggagcggcggcggctggcctatggaggctatgagggcagcccccagggctacgccgaggcctccatggagaagaggcggctgtgccgcagcctgtctgagggcctgtacccctacccacctgagatgggcaagccagccactggagactttggctaccgggcccctggctaccgggaggtggtgatcctggaggaccccggcctgcctgccctgtacccctgcccagcctgtgaggagaagctggccctgcccacagctgccctgtatggcctgcggctggagcgggaggccggggagggctgggccagcgaggccggcaagcccctgctgcaccctgtgcggcccggccaccccctgcccctgctgctgcctgcctgtggccaccaccacgcccccatgccagactacagctgcctgaagccacccaaggccggggaggagggccacgagggctgcagctacaccatgtgcccagagggccgctatggccaccctggctacccagccctggtgacctacagctatggaggagctgtgcccagctactgcccagcctacggccgggtgccccacagctgtggcagccctggagagggccggggctaccccagccctggggcccacagcccccgggccggcagcatcagccctggcagccccccctacccccagagcaggaagctgtcctatgagatccccacagaggagggcggggaccgctaccccctgcccggccacctggccagcgctggccccctggccagcgctgagagcctggagcctgtgtcctggagggagggccccagcggccacagcaccctgcccaggagccccagagatgccccctgcagcgccagcagcgagctgagcggccccagcacccccctgcacaccagcagccctgtgcagggcaaggagagcacccggcggcaggacaccaggagccccaccagcgcccccacccagaggctgagccctggagaggccctgccccctgtgtcccaggccggcaccgggaaggcccctgagctgcccagcggcagcggccctgagcccctggcccccagccctgtgagccccaccttcccccccagcagccccagcgactggccccaggagaggagccctgggggccacagtgatggagccagccccaggagccctgtgcccaccaccctgcccggcctgcggcatgccccctggcagggcccccggggccccccagacagcccagatggcagccccctgacccctgtgcccagccagatgccctggctggtggccagccctgagcccccccagagcagccccaccccagccttccccctggccgccagctatgacaccaacggcctgagccagccccccctgcctgagaagaggcacctgcccggccctggccagcagcccggcccctggggccctgagcaggccagcagccctgcccggggcatcagccaccacgtgacctttgcccccctgctgagtgacaacgtgccccagaccccagagccccccacccaggagagccagagcaatgtgaagtttgtgcaggacaccagcaagttctggtacaagccccacctgagccgggaccaggccatcgccctgctgaaggacaaggaccccggggccttcctgatccgggacagccacagcttccagggcgcctacggcctggccctgaaggtggccaccccaccacccagcgcccagccctggaagggggaccctgtggagcagctggtgcgccacttcctgattgagaccggccccaagggcgtgaagatcaagggctgccccagcgagccctacttcggcagcctgagcgccctggtgtcccagcacagcatcagccccatcagcctgccctgctgcctgcgcatccccagcaaggaccccctggaggagaccccagaggcccctgtgcccaccaacatgagcacagctgctgacctgctgcggcagggcgccgcctgcagcgtgctgtacctgacctctgtggagacagagagcctgaccggcccccaggccgtggcccgggccagcagcgctgccctgagctgcagcccccggcccaccccagctgtggtgcacttcaaggtgtctgcccagggcatcaccctgacagacaaccagaggaagctgttcttcagaagacactaccctgtgaacagcatcaccttcagcagcacagacccccaggaccggcgctggaccaacccagatggcaccaccagcaagatcttcggctttgtggccaagaagccaggcagcccctgggagaatgtgtgccacctgtttgctgagctggaccctgaccagcctgctggggccatcgtgaccttcatcaccaaggtgctgctgggccagaggaagtag

SEQ ID NO: 247344 - DNA, 2346 bp, Artificial Sequence
  derived and/or modified sequence
atgaagagcagcggccctgtggagcggctgctgcgggccctgggccggcgggacagcagccgggccgccagccggcccaggaaggccgagccccacagcttccgggagaaggtgttcaggaagaagccccctgtgtgtgctgtgtgcaaggtgaccattgatggcaccggggtgtcctgccgggtgtgcaaggtggccacccacaggaaatgtgaggccaaggtgaccagcgcctgccaggccctgccccctgtggagctgcggaggaacacagcccctgtgagaagaattgagcacctgggcagcaccaagagcctgaaccacagcaagcagaggagcaccctgcccaggagcttcagcctggaccccctgatggagcggcgctgggacctggacctgacctacgtgacagagcgcatcctggccgccgccttccctgcccggccagatgagcagaggcaccggggccacctgcgggagctggcccacgtgctgcagagcaagcaccgggacaagtacctgctcttcaacctgtctgagaagagacatgacctgacccggctgaaccccaaggtgcaggactttggctggccagagctgcacgccccacccctggacaagctgtgcagcatctgcaaggccatggagacctggctgtctgctgacccccagcacgtggtggtgctgtactgcaagggcaacaagggcaagctgggcgtgattgtgtctgcctacatgcactacagcaagatctctgctggagctgaccaggccctggccaccctgaccatgaggaagttctgtgaggacaaggtggccacagagctgcagcccagccagaggcgctacatctcctacttcagcggcctgctgagcggcagcatccgcatgaacagcagccccctcttcctgcactacgtgctgatccccatgctgcctgcctttgagcccggcaccggcttccagcccttcctgaagatctaccagagcatgcagctggtgtacaccagcggcgtgtaccacatcgccggccctggcccccagcagctgtgcatcagcctggagcccgccctgctgctgaagggagatgtgatggtgacctgctaccacaagggcggccggggcacagacaggaccctggtgttccgggtgcagttccacacctgcaccatccacggcccccagctgaccttccccaaggaccagctggatgaggcctggacagatgagcgcttccccttccaggcctctgtggagtttgtgttcagcagcagccctgagaagatcaagggcagcaccccaagaaatgaccccagcgtgtctgtggactacaacaccacagagcctgctgtgcgctgggacagctatgagaacttcaaccagcaccacgaggacagcgtggatggcagcctgacccacacccggggccccctggatggcagcccctatgcccaggtgcagaggcctccccggcagaccccaccagcccccagccctgagcccccacctccacccatgctgtctgtgtccagtgacagcggccacagcagcaccctgaccacagagcctgctgctgagagccctggccggcccccacccacagctgctgagcggcaggagctggaccggctgctgggcggctgcggcgtggccagcggcggcagaggagctggccgggagacagccatcctggatgatgaggagcagcccaccgtgggcggcggcccccacctgggcgtgtacccaggccaccggcccggcctgagccgccactgcagctgccggcagggctaccgggagccctgtggggtgcccaacggcggctactacagacctgagggcaccctggagcggcggcggctggcctatggaggctatgagggcagcccccagggctacgccgaggcctccatggagaagaggcggctgtgccgcagcctgtctgagggcctgtacccctacccacctgagatgggcaagccagccactggagactttggctaccgggccagcagcgctgccctgagctgcagcccccggcccaccccagctgtggtgcacttcaaggtgtctgcccagggcatcaccctgacagacaaccagaggaagctgttcttcagaagacactaccctgtgaacagcatcaccttcagcagcacagacccccaggaccggcgctggaccaacccagatggcaccaccagcaagatcttcggctttgtggccaagaagccaggcagcccctgggagaatgtgtgccacctgtttgctgagctggaccctgaccagcctgctggggccatcgtgaccttcatcaccaaggtgctgctgggccagaggaagtag

SEQ ID NO: 247345 - DNA, 4200 bp, Artificial Sequence
  derived and/or modified sequence
atgaagagcagcggccctgtggagcggctgctgcgggccctgggccggcgggacagcagccgggccgccagccggcccaggaaggccgagccccacagcttccgggagaaggtgttcaggaagaagccccctgtgtgtgctgtgtgcaaggtgaccattgatggcaccggggtgtcctgccgggtgtgcaaggtggccacccacaggaaatgtgaggccaaggtgaccagcgcctgccaggccctgccccctgtggagctgcggaggaacacagcccctgtgagaagaattgagcacctgggcagcaccaagagcctgaaccacagcaagcagaggagcaccctgcccaggagcttcagcctggaccccctgatggagcggcgctgggacctggacctgacctacgtgacagagcgcatcctggccgccgccttccctgcccggccagatgagcagaggcaccggggccacctgcgggagctggcccacgtgctgcagagcaagcaccgggacaagtacctgctcttcaacctgtctgagaagagacatgacctgacccggctgaaccccaaggtgcaggactttggctggccagagctgcacgccccacccctggacaagctgtgcagcatctgcaaggccatggagacctggctgtctgctgacccccagcacgtggtggtgctgtactgcaagggcaacaagggcaagctgggcgtgattgtgtctgcctacatgcactacagcaagatctctgctggagctgaccaggccctggccaccctgaccatgaggaagttctgtgaggacaaggtggccacagagctgcagcccagccagaggcgctacatctcctacttcagcggcctgctgagcggcagcatccgcatgaacagcagccccctcttcctgcactacgtgctgatccccatgctgcctgcctttgagcccggcaccggcttccagcccttcctgaagatctaccagagcatgcagctggtgtacaccagcggcgtgtaccacatcgccggccctggcccccagcagctgtgcatcagcctggagcccgccctgctgctgaagggagatgtgatggtgacctgctaccacaagggcggccggggcacagacaggaccctggtgttccgggtgcagttccacacctgcaccatccacggcccccagctgaccttccccaaggaccagctggatgaggcctggacagatgagcgcttccccttccaggcctctgtggagtttgtgttcagcagcagccctgagaagatcaagggcagcaccccaagaaatgaccccagcgtgtctgtggactacaacaccacagagcctgctgtgcgctgggacagctatgagaacttcaaccagcaccacgaggacagcgtggatggcagcctgacccacacccggggccccctggatggcagcccctatgcccaggtgcagaggcctccccggcagaccccaccagcccccagccctgagcccccacctccacccatgctgtctgtgtccagtgacagcggccacagcagcaccctgaccacagagcctgctgctgagagccctggccggcccccacccacagctgctgagcggcaggagctggaccggctgctgggcggctgcggcgtggccagcggcggcagaggagctggccgggagacagccatcctggatgatgaggagcagcccaccgtgggcggcggcccccacctgggcgtgtacccaggccaccggcccggcctgagccgccactgcagctgccggcagggctaccgggagccctgtggggtgcccaacggcggctactacagacctgagggcaccctggagcggcggcggctggcctatggaggctatgagggcagcccccagggctacgccgaggcctccatggagaagaggcggctgtgccgcagcctgtctgagggcctgtacccctacccacctgagatgggcaagccagccactggagactttggctaccgggcccctggctaccgggaggtggtgatcctggaggaccccggcctgcctgccctgtacccctgcccagccagcctgtatggcctgcggctggagcgggaggccggggagggctgggccagcgaggccggcaagcccctgctgcaccctgtgcggcccggccaccccctgcccctgctgctgcctgcctgtggccaccaccacgcccccatgccagactacagctgcctgaagccacccaaggccggggaggagggccacgagggctgcagctacaccatgtgcccagagggccgctatggccaccctggctacccagccctggtgacctacagctatggaggagctgtgcccagctactgcccagcctacggccgggtgccccacagctgtggcagccctggagagggccggggctaccccagccctggggcccacagcccccgggccggcagcatcagccctggcagccccccctacccccagagcaggaagctgtcctatgagatccccacagaggagggcggggaccgctaccccctgcccggccacctggccagcgctggccccctggccagcgctgagagcctggagcctgtgtcctggagggagggccccagcggccacagcaccctgcccaggagccccagagatgccccctgcagcgccagcagcgagctgagcggccccagcacccccctgcacaccagcagccctgtgcagggcaaggagagcacccggcggcaggacaccaggagccccaccagcgcccccacccagaggctgagccctggagaggccctgccccctgtgtcccaggccggcaccgggaaggcccctgagctgcccagcggcagcggccctgagcccctggcccccagccctgtgagccccaccttcccccccagcagccccagcgactggccccaggagaggagccctgggggccacagtgatggagccagccccaggagccctgtgcccaccaccctgcccggcctgcggcatgccccctggcagggcccccggggccccccagacagcccagatggcagccccctgacccctgtgcccagccagatgccctggctggtggccagccctgagcccccccagagcagccccaccccagccttccccctggccgccagctatgacaccaacggcctgagccagccccccctgcctgagaagaggcacctgcccggccctggccagcagcccggcccctggggccctgagcaggccagcagccctgcccggggcatcagccaccacgtgacctttgcccccctgctgagtgacaacgtgccccagaccccagagccccccacccaggagagccagagcaatgtgaagtttgtgcaggacaccagcaagttctggtacaagccccacctgagccgggaccaggccatcgccctgctgaaggacaaggaccccggggccttcctgatccgggacagccacagcttccagggcgcctacggcctggccctgaaggtggccaccccaccacccagcgcccagccctggaagggggaccctgtggagcagctggtgcgccacttcctgattgagaccggccccaagggcgtgaagatcaagggctgccccagcgagccctacttcggcagcctgagcgccctggtgtcccagcacagcatcagccccatcagcctgccctgctgcctgcgcatccccagcaaggaccccctggaggagaccccagaggcccctgtgcccaccaacatgagcacagctgctgacctgctgcggcagggcgccgcctgcagcgtgctgtacctgacctctgtggagacagagagcctgaccggcccccaggccgtggcccgggccagcagcgctgccctgagctgcagcccccggcccaccccagctgtggtgcacttcaaggtgtctgcccagggcatcaccctgacagacaaccagaggaagctgttcttcagaagacactaccctgtgaacagcatcaccttcagcagcacagacccccaggaccggcgctggaccaacccagatggcaccaccagcaagatcttcggctttgtggccaagaagccaggcagcccctgggagaatgtgtgccacctgtttgctgagctggaccctgaccagcctgctggggccatcgtgaccttcatcaccaaggtgctgctgggccagaggaagtag

SEQ ID NO: 247346 - DNA, 4230 bp, Artificial Sequence
  derived and/or modified sequence
atgaagagcagcggccccgtggagcggctgctgcgggccctgggccgccgcgatagtagccgcgcagcgagcaggcccagaaaggccgagccacactccttcagagaaaaagtctttaggaagaagccacctgtctgcgcagtgtgtaaggttaccatagatggcactggagtcagctgtcgggtctgcaaggttgccacccaccgaaagtgcgaggccaaggtcacctcggcgtgccaggctcttccccccgtagagctacgtcgcaacactgcgcctgtccgaagaatcgagcacctcggcagcactaaatctctcaatcattctaagcagcggtccactcttcccagaagcttctcccttgatccactaatggaacgcaggtgggacctggatctgacttacgttaccgagcgtattctcgcagctgcgtttcccgcgagacccgacgagcagaggcacagaggccatctcagagagctagctcatgtgcttcagagtaaacatcgagataagtacttactgttcaacctctcggaaaagcgacatgatttgacacgactgaaccccaaagtccaggattttggctggccagagcttcacgccccacccctggataagttgtgcagtatctgtaaggctatggagacatggcttagcgctgatccgcagcacgtcgtggtgctttattgcaaaggcaacaagggaaaactgggggtgatagtctccgcatacatgcactattccaaaatatcagctggcgcggatcaggcgctggcaaccttgactatgagaaagttctgtgaggataaggttgccaccgagctacaaccaagccagcgaaggtacatctcctactttagtggactcctgagcggaagcatccgaatgaacagctcccccctgttcctccactatgtgctgatcccgatgctgccagcctttgaaccaggaaccggatttcaaccgtttctcaagatctaccaaagtatgcaactggtctacacatctggagtgtaccatatcgccggtccaggccctcagcagctgtgcatatcactggaacctgccttgcttctgaaaggagatgtcatggtcacatgttaccataagggtggaaggggaaccgatcgcacactcgtgtttcgcgtgcagttccatacctgtactatacatgggccacaattaacctttcccaaagaccagctcgatgaagcctggactgacgagaggttccctttccaggcctctgttgaattcgtgttctcttcatccccagaaaagataaaggggagcactcctcggaacgacccctcagtgtctgtggattataataccacagagccagctgtccgatgggactcctacgagaattttaatcagcatcacgaggacagtgtggacggctcactcacacatacccgcgggccccttgatggatctccatatgcccaggttcaacggccgccccggcaaacaccacctgcaccttcccctgaacctccaccaccgcccatgctgagcgtgtcaagcgactcgggccatagctcaactctgacaacagagccggccgccgaatccccaggacggcctcctccaaccgcagctgagcgccaggagcttgacaggctgctgggaggatgtggagtcgcctcaggaggaaggggcgctggcagggagaccgcaatactggacgatgaggaacagccgaccgtggggggcggcccccatcttggcgtatatcccggtcaccgccccggccttagcaggcactgcagttgcagacaaggatatcgcgagccatgcggagtgcctaatggcggatattacaggccggagggtaccttggagcgacggaggttggcctatgggggctacgaaggtagtccgcaaggctatgctgaggccagcatggagaaaagacgcctatgcaggagtctctctgaaggactgtacccatatcctccggagatgggtaagcccgccactggtgacttcggctatcgggcccccgggtatcgcgaggtagtgattttggaagacccaggactgcccgccttatacccctgccccgcttgtgaagagaagctcgcactccctacagccgctctttacggcctgagactcgagcgggaggccggagaaggctgggcctctgaggccggcaaacctttgctccatccagtgaggcctgggcatccattacctttactgctgcccgcctgtggacaccaccacgctcctatgccggactattcttgcctgaagccacctaaagccggcgaggagggtcacgaggggtgttcttatacgatgtgccccgaaggccgctatggccatcctggatatcctgcactggtgacctatagctacggaggggcggtcccaagttactgtcctgcctacggaagagttccccactcctgcggctccccgggggagggaagggggtacccttctccaggggctcatagtccccgggccggttccatctcaccaggatccccaccctatccacaatcccggaaactcagctatgagatacctaccgaggagggaggagatcggtatccacttcctggacacctcgcatccgccggcccacttgcttccgcagagagcctcgagcccgtgtcctggagggagggcccctcagggcactcaactctgcctagaagcccccgggatgccccttgcagcgcgtcatcagaactgtccggcccatccacacccctccatacgtcctcaccagtgcaggggaaggagtccaccaggagacaagacacgcggtcccccacttctgcccctacacaacgactctcaccgggtgaggccttaccccctgtgtcccaggccggcaccgggaaagctcccgagctgccttccggctctggcccagaacctctggccccttcgccagtctccccaacatttcctcctagctctccttctgactggccccaggagagaagtccgggcggacattctgacggggccagccctcgcagtcccgttcctactacgctccctggactgagacacgctccatggcaggggccaagggggcctcctgatagccctgacgggagtccgctgacaccagtgccatctcaaatgccctggctggtggcctcccccgagcctccacagagtagtcccacccctgcgttcccccttgccgctagctacgatactaatgggctgagtcagcccccactgcctgaaaagcgtcacctgccaggaccggggcagcagccagggccttggggacccgagcaggcctcttcacctgcccgaggcatctcccaccacgtgacttttgcacccctgttgagtgataacgttccccagacacccgagccgcctacacaggaatcacagagcaacgttaagtttgtccaggatacctcgaagttctggtataagccccatcttagccgcgaccaggccatagccttgctgaaagacaaagaccctggagccttcctgattcgggactcgcacagcttccaaggagcctacggcttggctctaaaggtggctacgccccccccctcagcccagccctggaagggtgatcctgtagaacagctggtgcggcattttttgattgaaaccgggcccaaaggggttaagattaaagggtgcccaagcgagccttacttcggatccctgtcggcccttgtctcccaacacagtatctcgccaatatctctgccctgctgtctgaggatcccctctaaagaccccctagaagaaactccagaggctcccgtccccacgaacatgtcgactgccgcagatttactgagacagggcgcagcctgtagcgtgttgtatttgaccagtgtcgaaaccgagtcactgactggaccccaggctgtcgcaagggcttcttcagctgccctatcctgtagcccacgcccaacaccagccgtggtgcattttaaggtgagcgcacaggggattaccctgaccgataaccagagaaagctgttctttcgccggcactaccccgtcaacagcattacattcagctcaacagacccgcaggacagacgctggactaatccagacgggactaccagtaagatctttggatttgtggccaagaaacctgggagtccctgggagaacgtctgtcacttgttcgccgagctcgatcctgatcagccagccggagcgatagtgactttcattacaaaggtgctcctgggtcagcgaaagtag

SEQ ID NO: 247347 - DNA, 3858 bp, Artificial Sequence
  derived and/or modified sequence
atggagcggcggtgggacctggacctgacctacgtgaccgagcggattttggccgcagccttcccagccaggccagacgagcagaggcacaggggccacttgcgcgagctcgcccatgtgctccagtccaaacaccgtgacaaatatctgctcttcaacctatccgagaagcgccatgacttgacaaggctcaaccccaaagtgcaggactttggctggccggagttgcacgcgccacctcttgacaagctctgcagcatttgcaaggccatggaaacctggctgtcagcagatccccagcatgtggtggtgctgtactgtaaagggaacaaaggaaaactcggcgtgatcgtaagtgcttacatgcattattcaaagatcagcgccggcgctgaccaggcactcgccacgctgacaatgcgaaaattttgcgaggataaagtagccacagagttacagcccagccaacgacgctacatcagctatttcagtggcttactaagcggcagtatccggatgaattcctcaccactgttcctgcactatgtcctgattcccatgctcccagcgtttgagcccggcacgggattccagccgtttctgaaaatttatcagtcaatgcagctagtgtataccagcggcgtataccatatcgctgggcccggcccccagcagctttgcatatcgctggaaccagctctcctactcaagggggacgtaatggtgacgtgttaccataagggtgggcgtgggaccgacaggacgctagtattccgagtgcaattccatacatgtacgatccatggtcctcagctgacgttccccaaggatcaactggacgaagcctggactgacgagaggttcccttttcaagccagcgtggagttcgttttttcctcctcgcctgagaagataaagggcagtaccccccggaacgaccccagcgtaagtgtggattacaacacgaccgagccagcagtccgatgggattcctatgagaattttaaccagcaccacgaggactcggtggacggtagcctgactcacacccgaggccccctggacgggagcccctacgcccaagttcaacgcccaccgcgccagacccctccagctccaagccccgagcctccacccccacccatgctgagcgtgagctcagattcagggcacagctctacacttacgaccgaacctgccgccgagtccccggggcgtccccctcctactgccgcagaacggcaggaactcgacaggctgttagggggatgtggggtggcttcaggagggaggggcgcaggaagggagacagccatcctagatgatgaagaacagcctacggtcgggggaggcccccacctgggggtgtacccaggccatcggccagggctgagtcggcattgtagttgtagacagggctacagggagccctgtggagtcccaaacggcggatattacagaccagaaggtacgctggagcggcgccggttggcctatggcggttatgagggctcaccacaggggtatgctgaagctagtatggagaagcgaagactatgtcgctctctctctgagggactctacccatacccccctgagatgggtaagcccgccacaggggattttggatacagagctcctggatacagagaggtagtgattctggaagatccgggcttacccgccttatacccatgtccagcatgcgaggagaagctagcacttcccaccgctgccctatatggactgcgactggaacgagaagctggagaagggtgggcttccgaggcaggcaagcctctgctgcacccagtgagacccggacatccgctgccactgctgctgccggcgtgtggtcaccatcatgcccccatgcccgactatagctgtctcaagccccctaaagcaggggaagaagggcacgaaggatgtagctacactatgtgccccgagggcaggtacggacacccaggatatcccgcgttagtgacgtattcctatggtggagccgtgccatcctactgccccgcctacggccgtgttccacactcttgtggtagccctggagaagggagagggtaccctagccccggtgctcactctcccagagccggaagcatctcacctggctcaccaccttacccccagagccgcaaactgagctacgagattcctaccgaggagggtggggatcgctaccctctgcctggacatcttgccagcgcaggacctcttgcatcagccgagagcctggagccagtgagctggagagagggacccagcgggcactccacactgcctaggtcaccccgcgacgccccctgttcggctagttccgagctgtccggcccatctaccccccttcacacatcttcacccgtgcaggggaaagagtctactagacggcaagatacacggtcccccacaagcgctccaacgcagcggctgagccccggggaagctctgccacccgtctcacaggctgggaccggcaaagcacctgagctgcccagcggctccggccccgaacctctggcgccctcccctgtttcacctaccttcccgccaagctctccaagtgattggcctcaggagaggtcccctggcggccatagcgacggggcgagccctaggagcccagtgccgacaacccttcctggcctccggcacgccccttggcaaggcccccgtggccctcccgatagccccgatgggagccctctgactcccgtgcctagccagatgccatggttagttgcctcccctgagcctccacagagcagcccaacccctgcattccccctcgctgcatcttacgatacgaatggtttaagtcagccaccactgcccgagaagaggcacctaccaggcccgggtcaacagcctggcccatggggcccagagcaggccagcagtccagcgaggggcatttcacatcatgtcacttttgcacctttgttgtccgacaacgtgccacaaactccagagcctcctacccaggagagtcagtctaacgtgaaatttgtccaagacacttcaaagttctggtataaaccccatctctccagagatcaagctatagccctgctgaaggacaaggacccaggagcatttcttatccgcgacagtcattcttttcagggagcatacggccttgctctgaaggtggctacgcccccgcccagcgcacagccctggaaaggcgatccagtggaacagcttgttagacacttcctcatcgagacaggccctaagggggtgaaaattaaaggctgtccttcagaaccatattttggttcgctgagcgccttagtttctcaacacagcatttctcctatttctcttccatgctgtctccggataccttccaaggatcccctcgaggaaactcccgaagcccccgtgccaacaaatatgagtacagccgccgatttgctgaggcagggagctgcttgttcagtgctttacctgacatctgtcgagaccgaatctcttacaggcccacaggctgttgctcgagctagtagcgcagctctcagctgctctccccggcctactcctgccgtggtgcacttcaaagtcagtgctcaaggaatcacactcacagacaaccagcgaaagctgttctttcgacgtcactaccccgttaacagcattaccttctctagtacagacccacaggacaggcgctggactaaccctgacgggaccaccagtaaaatcttcgggtttgtggctaagaaacctggatccccctgggagaatgtgtgtcacttgttcgccgagctcgaccccgatcagcccgctggcgcgatcgttacattcattaccaaagttttgctgggacagcggaaatag

SEQ ID NO: 247348 - DNA, 2346 bp, Artificial Sequence
  derived and/or modified sequence
atgaagagcagcggccccgtggagcggctgctgcgggccctgggccgccgggacagcagtcgcgctgccagcaggcccagaaaagcagagccacacagcttccgtgagaaggtgttcaggaaaaaacccccggtgtgcgccgtttgtaaggtcacaatagacggtacgggcgtgtcctgcagagtctgtaaggtggccacccacagaaaatgcgaagcaaaagttacatccgcgtgccaggcattaccccccgtagaattgcgacgcaacactgctcccgttagaagaatcgaacatctggggtccactaaatccctgaatcatagtaaacaaagaagtaccctcccaagaagtttctcactggatcctctgatggagcgcagatgggacctggatttaacctatgtaaccgaaaggatcctggccgcagcttttcccgccagaccggatgagcaacggcaccgcggccacctgcgtgagttggctcacgttctgcaatctaagcaccgcgataaatacctcctgttcaacctgtccgagaaaaggcatgacctcacgagactgaatcccaaagtccaggacttcggctggccagagctacacgctccaccactagataaactctgttcaatctgcaaggccatggaaacttggctgagtgccgaccctcaacatgtggtagtcctgtactgcaagggcaacaaggggaaactaggggtgatcgttagcgcctacatgcactattctaagatttcagctggggcagaccaagccctggccacactcacaatgcgtaaattctgtgaggacaaggtcgctaccgaactccagccctctcagagacgttatatttcttatttcagcggtctgctgtctggtagcatacgaatgaactcgagtccactgtttctgcattacgtgctgatccctatgttgcccgccttcgagccaggaacaggtttccagcctttcttgaaaatctatcaaagtatgcagctggtctacaccagcggcgtctatcatatcgcaggccctgggcctcaacagctttgcataagcttagagccagctctgctgctgaagggcgacgtgatggtgacctgctatcataagggcggccgcggcacagaccgcacacttgtgttcagggtacagtttcacacctgcacgatccatggtccgcagttgacttttccgaaggaccaactggacgaggcctggacagacgaacggttcccattccaggctagcgtggagttcgtcttcagctctagtccggaaaagattaagggctctacacctcgaaacgatcccagcgtctccgtcgattacaacactaccgaacctgcagtcagatgggacagctatgaaaacttcaaccaacatcacgaagactctgtcgacggatctctgacccacactcggggccccctcgacggaagcccctacgcccaggttcagcgtccccctcgacagacgccacccgccccgtccccagaaccacctccacccccgatgctgtctgtcagctctgacagcggccactcatccacgttgaccaccgaacctgccgctgagagtccaggccgcccaccgccaacagctgccgagcgtcaggagctagatcggctacttggcggctgtggcgtcgcttcaggcggtaggggcgcaggccgggagactgcaatcctcgacgacgaggaacagcctaccgtgggggggggacctcatttaggggtgtaccccgggcaccggccaggtttaagcaggcactgttcatgtcggcagggttacagggaaccctgcggtgtccctaacggtggatattaccgtcccgagggcacactagaacgacggaggttggcgtatggtggctacgagggctctccgcaaggttatgccgaagcctctatggaaaagcgacgcttatgcagaagtctgtccgaggggttatatccttatcctcctgaaatgggaaagccggccacgggcgatttcggatacagggccagcagtgctgccctgagttgcagcccacgcccaaccccggccgttgtgcactttaaggtgtctgcccaggggatcacattaactgataatcagcggaaactgttttttagacgccattatccggtgaatagtataacattctcaagtaccgacccacaggataggaggtggaccaatcccgacggtactactagcaaaatcttcggcttcgtggccaagaaaccaggttccccatgggaaaatgtgtgtcatctttttgctgaactggaccctgaccagccggcaggtgctatcgttacctttatcaccaaagtcctgctcgggcagaggaaatag

SEQ ID NO: 247349 - DNA, 4200 bp, Artificial Sequence
  derived and/or modified sequence
atgaagagcagcggccccgtggagcggctgctgcgggccctgggcaggcgcgatagctctagggcagcctcgcgccctcggaaggctgagccccacagcttccgcgagaaggtgtttagaaaaaagccacctgtgtgtgccgtttgtaaggttacaattgacgggacaggagtctcttgcagagtgtgtaaagtggctacgcatagaaagtgcgaggccaaggtcactagtgcctgccaggcgttaccaccagtggagctgaggcggaacaccgctcccgtgcgcagaattgaacacctgggaagcaccaaaagcctcaaccacagtaagcagaggtctacccttccgcgaagcttcagcctcgatccactgatggaacgccggtgggacctcgatcttacttatgtgacggaaagaatcctggctgccgcctttcccgccagaccagacgagcagagacatcgcggacacctcagggagctggcccacgtgctacaaagcaagcacagagacaagtacctcctctttaatctgtctgaaaagcgacacgacctgacgaggctgaatcctaaagtccaagacttcggatggccagagctgcatgcaccacctctcgacaagctctgcagtatttgcaaggctatggagacttggctgagtgctgacccgcaacacgtggtagttctctattgtaagggtaataaaggcaaactcggcgtcatcgtgtcagcatatatgcactactccaaaatctccgctggcgccgatcaagccctggcaacattaacgatgcgcaagttctgtgaggataaggtagcgaccgaattgcagcctagtcagaggaggtacatcagctatttcagtggactcctctcaggtagcataaggatgaattcgagtcctctcttcctccactatgtgttgatccccatgctacctgcattcgagcccggaacaggattccagccattcttaaaaatttatcagtcaatgcaactggtgtacacatccggtgtgtatcatatagcggggcccggcccacagcagttgtgcatctcactcgaaccagcccttctcctgaagggagatgtcatggtgacttgttatcataaaggcgggagaggaactgataggacgttggtatttcgcgtacagttccacacctgcactatacatggtccccaactgactttccccaaggatcagttggatgaggcctggaccgatgagcgctttccattccaagcatctgtggagttcgttttctcgagctctccagagaaaattaaggggtcaacaccaagaaatgacccctcagtgtcagtcgactacaacactaccgaacccgcagttagatgggatagttatgagaatttcaaccagcaccacgaggactccgtggacggcagtctaacccatactcgtggccctctcgatggcagcccgtatgcacaggtgcaacgaccccctaggcagaccccccccgctcctagccctgagccccctccccctcctatgctgagcgtgagttccgacagcggccacagtagcacactgacaactgaacccgctgcagagtcacccgggagacctccgcccacagccgctgaacggcaggagctggatcgattgcttggcggatgtggcgtggccagcggggggaggggagctgggagagaaactgcaatcctggacgatgaggagcagcccacggtgggcgggggccctcacttgggggtctaccccggacaccgtcccgggttgtcaagacactgttcctgtcgacagggatatcgcgaaccttgcggcgtgccaaatggtggatactatcgacctgaggggaccttagagagacggaggctggcctatggaggctatgaaggaagcccccaaggctatgctgaggcgagcatggaaaagcggcggttgtgccggagcctcagcgaggggctctacccatacccccccgaaatgggtaagcctgccacgggcgactttggctatcgcgccccagggtatcgggaggttgtgattctggaggatccaggactgcctgccctgtacccttgtccagccagtctgtacggtcttaggttggagcgcgaggcgggcgaaggctgggccagcgaagctggtaaacccctgctgcacccagtgcgcccagggcacccattacccttgctgctccctgcgtgtgggcatcatcacgcaccgatgcctgattattcctgtcttaaacctcctaaggcaggcgaagagggccatgaggggtgttcgtacactatgtgtccggaaggccggtatggacatcctggctacccagcccttgtgacctactcctacggcggtgcagtacctagctactgcccggcatacggtcgggtgcctcactcgtgtggctcaccgggcgaaggacggggctatccctcccctggagctcacagccctcgggccggcagcatctccccaggcagtcctccttatcctcagtccaggaagctgagctatgaaatccccacagaggaaggaggcgaccggtaccccctccctggacacctcgctagcgccggtccactggcctccgctgagtctctagaacccgtgagctggagagagggacccagtgggcattcgacgctgccccgatctccaagagacgctccctgctcagcaagctctgagctgagtggcccttctacgcccctgcacacgagcagtccggtgcaaggcaaagaatccacacggagacaggatacccgctcccctacttccgcgcctacgcaacgcctgtcgcccggagaggcactgccaccggtgtcacaggccgggacagggaaggctcccgaattgccatcaggatcaggtcctgaacctctcgctcccagccccgtgtccccaacttttccccctagctccccatctgactggcctcaagaacggtctcctggcggccattccgatggagcttccccaagaagcccggtacctacaaccctgcccggcctgagacatgccccttggcagggtcctagaggaccacccgatagccccgatgggtcaccccttaccccggttccatcccagatgccttggctggtggcttctcctgagccaccccagagctctcccaccccagccttccccctggctgccagttatgatactaacggtctgagccagcctcccctgcctgagaaaagacaccttcctggtcctggccaacagccaggcccatggggcccagaacaggccagctccccagcacgtggaatctcccatcatgtgacattcgcacctctcctcagcgataatgtgccacagaccccagaacctccaacacaagagtcacagagcaacgtgaagtttgtgcaagatacatccaagttctggtacaaaccacacctgagccgagatcaggcaatagcgttactgaaagataaagaccctggggcgttcctcatcagagactcacactcttttcaaggcgcctacggccttgccttgaaggtggccacccccccaccgagcgctcagccttggaaaggagaccctgtagaacagctggtgcgtcatttcttaatcgaaaccggtccaaagggagtgaagattaagggatgtccctccgagccatactttgggtctctttcagccttggttagccaacatagtatctcgcccatatcactgccttgctgtctgcgcatcccttctaaggaccccctggaggagactccagaggcccctgttcctaccaacatgtccactgcggcggatctcctgcgccagggggccgcatgttcagttctgtacctaaccagtgttgaaactgagtccctcaccggtccacaggctgtggcccgagctagcagtgcagccctgagttgctctccccgaccaactcctgcggtagtgcattttaaagtcagtgctcagggcatcacccttaccgataatcagcggaagttgttttttcgccggcattatcctgtgaacagcattactttttcatccacagatcctcaggatagaaggtggacaaatcccgacgggaccacatccaaaatcttcgggtttgtggcaaagaagcctggtagcccatgggaaaacgtgtgccacctgtttgctgaactggatcccgaccaacccgctggcgctattgtaactttcataactaaagttctactgggacagaggaagtag

SEQ ID NO: 247350 - DNA, 4230 bp, Artificial Sequence
  derived and/or modified sequence
atgaaatcttccggcccagttgagaggctgctgagggcgttgggccgtagggacagttccagagctgcttcgaggcctcggaaggccgaaccacacagtttcagggaaaaggtttttcggaaaaagccgcctgtgtgcgccgtctgtaaagttactatcgacggtacaggtgtttcatgtcgggtctgcaaagtcgctacgcaccgaaagtgtgaggccaaggtgaccagcgcttgccaggcactacccccagttgagcttcggcgaaacaccgcccctgtgcggcgtatcgaacacctgggaagtactaagagtttaaaccactcgaagcagagatcgactctgccgaggtcattctcactggacccacttatggagcgaagatgggatctcgatctgacatatgtgacggaaagaatcttagccgctgcatttccggctcgcccagatgaacagagacatagggggcacctccgcgagctggctcatgtactacagagtaaacaccgggataaatacctgctgttcaatttatccgaaaagcggcacgaccttactcgtctcaatcccaaagttcaagacttcgggtggccagagcttcacgccccaccacttgataaactgtgctcaatttgcaaagcaatggagacctggctcagtgccgatccgcaacacgttgtcgtcctgtactgcaaagggaataaggggaagctgggggttatcgtgtcagcctatatgcactactccaaaattagcgctggcgcagaccaggccctggcaaccctcacaatgcgcaagttttgtgaggacaaggtggctacggagcttcaaccttctcagcggagatacatctcttacttctccggcttgttgagcgggtcaatccgcatgaatagctcccctttgttcctgcattatgtcttaattccaatgctgcccgcatttgagcctggtacaggctttcaacccttcctcaagatttatcagtccatgcagttagtgtatacctctggagtttaccacatcgcgggaccgggtccgcagcaactttgtatctctctggagcctgccctcctgctgaaaggggacgtgatggtcacttgctaccataaagggggtcggggtacagaccgaactcttgtgtttcgggttcagtttcatacatgcactattcacgggccacagttaaccttccccaaagatcagctggacgaagcttggaccgacgagcggttcccatttcaggcctcagtcgagtttgtgttcagttcctcacctgagaagatcaagggcagcacaccaagaaacgacccctcggtgtccgtcgattataacactacagaacccgctgttaggtgggattcctatgaaaattttaatcagcatcacgaagacagtgtcgatggtagtctgacacacacaagaggccctcttgacggatccccatatgcacaagtgcaacgacctcccaggcaaacacccccagctccctctccagaacccccacctccacccatgctgtccgtctcttcagactccggccactcttcaaccctgaccacagagccagcggctgaatctccaggacgacccccacccacagccgcagagcggcaggagctagaccggcttttggggggatgcggcgtcgcttcgggcggacgcggagctggccgagaaacggccatactggatgacgaagagcagccaaccgtgggcggtggcccacaccttggggtatacccgggacatagaccgggattatcacggcactgctcttgccgccaaggttacagagagccatgtggcgtcccaaacggtggttactatagacctgaaggcaccttagaaagaaggcgcttagcatatgggggatacgaagggtccccccaaggatacgctgaggcatcaatggaaaaacggcgactgtgccggtcactgtctgaaggactgtatccctaccctcctgaaatgggcaagcccgctacaggagacttcgggtaccgcgcacccggataccgggaggtggttatccttgaggatcccggtctccctgcattgtacccatgtcctgcctgcgaagagaagctcgctctgccaacagccgcactctatggcctgcgtttggaacgagaggccggtgagggatgggcatcagaagctgggaagcctctcttacacccagtcaggcctggtcatccccttcctttgctgctgccagcctgtggccatcaccatgctcctatgcccgactactcctgcttgaagccacccaaggccggtgaggaaggccacgagggctgcagctacactatgtgtcccgagggtcgttatgggcatccaggatacccagccttagtgacctacagctatgggggtgctgtacccagctattgtccagcatatggtcgcgtcccacatagttgcggctctcccggagaaggcagaggctacccctctcctggagctcatagtcctcgggctggctccatctccccaggaagtcccccatacccacaatcaaggaagctgtcttatgagatacctaccgaggaaggtggggatcgatatcccctccctggacatctagccagcgccggtcctctggccagtgcggagagcttagagccggtgtcatggcgcgagggccctagcggacatagcacattgcctaggagcccaagggatgcgccttgcagcgcctcatcagaactgtctggaccatctactccactgcataccagctcaccagtgcagggcaaagagtccacacgccgtcaagacacccgcagccctaccagtgcacccactcagcgcctgagtcctggagaggccctgcctccagtgtctcaggctggtaccggcaaagcacccgagctacccagtgggagcgggccagagccgcttgcaccatccccagtttcccccacattcccaccatcatctccgtcagattggccgcaagagagatcccccggtggacactcagacggtgccagtcccagaagcccagtccccaccaccctgcccggactgcgccacgcgccatggcagggacccaggggaccacccgattctccggatggatcccctcttacaccggttccttctcagatgccgtggttggtggctagccctgaaccccctcagtcttcccccactccagcattcccccttgcagcgagttatgataccaacggacttagtcagccgcctttgcctgaaaagcggcacctcccgggtcctggccagcagccaggtccctggggtcccgagcaggcgtcttcccccgcacggggtataagccaccacgtgacattcgctccccttctcagcgacaacgttccccagactccagagccccctacccaagaatcgcagtccaacgtgaaattcgtccaggatacctcaaaattctggtacaagccccacctctcacgagaccaggccatagctctcctcaaggataaggatccgggagccttcctgattagagacagccatagcttccagggggcatacggcctggctttgaaagttgctactcctccgccatcagcacagccatggaagggggatccggtagaacaactggttaggcacttcctcatcgaaacaggccctaaaggagtcaaaattaagggatgtccctccgagccttattttggctctctgagcgccctggtatcccaacactccataagtcctatttcactgccttgttgcctccgcatcccctccaaagaccctttggaagagacaccggaggcccctgttcctaccaatatgtcgaccgccgcagaccttctaagacagggggcagcatgctcagttctgtacctgacctctgtggaaacagagagccttactggaccccaagccgtcgccagggcatctagcgctgccttgtcctgctcgcctaggccaacccccgcagtggtacacttcaaagtgtccgcccagggcattacactgaccgataatcagagaaaactcttctttcgtcgccactatccagtcaattcaatcacattttcatccaccgacccgcaagaccgtcggtggaccaacccagatgggaccactagtaagatatttggattcgtggctaagaagccaggatccccatgggagaacgtttgtcacttatttgctgaactggatcccgatcagcccgctggtgccatagtgacttttattactaaggtactgctgggccagaggaagtag

SEQ ID NO: 247351 - DNA, 3858 bp, Artificial Sequence
  derived and/or modified sequence
atggagcgaagatgggaccttgatctgacctacgtcactgagaggattcttgcggcagcctttcccgctcggccagacgaacagaggcacagggggcatcttagagaactggcccacgtgcttcaatctaagcacagggacaaatatctgctgttcaacctgagtgaaaagcggcatgaccttacccgcctcaacccgaaggtgcaggatttcgggtggccagagctccacgcacccccattggacaaactttgcagtatttgcaaggctatggaaacctggctttcggccgacccccaacatgtggtggtcttatactgcaagggcaataaggggaagctaggcgtcatcgtgtctgcgtacatgcattatagcaaaatctccgctggagccgatcaggccctagcgacactgaccatgcgaaagttctgcgaggataaggtggcgactgaactgcagccatctcagagaagatatatttcctactttagcggtcttctatcaggatccataagaatgaacagctcaccgctgttcctgcactacgtgctcatcccaatgcttccagccttcgagcctggaactggctttcagccatttctgaaaatttaccaatctatgcagctggtttacacatccggagtctatcatatcgcaggccctggccctcagcaactttgcatctcactcgaacccgctctgctactgaagggcgacgtgatggtaacttgctatcacaaaggcggtaggggaacagatcgaaccctcgtcttcagagtacagttccatacttgcacaatacacggaccacaacttacattccctaaggatcaacttgacgaggcatggaccgatgagcgattcccttttcaggcttctgtggaatttgtcttcagtagcagccccgagaaaattaaaggatcgacaccacggaacgacccttccgtgtccgttgattataatacgaccgaacccgcagtccgctgggattcatacgagaatttcaatcagcaccatgaggacagcgttgacggaagtctgactcacactcgtgggcctcttgatggcagcccttacgcgcaagtgcagcgcccacctagacagactcccccagctcccagcccggaaccgccaccaccccctatgttgtcagtgtcctctgacagtggccatagtagcactttaaccacagaacccgctgcagaaagcccagggcgacctccgccaaccgctgctgagcggcaggaattggatcggctgttggggggatgcggcgtcgcatctgggggacgtggcgctgggagagagactgccatactggacgacgaggaacagcctaccgtcgggggtgggcctcatctgggcgtgtatcctggtcaccggccaggcttgtcgcgacactgttcctgccgtcagggctatcgagaaccctgcggggtccctaatggagggtactacagacctgaaggcaccctggaacggaggcgactggcatacggcggttatgagggcagtccacagggatatgcggaggcttctatggagaaaaggcgactgtgtagaagcctatccgaagggttatatccataccctcctgagatgggaaagcccgctaccggggacttcggttatagggctccaggataccgggaagtagtgatcctggaagaccccggattgcctgctctgtacccttgccctgcttgcgaggagaagcttgcactccccaccgccgcactgtacgggttacgtttagagagagaagccggtgagggctgggccagcgaggccggaaagccactgctccaccctgttcgaccaggccacccactacctttactgctgcccgcatgcgggcatcaccatgccccaatgcccgattatagctgcctgaaacctcccaaggccggagaagagggtcacgagggttgttcttacacaatgtgtccagaggggaggtatggacaccctgggtatcccgcactggtcacatattcatacggtggcgctgtaccaagttactgcccagcatacgggcgtgtgccacattcttgcggatcacccggagaaggtcgtggatatcctagtcccggagcccattcaccccgtgctggaagcatcagtcccggttcaccaccctacccacagagccggaaactgtcttacgaaatccccacagaagagggaggagataggtatcccctgcctggacatctcgcgagcgctgggccattggcttctgcagagagtctcgaaccggtgagctggcgcgaagggccatctggccactcaactctccctcgttcacctcgtgacgcaccttgttctgcttccagcgaactgagcggaccatccacccccttgcacacctcctcacccgttcagggtaaggagagtacaaggcgtcaggatactaggtcccctacatccgccccaacgcagcggttaagcccaggcgaagctctgcctcccgtgtctcaggccggaacggggaaggcccctgaactgccaagcggcagtggacccgagcctctggctccttcccccgtcagcccaacctttcccccatcctctcctagcgactggccacaggaacgctctccaggaggccacagcgacggtgccagccccaggagccccgtgccaactactctgcctgggctcagacatgccccatggcaagggccaagaggcccacccgacagcccagatgggtcgccactgactccagtcccaagtcaaatgccctggctggttgcttcccctgagccacctcaatctagccccacacctgcgttcccactggccgcatcatacgacacaaacgggctgagccagccacctctcccagagaaacggcacctccccggacctggacagcagcccggaccgtgggggcctgaacaagcttcgtcccccgctcggggtatctcacaccacgtgacatttgcacctctcctgagcgataacgtgccacaaacccccgaaccacctactcaggaatcccagtccaacgtgaagtttgtgcaggacacttccaaattctggtacaaaccacaccttagtagagatcaagcaatcgcccttcttaaggataaagacccgggtgcctttcttatcagggatagtcattccttccaaggagcttacggccttgctttgaaggtggccaccccacccccatccgctcagccatggaaaggtgatcctgtggaacagttggtgcgtcatttcctcatcgaaacgggacctaaaggggtcaagatcaaagggtgcccatctgagccctactttgggtctctaagcgctctggtgtcacaacacagtatctcacccatcagtctgccttgttgcctcaggatacccagtaaagaccccctggaggaaacacccgaggccccagtcccgacaaacatgtccaccgccgctgatttgctgcgccagggggctgcctgttccgtcctttacctgacgagcgtggaaacagagagcctgactggacctcaagccgtggcgcgagcaagcagtgctgcattgtcgtgttcgccacggcctacaccagccgtcgtccattttaaggtcagcgcacagggaatcacgcttactgacaatcaacggaaactctttttcaggagacactatccggttaattcaataaccttcagctctactgatccccaagaccggagatggacaaatccagatgggactactagcaagatttttggcttcgttgccaaaaagcctggctcaccatgggaaaacgtgtgtcacctctttgcagaattggacccggaccagccagccggtgctatcgtcacatttattaccaaagtcctgttagggcagcggaaatag

SEQ ID NO: 247352 - DNA, 2346 bp, Artificial Sequence
  derived and/or modified sequence
atgaaatcatcagggcctgttgagcgccttctccgagccctcggcagaagagattccagtcgggctgcaagccgtccacgaaaagctgaaccccactcatttcgtgagaaggtatttaggaaaaagcctccagtttgtgctgtatgtaaggtcactatcgacggcacgggcgtgtcttgccgcgtgtgcaaggtggccacacaccgtaagtgtgaagcaaaggttacgtctgcctgtcaagctctcccccctgttgaactacggaggaatacagccccagttcgaagaattgaacatttaggatccacaaagtctctcaaccactccaagcagcggtcaacgctccctcggtcattctcgctcgaccctctcatggaacgaagatgggacctcgatctcacatacgtaaccgagcgtattctcgcagcagccttcccagcacggcctgacgaacagcggcacaggggccacctccgcgagctcgctcacgtgctccagtccaaacacagggacaagtatctcctgtttaacttgtctgagaagcgccacgatcttacccgattgaacccaaaggtgcaggatttcgggtggcctgagctgcacgctccgcctttggataaattatgctccatttgtaaggccatggagacatggctttctgctgacccgcagcacgtcgtcgtgctttactgtaaagggaacaaaggaaagctgggagttatcgtgagcgcttatatgcattactccaaaatcagtgcaggagccgatcaggctctggctactctgactatgcgaaaattctgcgaggacaaggttgctactgaactacagccaagccagaggcgctacatctcatacttttccggactgttgtccggcagcattagaatgaactcctccccacttttcctgcactacgtattgattccaatgctgcctgcgttcgagccgggtaccggttttcagccgttccttaagatctaccagagcatgcagctggtgtacactagcggcgtgtaccacattgccggacctggcccacagcagctgtgtatctcgctggagcccgcacttctgctgaaaggagacgtgatggtcacctgctatcacaagggagggaggggaacagaccgaaccctggtgttcagagttcagtttcatacatgtaccatccatggtccacagctgacatttccgaaggaccagctcgacgaggcgtggaccgacgagcgatttccatttcaggcctcggtcgaattcgtctttagcagttcaccggaaaagataaaaggcagtacccccaggaacgaccctagcgttagcgtggattataacactaccgagcctgcggttcggtgggattcctacgagaacttcaatcagcaccatgaagactctgtcgatggtagtctcacccacacacgcggtccactggatggtagtccctacgcacaggtccagaggccccctcgtcagactccccctgcaccaagccctgagccccctccacctcctatgctgtctgtcagtagcgactccgggcacagttcaaccctgactaccgagccagcagctgagagccctggaaggcccccacccactgctgccgaaagacaggaactcgatcgcctgcttggaggttgtggagtggcctccgggggaaggggcgcaggacgggaaaccgccatcctggacgacgaggagcagccaacagtaggcggaggcccacatttgggcgtctatcctggccacagaccagggttgtcaaggcactgctcttgtaggcagggatacagagaaccatgcggagtgcccaatggcggatactaccgacccgaagggacactggagaggcgacggctcgcctacgggggatacgagggctccccgcagggctacgctgaggcttcaatggagaaacggagattgtgccggtcgctgtccgaaggcctttatccatacccccctgaaatgggtaagccagccaccggcgactttggctacagggcctcgagcgccgcactatcatgcagcccgagacctactccggctgtcgtacatttcaaggtcagcgctcagggcattactcttacagataatcaacggaagctcttctttagaaggcactaccctgtgaattccattacttttagctcgaccgacccccaggataggcgatggaccaatccagatggaaccacctctaaaatcttcggctttgtggccaagaagccaggttccccatgggaaaatgtgtgtcatctgttcgctgagctggaccccgatcagccagctggcgcaatcgtgaccttcatcacaaaagtgttgctgggccaacggaagtag

SEQ ID NO: 247353 - DNA, 4200 bp, Artificial Sequence
  derived and/or modified sequence
atgaagtcctcagggccagtagaacgcttgctgagagcactgggacgtagagactcctctcgtgccgcttcccgccctcgtaaagccgagcctcactcttttcgggagaaggtgttccggaaaaagccgccagtgtgtgccgtgtgcaaagttacgattgatggtactggggtttcatgccgtgtctgcaaggtggccacccatcgaaagtgcgaggcgaaagtcacatccgcatgtcaggcccttcctcctgtggagctccggaggaatactgccccagtcaggagaatcgagcacttgggttctaccaaaagcctaaaccacagcaaacaacggtcaactcttcctcgttctttcagtctagacccgctgatggagagaagatgggacctcgacctcacatatgtaacagagaggattctagctgcagcctttcctgcacgcccagatgaacagcggcacagaggccacctgagagagctggctcacgtgctgcagtctaagcatagggacaagtacctgctatttaatctgtcagagaagcggcacgaccttaccaggctaaatccgaaagtgcaggattttggatggcccgaactgcacgccccacctctggataaactgtgttcaatctgtaaggctatggagacctggcttagcgcggacccgcagcacgtggtagtgctgtactgtaaagggaataagggtaaactgggcgtcatagtatcggcatacatgcattattccaagattagtgccggagcagatcaggcacttgccacacttaccatgaggaagttctgtgaggataaggtggctacagaattacagccatcacaaagacgttatattagctatttctcagggctgttgtcaggctcaatccgaatgaactcctctcctctatttttacactacgtccttatcccaatgttacccgctttcgagccaggaaccggattccagccttttctcaagatctatcagtccatgcaactcgtgtacacgtctggtgtgtatcatatagcgggtcctggcccacagcaactctgcatctctctggaacccgctcttctccttaagggtgacgttatggtgacatgttatcataaaggaggtcggggaactgacagaacgcttgtgttcagagttcagtttcatacatgcactatacatgggcctcagctcaccttccccaaagaccagttggacgaggcgtggacggacgaaagatttccttttcaggcatcagtggagtttgttttctcaagttctcccgaaaaaatcaagggatctacgcccagaaacgacccatctgtgagcgtcgattataacaccaccgaaccggcagtgaggtgggactcatatgagaattttaaccagcatcatgaagatagcgttgacggctcactgactcacactcgtggccctttggacggtagtccatacgcccaggtgcagagacccccaaggcagacccccccagcaccgagccctgaaccgcctccaccacctatgctgagtgtgtcttccgactctggccatagttcaactttgacaactgaaccagccgctgaatcccccggacgaccaccccctacggcagcggaaaggcaggagctcgatcggcttctaggcggttgtggggtggcctccgggggtcgaggcgcaggacgcgaaaccgccatcctcgacgatgaggagcaaccgaccgtgggaggcggtcctcatctaggcgtgtacccgggacaccgccctgggctgagccgacactgcagctgcagacagggatatcgcgaaccttgtggggtccctaatggcggatattatcgtcccgagggaacactggaacgtcggagactcgcttatggcggatacgagggttcacctcaggggtatgcggaagcaagtatggagaaaagaaggctgtgccgttccctgtccgagggtctgtatccttacccacctgagatgggaaagccagcaacaggtgacttcggctaccgggctccagggtacagggaggtggtgattctggaggatcctggattaccggcactgtacccttgccccgcttctttgtacggcctgcggcttgaacgtgaggcaggcgagggatgggcctcagaagccggaaaacccctgctccaccctgttaggccgggtcatcctctccctctgttgctgcccgcttgcggacaccatcatgcccctatgcctgattacagttgtctaaagccaccgaaggccggtgaagaagggcacgagggctgctcgtacactatgtgtcctgagggcagatacggccatccgggatatccagccttagtgacatacagttacggaggagctgtaccatcttattgccccgcttatgggcgtgtcccacactcctgtggaagtccaggagaagggaggggatacccaagtccaggggctcactcaccgagggcaggtagcattagtccgggaagtccaccttatccccaatctaggaagcttagctacgaaatacccaccgaagaggggggtgaccggtatccgctcccaggccatctcgctagtgccggacccctggcctccgccgaaagtcttgagcctgtctcatggagagaaggacccagcgggcatagcacactgccgaggagtcctagggacgcaccttgttccgcctccagcgagctgtccggcccatctactcctctccacactagctctccagtccaggggaaagaaagcacccgtaggcaggacactcgttccccaactagcgctccaacgcaacgactatctccaggcgaagcgctgccacccgtgagccaagccggaaccggcaaagcccctgagctgccatcggggtcaggcccagagcctcttgcaccttcacccgtgtctcccaccttcccaccaagctcacctagcgattggccccaggaaaggtcacccggaggacactcagatggggcttcacctcgaagcccagtacccacgactctccccggactaagacacgccccatggcagggacccagggggcctccggattccccagacggctcacctttaacgccagttccaagccagatgccttggctggtcgcctcccccgagccaccacagagtagccctacccccgctttccctctcgctgccagctacgataccaacggcctgtcccagccaccactacctgaaaaacggcaccttcctggtcccggacaacagcctggcccttggggcccagaacaggcgagctcgccagcgcgtggaatctcccaccatgttacctttgcccctctgctttctgataatgttcctcagacaccagaaccgccaacccaggagtctcaaagcaatgtgaaatttgttcaggacacttccaagttttggtacaagccacatctatcgcgggaccaagctattgctttgttgaaggataaagaccctggggctttcctgatacgcgacagtcattccttccagggcgcttacggactggcactgaaggtcgcaactcctccaccttcagcgcagccttggaagggcgaccccgtggaacagttggtgcgtcactttctgattgagactgggccaaagggcgtgaaaatcaaaggatgcccgtccgaaccatacttcggtagtctttccgctttggtgtcccagcacagcatcagccccatcagcctgccatgttgccttagaattccaagtaaagatccactagaggagacaccggaggcaccagtccctacaaacatgagtacggccgctgacttgctgcgccagggcgctgcgtgttccgtgttgtatctcacaagcgtggaaactgagagcttaaccggaccgcaggcggtggcccgagcttcaagcgctgcattgtcctgttccccaaggcctacacccgcagtcgtacactttaaggtgagcgcccaagggatcacactgaccgacaatcagcgcaaattattttttcgtagacactatccagtgaacagcatcacattttcaagtaccgatccccaggatcgacgctggaccaacccagatgggactacatctaagattttcggattcgtggctaaaaaacccggatccccatgggagaatgtgtgtcacctctttgcagagctggacccagatcagcccgctggagctatagttacctttatcaccaaagtgcttctcggacagagaaaatag

SEQ ID NO: 247354 - DNA, 5010 bp, Artificial Sequence
  derived and/or modified sequence
gggggagcaaaagatcacaggctgacactcccagcagggtagatcctgggaatctgatctcctggcctcccccacatcctcccccctccacttcctggagcagcgacctgcccccttcccgcctgcacttccctccacttccagggccgggcttctcctcacaccagccagacagcctaccctccgcccaggggaagcggctgcctccgccaggccgcttccaggaagccccgggccaggccccagcattgttcaggccctggggccagcaccccagccagccgaacaccatgaagtccagcggccctgtggagaggctgctcagagccctggggaggagggacagcagccgggccgcaagcaggcctaggaaagctgagcctcatagcttccgggagaaggttttccggaagaaacctccagtctgtgcagtatgtaaggtgaccatcgatgggacaggcgtttcgtgcagagtctgcaaggtggcgacgcacagaaaatgtgaagcaaaggtgacttcagcctgtcaggccttgcctcccgtggagttgcggcgaaacacggccccagtcaggcgcatagagcacctgggatccaccaaatctctgaaccactcaaagcagcgcagcactctgcccaggagcttcagcctggacccgctcatggagcggcgctgggacttagacctcacctacgtgacggagcgcatcttggccgccgccttccccgcgcggcccgatgaacagcggcaccggggccacctgcgcgagctggcccatgtgctgcaatccaagcaccgggacaagtacctgctcttcaacctttcagagaaaaggcatgacctgacccgcttaaaccccaaggttcaagacttcggctggcctgagctgcatgctccacccctggacaagctgtgctccatctgcaaagccatggagacatggctcagtgctgacccacagcacgtggtcgtactatactgcaagggaaacaagggcaagcttggggtcatcgtttctgcctacatgcactacagcaagatctctgcaggggcggaccaggcactggccactcttaccatgcggaaattctgcgaggacaaggtggccacagaactgcagccctcccagcgtcgatatatcagctacttcagtgggctgctatctggctccatcagaatgaacagcagccctctcttcctgcactatgtgctcatccccatgctgccagcctttgaacctggcacaggcttccagcccttccttaaaatctaccagtccatgcagcttgtctacacatctggagtctatcacattgcaggccctggtccccagcagctttgcatcagcctggagccagccctcctcctcaaaggcgatgtcatggtaacatgttatcacaagggtggccggggcacagaccggaccctcgtgttccgagtccagttccacacctgcaccatccacggaccacagctcactttccccaaggaccagcttgacgaggcctggactgatgagaggttccccttccaagcctccgtggagtttgtcttctcctccagccccgagaagatcaaaggcagcactccacggaacgacccctcggtctctgtcgactacaacaccactgagccagccgtgcgctgggactcctatgagaacttcaaccagcaccacgaggacagtgtggatggctccttgacccacacccggggtcccctggatggcagtccttatgcccaggtgcagcggcctccccggcagacccccccggcaccctctccagagcctccaccaccccccatgctctctgtcagcagcgactcaggccattcctccacgctgaccacagagccggctgctgagtcccctggccggccgccccctacagctgctgaacggcaggagctggatcgcctcctaggaggctgcggagtggccagtgggggccggggagctgggcgcgagacggccatcctagatgacgaagagcagcccactgtgggcggaggcccccacctcggagtgtatccaggccataggcctggcctcagccgccactgctcctgccgccagggctaccgggagccctgcggggttcccaatgggggctactaccggccagagggaaccctggagaggaggcgactggcctacgggggctatgagggatccccccagggctacgccgaggcctcgatggagaagaggcgcctctgccgatcgctgtcagaggggctatacccctacccacctgagatggggaaaccagccactggggactttggctaccgcgccccaggctaccgggaggtggtcatcctggaggaccctgggctgcctgccctatacccatgcccagcctgcgaggagaagctggcgctgcctacagcagccttgtatggactgcggctggagagggaggctggagaagggtgggcaagtgaggctggcaagcctctcctgcacccagtgcggcctgggcacccgctgcctctgctcttgcctgcctgtgggcatcaccatgccccgatgcctgactacagctgcctgaagccacccaaggcaggcgaggaagggcacgagggctgctcctacaccatgtgccccgaaggcaggtatgggcatccagggtaccctgccctggtgacatacagctatggaggagcagttcccagttactgcccagcatatggccgtgtgcctcatagctgtggctctccaggagagggcagagggtatcccagccctggtgcccactccccacgggctggctccatttccccgggcagcccgccctatccacaatctaggaagctgagctacgagatccctacggaggagggaggggacaggtacccattgcctgggcacctggcctcagcaggacctttggcatctgcagagtcgctggagccggtgtcctggagggagggccccagtgggcacagcacactgcctcggtctccccgagatgccccatgcagtgcttcgtcagagttgtctggtccctccacgcccctgcacaccagcagtccagtccagggcaaggaaagcacccggcgacaggacaccaggtcccccacctcagcgcccactcagagactgagtcctggcgaggccttgccccctgtttcccaggcaggcaccggaaaggcccctgagctgccgtcgggaagtgggcctgagcctctggcccctagcccagtctctccgaccttccctcccagctcgcccagtgactggcctcaggaaaggagtccagggggccactcagatggcgccagtcctcggagccctgtgcccaccacacttcctggcctccgccacgccccctggcaaggccctcgaggcccccccgacagcccagatgggtctcccctcactcctgtgccttcccagatgccctggcttgtggccagcccagagccgcctcagagctcacctacacctgctttccccctggctgcctcctatgacaccaatggccttagccagcccccacttcctgagaaacgccacctgcccgggccggggcaacagccaggaccctggggcccagagcaggcatcatcgccagccagaggcatcagtcaccatgtcaccttcgcacctctgctctcagataatgtcccccaaaccccagagcctcctacacaagagagccaaagcaatgtcaagtttgtccaggatacatccaagttctggtacaagccacacctgtcccgtgaccaagccattgccctgctgaaggacaaggaccctggggccttcctgatcagggacagtcattcattccaaggagcttatgggctggccctcaaggtggccacaccgccacccagtgcccagccctggaaaggggaccccgtggaacagctggtccgccatttcctcatcgagactgggcccaaaggggtgaagatcaagggctgccccagtgagccctactttggcagcctgtccgccttggtctcccagcactccatctcccccatctccctgccctgctgcctgcgcattcccagcaaagatcctctggaagagaccccagaggctccagtgcccaccaacatgagcacagcggcagacctcctgcgtcagggtgctgcctgcagcgtgctctacttgacctcagtggagacagagtcactgacgggcccccaagctgtggcccgggccagctctgcagctctgagctgtagcccccgcccgacaccagctgttgtccacttcaaggtgtcagcccagggcattacactgacggacaaccaaaggaagctcttctttcgccgccattatccagtgaacagcatcaccttctccagcactgaccctcaagaccggagatggaccaacccagacgggaccacctccaagatctttggtttcgtggccaagaagccgggaagcccctgggagaatgtgtgtcacctctttgcagagcttgacccagatcagcctgctggcgccattgtcaccttcatcaccaaagttctactgggccagagaaaatgaaggaaggccacaagctcagagcccacatcaacactgcccccctcccagcaccccacagccctcacatcccctggcctggacccaggagacccaggagaaagcaccctcccttaggaatgaggagtgggcatcaggcctgggacactgctctccttccccgcccccagcctgctaagttaagtggacaggcccacaagatgaccttgcatgtgagcagatggcagagatgggtgtgtgaggggtgaggaggcatcagcagttgagccccgaaggagatcaggcagccccacctgcaggagaacgtcagccctccaggggatcagcccctgccagttccacccagctgcaggtgccagcacggcagggatgggagaggggtggggagcgagtcactgcctcctctgagcagagattcagagtaggatcacatgaataggggaaaaaagagagtctatttttgtctaataataaagaatttctataaacttta

SEQ ID NO: 247355 - DNA, 3125 bp, Artificial Sequence
  derived and/or modified sequence
gggggagcaaaagatcacaggctgacactcccagcagggtagatcctgggaatctgatctcctggcctcccccacatcctcccccctccacttcctggagcagcgacctgcccccttcccgcctgcacttccctccacttccagggccgggcttctcctcacaccagccagacagcctaccctccgcccaggggaagcggctgcctccgccaggccgcttccaggaagccccgggccaggccccagcattgttcaggccctggggccagcaccccagccagccgaacaccatgaagtccagcggccctgtggagaggctgctcagagccctggggaggagggacagcagccgggccgcaagcaggcctaggaaagctgagcctcatagcttccgggagaaggttttccggaagaaacctccagtctgtgcagtatgtaaggtgaccatcgatgggacaggcgtttcgtgcagagtctgcaaggtggcgacgcacagaaaatgtgaagcaaaggtgacttcagcctgtcaggccttgcctcccgtggagttgcggcgaaacacggccccagtcaggcgcatagagcacctgggatccaccaaatctctgaaccactcaaagcagcgcagcactctgcccaggagcttcagcctggacccgctcatggagcggcgctgggacttagacctcacctacgtgacggagcgcatcttggccgccgccttccccgcgcggcccgatgaacagcggcaccggggccacctgcgcgagctggcccatgtgctgcaatccaagcaccgggacaagtacctgctcttcaacctttcagagaaaaggcatgacctgacccgcttaaaccccaaggttcaagacttcggctggcctgagctgcatgctccacccctggacaagctgtgctccatctgcaaagccatggagacatggctcagtgctgacccacagcacgtggtcgtactatactgcaagggaaacaagggcaagcttggggtcatcgtttctgcctacatgcactacagcaagatctctgcaggggcggaccaggcactggccactcttaccatgcggaaattctgcgaggacaaggtggccacagaactgcagccctcccagcgtcgatatatcagctacttcagtgggctgctatctggctccatcagaatgaacagcagccctctcttcctgcactatgtgctcatccccatgctgccagcctttgaacctggcacaggcttccagcccttccttaaaatctaccagtccatgcagcttgtctacacatctggagtctatcacattgcaggccctggtccccagcagctttgcatcagcctggagccagccctcctcctcaaaggcgatgtcatggtaacatgttatcacaagggtggccggggcacagaccggaccctcgtgttccgagtccagttccacacctgcaccatccacggaccacagctcactttccccaaggaccagcttgacgaggcctggactgatgagaggttccccttccaagcctccgtggagtttgtcttctcctccagccccgagaagatcaaaggcagcactccacggaacgacccctcggtctctgtcgactacaacaccactgagccagccgtgcgctgggactcctatgagaacttcaaccagcaccacgaggacagtgtggatggctccttgacccacacccggggtcccctggatggcagtccttatgcccaggtgcagcggcctccccggcagacccccccggcaccctctccagagcctccaccaccccccatgctctctgtcagcagcgactcaggccattcctccacgctgaccacagagccggctgctgagtcccctggccggccgccccctacagctgctgaacggcaggagctggatcgcctcctaggaggctgcggagtggccagtgggggccggggagctgggcgcgagacggccatcctagatgacgaagagcagcccactgtgggcggaggcccccacctcggagtgtatccaggccataggcctggcctcagccgccactgctcctgccgccagggctaccgggagccctgcggggttcccaatgggggctactaccggccagagggaaccctggagaggaggcgactggcctacgggggctatgagggatccccccagggctacgccgaggcctcgatggagaagaggcgcctctgccgatcgctgtcagaggggctatacccctacccacctgagatggggaaaccagccactggggactttggctaccgcgccagctctgcagctctgagctgtagcccccgcccgacaccagctgttgtccacttcaaggtgtcagcccagggcattacactgacggacaaccaaaggaagctcttctttcgccgccattatccagtgaacagcatcaccttctccagcactgaccctcaagaccggagatggaccaacccagacgggaccacctccaagatctttggtttcgtggccaagaagccgggaagcccctgggagaatgtgtgtcacctctttgcagagcttgacccagatcagcctgctggcgccattgtcaccttcatcaccaaagttctactgggccagagaaaatgaaggaaggccacaagctcagagcccacatcaacactgcccccctcccagcaccccacagccctcacatcccctggcctggacccaggagacccaggagaaagcaccctcccttaggaatgaggagtgggcatcaggcctgggacactgctctccttccccgcccccagcctgctaagttaagtggacaggcccacaagatgaccttgcatgtgagcagatggcagagatgggtgtgtgaggggtgaggaggcatcagcagttgagccccgaaggagatcaggcagccccacctgcaggagaacgtcagccctccaggggatcagcccctgccagttccacccagctgcaggtgccagcacggcagggatgggagaggggtggggagcgagtcactgcctcctctgagcagagattcagagtaggatcacatgaataggggaaaaaagagagtctatttttgtctaataataaagaatttctataaacttt

SEQ ID NO: 247356 - DNA, 4979 bp, Artificial Sequence
  derived and/or modified sequence
gggggagcaaaagatcacaggctgacactcccagcagggtagatcctgggaatctgatctcctggcctcccccacatcctcccccctccacttcctggagcagcgacctgcccccttcccgcctgcacttccctccacttccagggccgggcttctcctcacaccagccagacagcctaccctccgcccaggggaagcggctgcctccgccaggccgcttccaggaagccccgggccaggccccagcattgttcaggccctggggccagcaccccagccagccgaacaccatgaagtccagcggccctgtggagaggctgctcagagccctggggaggagggacagcagccgggccgcaagcaggcctaggaaagctgagcctcatagcttccgggagaaggttttccggaagaaacctccagtctgtgcagtatgtaaggtgaccatcgatgggacaggcgtttcgtgcagagtctgcaaggtggcgacgcacagaaaatgtgaagcaaaggtgacttcagcctgtcaggccttgcctcccgtggagttgcggcgaaacacggccccagtcaggcgcatagagcacctgggatccaccaaatctctgaaccactcaaagcagcgcagcactctgcccaggagcttcagcctggacccgctcatggagcggcgctgggacttagacctcacctacgtgacggagcgcatcttggccgccgccttccccgcgcggcccgatgaacagcggcaccggggccacctgcgcgagctggcccatgtgctgcaatccaagcaccgggacaagtacctgctcttcaacctttcagagaaaaggcatgacctgacccgcttaaaccccaaggttcaagacttcggctggcctgagctgcatgctccacccctggacaagctgtgctccatctgcaaagccatggagacatggctcagtgctgacccacagcacgtggtcgtactatactgcaagggaaacaagggcaagcttggggtcatcgtttctgcctacatgcactacagcaagatctctgcaggggcggaccaggcactggccactcttaccatgcggaaattctgcgaggacaaggtggccacagaactgcagccctcccagcgtcgatatatcagctacttcagtgggctgctatctggctccatcagaatgaacagcagccctctcttcctgcactatgtgctcatccccatgctgccagcctttgaacctggcacaggcttccagcccttccttaaaatctaccagtccatgcagcttgtctacacatctggagtctatcacattgcaggccctggtccccagcagctttgcatcagcctggagccagccctcctcctcaaaggcgatgtcatggtaacatgttatcacaagggtggccggggcacagaccggaccctcgtgttccgagtccagttccacacctgcaccatccacggaccacagctcactttccccaaggaccagcttgacgaggcctggactgatgagaggttccccttccaagcctccgtggagtttgtcttctcctccagccccgagaagatcaaaggcagcactccacggaacgacccctcggtctctgtcgactacaacaccactgagccagccgtgcgctgggactcctatgagaacttcaaccagcaccacgaggacagtgtggatggctccttgacccacacccggggtcccctggatggcagtccttatgcccaggtgcagcggcctccccggcagacccccccggcaccctctccagagcctccaccaccccccatgctctctgtcagcagcgactcaggccattcctccacgctgaccacagagccggctgctgagtcccctggccggccgccccctacagctgctgaacggcaggagctggatcgcctcctaggaggctgcggagtggccagtgggggccggggagctgggcgcgagacggccatcctagatgacgaagagcagcccactgtgggcggaggcccccacctcggagtgtatccaggccataggcctggcctcagccgccactgctcctgccgccagggctaccgggagccctgcggggttcccaatgggggctactaccggccagagggaaccctggagaggaggcgactggcctacgggggctatgagggatccccccagggctacgccgaggcctcgatggagaagaggcgcctctgccgatcgctgtcagaggggctatacccctacccacctgagatggggaaaccagccactggggactttggctaccgcgccccaggctaccgggaggtggtcatcctggaggaccctgggctgcctgccctatacccatgcccagcctccttgtatggactgcggctggagagggaggctggagaagggtgggcaagtgaggctggcaagcctctcctgcacccagtgcggcctgggcacccgctgcctctgctcttgcctgcctgtgggcatcaccatgccccgatgcctgactacagctgcctgaagccacccaaggcaggcgaggaagggcacgagggctgctcctacaccatgtgccccgaaggcaggtatgggcatccagggtaccctgccctggtgacatacagctatggaggagcagttcccagttactgcccagcatatggccgtgtgcctcatagctgtggctctccaggagagggcagagggtatcccagccctggtgcccactccccacgggctggctccatttccccgggcagcccgccctatccacaatctaggaagctgagctacgagatccctacggaggagggaggggacaggtacccattgcctgggcacctggcctcagcaggacctttggcatctgcagagtcgctggagccggtgtcctggagggagggccccagtgggcacagcacactgcctcggtctccccgagatgccccatgcagtgcttcgtcagagttgtctggtccctccacgcccctgcacaccagcagtccagtccagggcaaggaaagcacccggcgacaggacaccaggtcccccacctcagcgcccactcagagactgagtcctggcgaggccttgccccctgtttcccaggcaggcaccggaaaggcccctgagctgccgtcgggaagtgggcctgagcctctggcccctagcccagtctctccgaccttccctcccagctcgcccagtgactggcctcaggaaaggagtccagggggccactcagatggcgccagtcctcggagccctgtgcccaccacacttcctggcctccgccacgccccctggcaaggccctcgaggcccccccgacagcccagatgggtctcccctcactcctgtgccttcccagatgccctggcttgtggccagcccagagccgcctcagagctcacctacacctgctttccccctggctgcctcctatgacaccaatggccttagccagcccccacttcctgagaaacgccacctgcccgggccggggcaacagccaggaccctggggcccagagcaggcatcatcgccagccagaggcatcagtcaccatgtcaccttcgcacctctgctctcagataatgtcccccaaaccccagagcctcctacacaagagagccaaagcaatgtcaagtttgtccaggatacatccaagttctggtacaagccacacctgtcccgtgaccaagccattgccctgctgaaggacaaggaccctggggccttcctgatcagggacagtcattcattccaaggagcttatgggctggccctcaaggtggccacaccgccacccagtgcccagccctggaaaggggaccccgtggaacagctggtccgccatttcctcatcgagactgggcccaaaggggtgaagatcaagggctgccccagtgagccctactttggcagcctgtccgccttggtctcccagcactccatctcccccatctccctgccctgctgcctgcgcattcccagcaaagatcctctggaagagaccccagaggctccagtgcccaccaacatgagcacagcggcagacctcctgcgtcagggtgctgcctgcagcgtgctctacttgacctcagtggagacagagtcactgacgggcccccaagctgtggcccgggccagctctgcagctctgagctgtagcccccgcccgacaccagctgttgtccacttcaaggtgtcagcccagggcattacactgacggacaaccaaaggaagctcttctttcgccgccattatccagtgaacagcatcaccttctccagcactgaccctcaagaccggagatggaccaacccagacgggaccacctccaagatctttggtttcgtggccaagaagccgggaagcccctgggagaatgtgtgtcacctctttgcagagcttgacccagatcagcctgctggcgccattgtcaccttcatcaccaaagttctactgggccagagaaaatgaaggaaggccacaagctcagagcccacatcaacactgcccccctcccagcaccccacagccctcacatcccctggcctggacccaggagacccaggagaaagcaccctcccttaggaatgaggagtgggcatcaggcctgggacactgctctccttccccgcccccagcctgctaagttaagtggacaggcccacaagatgaccttgcatgtgagcagatggcagagatgggtgtgtgaggggtgaggaggcatcagcagttgagccccgaaggagatcaggcagccccacctgcaggagaacgtcagccctccaggggatcagcccctgccagttccacccagctgcaggtgccagcacggcagggatgggagaggggtggggagcgagtcactgcctcctctgagcagagattcagagtaggatcacatgaataggggaaaaaagagagtctatttttgtctaataataaagaatttctataaacttt

SEQ ID NO: 247357 - protein, 251 aa, Artificial Sequence
  derived and/or modified sequence
MWWRDLTRLRLWLKREAIPGEGRKAAKVNAGVGEKGIYTASSRGGPPSARSKAVTVVAEGAASRSWLSMDAPELGPGLVERLEQLATCPLCGGSFEDPVLLACEHSFCRACLARRWGTPPATGTEASPTACPCCGLPCPRRSLRSNVRLAVEVRISRELLFGGGIPHSFLGTHSHAHCRSINSNPHFRPKIMRPHLVSTFPRPCSKPNPFLPSGSQNLLSPTATTVLPDFSHSNHSRPAMGNRPSPSVLVK

SEQ ID NO: 247358 - protein, 354 aa, Artificial Sequence
  derived and/or modified sequence
MWWRDLTRLRLWLKREAIPGEGRKAAKVNAGVGEKGIYTASSRGGPPSARSKAVTVVAEGAASRSWLSMDAPELGPGLVERLEQLATCPLCGGSFEDPVLLACEHSFCRACLARRWGTPPATGTEASPTACPCCGLPCPRRSLRSNVRLAVEVRISRELREKLAEPGARAGRRRGGRIPTMGCLDLPGEDMRKTWRRFEVPTPKSSNSEDDLPEDYPVVKKMLHRLTADLTLDPGTAHRRLLISTDRRSVQLAPPGTPAPPDGPKRFDQLPAVLGAQGFGAGRHCWEVETADAASCRDSSGEDEDDEESHYAVGAAGESVQRKGCAPGPLGERIFPLFCTCDPRAPLRIVPAES

SEQ ID NO: 247359 - protein, 354 aa, Artificial Sequence
  derived and/or modified sequence
MWWRDLTRLRLWLKREAIPGEGRKAAKVNAGVGEKGIYTASSRGGPPSARSKAVTVVAEGAASRSWLSMDAPELGPGLVERLEQLATCPLCGGSFEDPVLLACEHSFCRACLARRWGTPPATGTEASPTACPCCGLPCPRRSLRSNVRLAVEVRISRELREKLAEPGARAGRRRGGRIPTMGCLDLPGEDMRKTWRRFEVPTSKSSNSEDDLPEDYPVVKKMLHRLTADLTLDPGTAHRRLLISADRRSVQLAPPGTPAPPDGPKRFDQLPAVLGAQGFGAGRHCWEVETADAASCRDSSGEDADDEESHYAVGAAGESVQRKGCAPGPLGERIFPLFCTCDPRAPLRIVPAES

SEQ ID NO: 247360 - protein, 354 aa, Artificial Sequence
  derived and/or modified sequence
MWWRDLTRLRLWLKREAIPGEGRKAAKVNAGVGEKGIYTASSRGGPPSARSKAVTVVAEGAASRSWLSMDAPELGPGLVERLEQLATCPLCGGSFEDPVLLACEHSFCRACLARRWGTPPATGTEASPTACPCCGLPCPRRSLRSNVRLAVEVRISRELREKLAEPGARAGRRRGGRIPTMGCLDLPGEDMRKTWRRFEVPTSKSSNSEDDLPEDYPVVKKMLHRLTADLTLDPGTAHRRLLISADRRSVQLAPPGTPAPPDGPKRFNQLPAVLGAQGFGAGRHCWEVETADAASCRDSSGEDADDEESHYAVGAAGESVQRKGCAPGPLGERIFPLFCTCDPRAPLRIVPAES

SEQ ID NO: 247361 - protein, 251 aa, Artificial Sequence
  derived and/or modified sequence
MWWRDLTRLRLWLKREAIPGEGRKAAKVNAGVGEKGIYTASSRGGPPSARSKAVTVVAEGAASRSWLSMDAPELGPGLVERLEQLATCPLCGGSFEDPVLLACEHSFCRACLARRWGTPPATGTEASPTACPCCGLPCPRRSLRSNVRLAVEVRISRELLFGGGIPHSFLGTHSHAHCRSINSNPHFRPKIMRPHLVSTFPRPCSKPNPFLPSGSQNLLSPTAATVLPDFSHSNHSRPAMGNRPSPSVLVK

SEQ ID NO: 247362 - protein, 251 aa, Artificial Sequence
  derived and/or modified sequence
MWWRDLTRLRLWLKREAIPGEGRKAAKVNAGVGEKGIYTASSRGGPPSARSKAVTVVAEGAASRSWLSMDAPELGPGLVERLEQLATCPLCGGSFEDPVLLACEHSFCRACLARRWGTPPATGTEASPTACPCCGLPCPRRSLRSNVRLAVEVRISRELLFGRGIPHSFLGTHSHAHCRSINSNPHFRPKIMRPHLVSTFPHPCSKPNPFLPSGSQNLLSPTATTVLPDFSHSNHSRPAMGNRPSPSVLVK

SEQ ID NO: 247363 - DNA, 756 bp, Artificial Sequence
  derived and/or modified sequence
atgtggtggagggatcttactcgcttaaggctatggcttaagagggaagcaatcccaggtgagggcagaaaagcagcaaaagtgaacgccggcgtgggcgaaaagggcatttacacggcatcaagcaggggcgggccaccttctgccagaagtaaggcagtcaccgttgtcgcagagggagccgcgtctagaagctggttatccatggatgctcctgagctggggccggggctggtcgaacgcctggagcagctcgccacatgcccactgtgcggaggttcttttgaagaccccgtactcttagcctgcgagcattccttctgtagggcttgcttagcaaggaggtgggggacaccaccggccaccggaacggaagctagccctacagcttgtccctgttgcggtttaccttgcccccgaagatctctgcgcagtaacgtgcgcctggccgtcgaggtccgtatatctagagagcttctgttcgggggagggattccccactcctttctggggacccattcccatgcccattgccgaagcatcaatagcaatccccactttagacccaagatcatgagaccccacctggtctcaaccttcccacgcccatgtagtaagccgaacccatttctgccttctgggtcgcagaacctgctgtctcctacagccaccacggtcctacctgactttagccatagtaaccattctaggccagccatgggaaatagaccaagtcccagcgtcctggtcaaatag

SEQ ID NO: 247364 - DNA, 1065 bp, Artificial Sequence
  derived and/or modified sequence
atgtggtggagagatcttaccagactgcgactctggttgaagcgcgaggcaatacctggggaaggcagaaaggccgctaaggtgaacgcaggagtcggcgaaaaagggatttatactgcaagctctcggggagggccaccaagtgcccgttcaaaggccgttactgtggtggccgaaggggctgcatctaggtcttggctgtcgatggacgcaccagaactcggtcccggactggttgagcgtctagaacagctggcgacatgccctctgtgtggcggctcttttgaggacccagtcctccttgcatgcgaacattcattttgcagagcctgtctggcccggcggtggggtaccccacctgccaccggtacagaggcctcaccaaccgcctgcccctgctgcggactcccatgcccacggcgtagtttacggagtaatgtccgcctggccgtggaggtcaggatcagccgggaactgcgcgagaagctggctgaaccgggcgcccgggcaggtaggaggcgggggggaagaatccccaccatgggatgcctggatctccctggagaggatatgaggaagacctggcgccggtttgaagtgcctactcctaagtcctccaactcagaggacgacctccccgaagactatcctgtcgtgaaaaaaatgctccaccggttgacggctgacctgacattggatcctggcaccgcacatagacgactccttatttcgacagatagaagatcagtccagctggcacccccaggcacgcccgcgcctcctgatgggccaaagcggttcgatcagttacccgcagtgcttggcgcccaaggattcggagccggaagacactgctgggaggtcgaaacggcagacgctgcaagttgcagggatagcagcggcgaagacgaagacgacgaggaaagccactatgccgtcggagctgccggtgagtcagtgcaaaggaagggttgtgctcccggaccactcggggaacgaattttcccgctcttctgtacttgtgaccctagggcgccactgagaatcgtccccgcagagtcatag

SEQ ID NO: 247365 - DNA, 1065 bp, Artificial Sequence
  derived and/or modified sequence
atgtggtggcgcgatcttacccggttacggctctggctgaaacgggaggctataccgggggaagggcgcaaggcggcgaaggtgaatgccggcgtcggagagaagggcatctacactgccagcagccggggaggcccgccttctgctcgaagtaaggctgtgactgtggttgctgagggagccgcgtcacgttcgtggctgtccatggacgctccagagctaggacccggcctggttgagcgcctcgaacagctggctacctgccctttgtgtggtggctccttcgaggacccggtgctgttagcctgtgagcattccttctgtagagcttgtctggctaggcgatgggggactcccccagctacgggcactgaagcttctccaaccgcatgcccttgttgcggactgccctgcccaagaaggtcgctgagatcaaatgtaaggctggccgtggaggtacgcattagtagagagctgcgggagaaactcgcagagcctggggctagggctggacgacggcggggcggcagaatccccacaatgggctgcctggacttaccgggcgaagacatgcgtaagacatggaggagatttgaggtccctacgtctaaatccagcaatagcgaagatgatctccctgaggactacccagtggtgaaaaaaatgctgcataggctgactgctgacctcaccctcgatccaggtaccgctcacaggcgcctgctcatttcagctgaccgccggtctgtccagctcgcacctcccggcactcctgcaccacctgatggaccgaaaaggttcgatcagctccctgctgttctgggcgctcaggggtttggagccggtagacactgttgggaggtggagaccgccgacgctgcctcttgtcgtgacagtagcggggaggacgcggacgacgaagagtcacactatgccgtgggcgcagcaggggagagcgtccaaaggaagggctgcgccccagggcctctgggagagagaatctttcccctattctgtacatgtgaccccagagccccgctacggatagtgccagctgaaagttag

SEQ ID NO: 247366 - DNA, 1065 bp, Artificial Sequence
  derived and/or modified sequence
atgtggtggcgcgacttaaccagactgaggttgtggctgaagcgggaagcaattcccggcgagggacgaaaagccgccaaggtcaatgcgggcgttggggagaaaggtatttacacggcttcctcccggggcggccctccttctgctcgctccaaagctgttactgtggtggcagaaggcgcggcctcccggtcatggttatcaatggacgcccctgagctggggccgggcctcgtggagagactcgagcagctggctacttgccccttatgtgggggttcctttgaagacccagtcttattggcttgcgaacacagcttttgccgcgcctgcctggcacgccggtgggggaccccacccgctaccggaaccgaggcctctcctacagcgtgtccatgctgcggactaccctgtccaaggcgatcactaagatctaatgtgcgcttagctgttgaggtaagaatatcaagagaactccgagagaagctcgccgaaccaggggctcgagctggtcggcgccgcggggggaggattcccactatgggctgcctggatttgcctggggaagatatgcgcaagacatggagaagatttgaggtacccacctcaaagagctcgaacagcgaggacgacctccccgaagactatcctgtggtaaaaaagatgttacatagattgaccgccgacctcacgctggatcctggcaccgcccatcgccggttgttgatttctgcagataggaggtcagtccagctcgctccacccgggacccctgctccccctgacggacctaagcggtttaaccaattgccagcggtactgggggcccagggattcggagcagggaggcactgctgggaggtcgaaactgctgatgcggcctcctgcagagacagtagcggagaagacgctgacgatgaagaatcccactacgctgtaggagctgccggggagtcggtgcagaggaaagggtgcgctccagggcctctgggagagcgaatctttcctttattttgcacctgcgatccgcgcgcccccctgaggatcgtgcctgcagaaagttag

SEQ ID NO: 247367 - DNA, 1065 bp, Artificial Sequence
  derived and/or modified sequence
atgtggtggagagacttgaccagactgagactgtggctcaagcgcgaggcgattcctggagaaggaaggaaagccgccaaggtaaatgcaggcgtgggtgaaaaaggaatctacacagcttcctcaagagggggacccccctcggccaggagtaaggccgtgactgtggtcgctgagggcgccgcatcacgatcttggctgagtatggatgctcccgagttagggcccgggttggttgagaggctggaacagttggcgacctgccccctgtgcggtggcagtttcgaggatcctgttttgctggcgtgcgagcattctttttgtcgcgcttgcctggccaggagatggggtacgcctcctgctacgggcactgaggcctcccctactgcatgcccctgctgtgggttgccttgtccacgacgctctctgagaagcaatgtgagactcgctgtggaagtgcgaatatctcgcgagctgagagaaaagttggccgagcctggggcccgggccggacggagacgagggggcagaattccaaccatgggctgtttggacctccccggcgaggatatgaggaaaacctggcggaggttcgaagttcccacctccaaaagtagcaattctgaagacgacttgccagaggattaccctgtggtgaaaaaaatgctgcatagacttacagccgatcttacactggaccctggaacagcgcaccggcgactcttaatctcggccgaccgaaggtctgttcagttggccccccctgggactccagccccccctgatggccctaagagattcgatcaacttcctgctgtcttaggagctcagggctttggtgccgggcgacactgttgggaggtggagacagctgatgcggcatcctgcagggatagctccggcgaggatgcagacgacgaagaaagtcattatgctgtgggggcagcgggtgagtccgtccagcgaaaagggtgtgcccccggacccttaggcgagcggatcttccctctcttctgcacctgcgatccccgtgcccccctgaggatcgtccccgccgagagttag

SEQ ID NO: 247368 - DNA, 1065 bp, Artificial Sequence
  derived and/or modified sequence
atgtggtggcgcgaccttacccggctgcgcctgtggctaaagcgagaggccatcccaggcgagggacgcaaagcagccaaagtcaatgcaggcgtaggagagaaaggcatttacaccgcaagcagccggggtgggcccccctcagcccgcagtaaagccgtcaccgtggttgccgagggagccgcctcccgcagctggctgagtatggatgcaccggagctcggcccaggactggtagaaagattagaacaactcgccacatgtcctctgtgcggcgggtccttcgaggaccccgtgctgcttgcttgtgaacattctttttgtcgcgcctgcttggcccggagatggggcactccaccagccacagggacagaggcctccccaaccgcctgcccctgttgcggactgccttgtcccagaagaagcctgaggtccaatgtgcggctggcagtggaggtcaggattagcagggaacttagggaaaagctagctgaacccggggcccgcgcaggaagacgcaggggcggccgaattcccaccatgggttgcctcgacttaccaggagaggacatgcggaaaacttggcggcggttcgaggtcccaacttcgaagtccagcaactcagaggatgacctccccgaggattatcctgtggtgaagaaaatgttgcatcgactcactgccgacttgaccctggaccccggaacagcccaccgccggttattgatttctgctgacagacggagcgtccagctcgctcccccaggcactcccgcacccccagacgggcctaagaggttcgaccaactgcccgcggtgttgggagcacaaggcttcggtgccggacgtcactgttgggaagtggaaaccgcagacgcggcttcatgcagggactctagcggagaagacgccgacgatgaggaatcacactacgccgttggggcagctggcgaatctgtccagcggaaaggctgtgcgcctgggccactgggcgaacggatctttccccttttctgtacatgcgatccacgcgcaccactcaggattgtgcctgcagaatcttag

SEQ ID NO: 247369 - DNA, 1065 bp, Artificial Sequence
  derived and/or modified sequence
atgtggtggagggacctgaccagacttcggttatggctaaaaagagaagcgatccctggggagggccgcaaggcagctaaagtcaacgctggggtcggtgagaaaggcatttacacagcgtcatctcgcggcggtccccctagcgcccgtagtaaagccgtgacggtagtggctgaaggagcagcctcccggagctggctaagcatggatgcacctgagctaggccctggtctagtagaaagactggagcagttagccacttgccctctctgtggcgggtctttcgaggatcctgtgctcttagcctgcgagcacagtttctgtagggcctgcttagctaggcggtggggcacaccaccggccactgggacggaggcctcgccaactgcctgcccttgctgtggacttccttgcccccggcgtagtttacgctccaatgtgaggctagcagtggaggttcgcatttccagggagctgagagagaagctggctgaacccggtgcccgggcgggtagaaggcgggggggccggatcccaacaatggggtgcctggacctacccggcgaagatatgcggaaaacatggagacgttttgaggtcccaactagtaagagttccaacagtgaagatgacctgccggaagactaccccgtagtcaaaaagatgttgcatcgcctgactgccgacttaacactggacccgggaactgcgcacagacggctgctcatctcggctgatcgtcgatcagtgcagttagctcccccaggaacgccggctcccccggatggcccaaaacgtttcgaccagctccctgctgtccttggagctcaagggttcggagcaggacggcattgctgggaggtggaaaccgccgacgcagctagctgccgggattcgagtggagaggacgcagacgatgaggagtctcactatgcggtaggcgctgccggtgaaagcgtccagcgtaagggctgtgcgcctggtcctctaggcgagagaatttttccgctcttttgtacatgtgatcctagggctcctctaagaatcgtacccgccgagtcctag

SEQ ID NO: 247370 - DNA, 1065 bp, Artificial Sequence
  derived and/or modified sequence
atgtggtggcgtgacttgaccagactccgtctgtggctgaagagggaagccatacctggcgaggggaggaaagccgcgaaggtcaatgccggggtgggagaaaaaggcatctacaccgcaagcagcaggggaggcccacccagcgcccggtccaaagctgtgaccgtagtcgcggagggtgctgctagcagatcttggttgagtatggatgcccccgagctcgggccaggactggttgaacgccttgagcagcttgcgacatgccccctgtgcggtggatcttttgaagaccccgtccttcttgcctgcgaacactccttttgtcgagcgtgcttggcaagaaggtgggggactcctcccgccactggcacagaagcatcccctaccgcctgcccatgctgcggcctgccctgccccaggagaagcttacggagcaatgtgcgcctagcggttgaagttaggatatctagagagctgcgcgaaaagctggctgagcccggagctagagctggacggcgcaggggaggcaggattcccacaatggggtgccttgatctgcctggagaggacatgcgcaagacctggcggcggtttgaagtcccaacttctaagagcagcaatagcgaggacgacttgcctgaggactaccccgtggtgaagaaaatgctgcataggctgacggctgatttgaccctggatcctggaaccgctcatcgcagactcttgatcagcgccgatcggcgatctgtgcagcttgctccgcctggtacacctgcgccccctgacggaccaaagaggtttgaccagctccccgccgtattaggtgctcagggctttggagcgggccggcactgttgggaggttgaaaccgccgacgcagcgagctgtagagacagctctggcgaagatgctgatgacgaagagagccattacgccgttggggccgcaggcgagtctgtgcagagaaaaggatgtgcccctggtcctctgggggagcgcatcttccctctgttttgtacgtgcgatcccagggccccgctgagaatcgtgccggctgaatcctag

SEQ ID NO: 247371 - DNA, 1065 bp, Artificial Sequence
  derived and/or modified sequence
atgtggtggcgagacttgacccgtctccgactttggctcaaacgtgaggccatccccggtgagggacgcaaggctgccaaagtgaacgccggggtaggagagaagggtatatacacagcatcctctagaggaggtcctccaagcgctcgaagcaaggccgtcacagtcgtagcagaaggagctgcaagcaggagttggttatcaatggatgcccccgaactcgggccaggcctcgtagagagactggagcagctggccacctgtccgctgtgtggcggaagcttcgaggatcccgtacttttagcgtgtgagcactccttctgtcgtgcctgtttagcacgcagatggggcacaccccccgcaacaggcacagaagcctcccccacagcctgcccctgttgcggtctcccctgtcctcgtagaagccttagatccaatgtccggctggctgtggaagttcgaatcagcagagagctgcgagaaaaattagccgagccgggcgctcgagccggaaggcgacgcggaggtcggattcccaccatgggatgtctggatctgcccggcgaggacatgcgaaaaacctggcggcgcttcgaagtgcctactagtaagtcctcaaattcggaagacgatcttccagaggactaccccgttgtcaagaaaatgctccaccgactgacagccgatctgacactggaccccggcaccgcccaccgacgcctcttgattagcgccgacagacgcagcgtccaacttgcccctccggggacgcctgcgccccctgacggtcccaaacggtttgaccagctgcccgctgtgctgggtgcccagggatttggcgccggccgccattgctgggaagtcgagacagccgatgccgcctcttgtcgtgattcttcaggcgaagatgccgacgacgaggaatcccactacgctgtgggggcagccggggagagtgtgcagcgcaaggggtgtgcccctggccctcttggtgagcgcatcttcccgctgttttgcacgtgcgatccaagggcccccctgcggatcgttccggcagagagctag

SEQ ID NO: 247372 - DNA, 756 bp, Artificial Sequence
  derived and/or modified sequence
atgtggtggagagatttaactcgtctaagactttggctcaagcgagaggcaatacctggggaaggacgcaaggcggccaaggtgaacgcaggagtcggtgaaaaaggtatttacacagcatcaagccgcggcgggcctccaagtgccagaagtaaggccgtgactgtggtggctgaaggggcagccagccgctcctggttgagcatggatgcaccagagcttggacctggtttggtagaacggttggagcagttggccacctgtcccctatgcgggggctcattcgaagaccccgtgcttctcgcctgcgaacactcattctgccgagcatgccttgcgagacggtggggcactccacctgctactggtacagaggccagtcctaccgcttgcccctgctgcggtctgccctgccccagacggtctctcaggagcaatgtccggctggctgttgaggttcgcatttctcgcgaattactttttggaggtggtattccccatagcttcctgggcactcattcacatgcgcactgtcgttctattaattccaatcctcatttcagacccaagatcatgcgtccacacctagtctctaccttccctagaccctgctctaagccaaacccttttttgccaagcggtagtcagaatctgttgagccccaccgccaccacagttctgccagattttagccactctaaccacagcagacccgcaatgggtaatagaccctctccctcggtcttagttaaatag

SEQ ID NO: 247373 - DNA, 756 bp, Artificial Sequence
  derived and/or modified sequence
atgtggtggagggacctcacaagactcagattgtggctcaaacgagaagctattccaggggaaggacgcaaggccgcaaaagtcaacgccggagtgggcgagaaaggcatctatacggctagctcccgtgggggccctccatccgcacgcagcaaggctgttacagtcgtcgctgagggcgcagcttcacgctcatggctgtccatggacgcgcccgagctcggtcctggccttgtagaacgtcttgagcagctggcaacatgtcccttgtgtggggggagcttcgaggatcccgtgctgcttgcctgtgagcattcgttttgtagagcatgtctggcccggagatggggtacgccccctgcaaccggcacggaggcatctcctactgcctgcccatgctgcggacttccttgccctcgtcggtcacttcgctctaatgtgcgcctggctgttgaagtcagaatctctagagagctgctctttggtggcggcatccctcactcttttcttgggacccattctcacgcgcattgcagaagtatcaactccaatccccattttcgtccaaaaatcatgcgaccccaccttgtcagcactttcccccgcccttgcagcaaacccaatcccttccttccgagtggcagccaaaacctcctgtcaccaacagcaaccaccgtcctgccagactttagccacagcaaccactcaagaccagccatgggaaatagaccttccccatctgtcctagttaagtag

SEQ ID NO: 247374 - DNA, 756 bp, Artificial Sequence
  derived and/or modified sequence
atgtggtggagagatctgacgcgactcaggctctggctgaagcgcgaggccatccccggagaaggcagaaaggctgctaaggtaaatgccggcgtcggggaaaaagggatctatactgcgagttctagaggaggcccaccctcggccaggtcgaaggctgtgacagtggtggccgagggagccgcaagccggtcatggctctctatggatgcccctgagcttggtcctgggctggtcgagcggctggaacagcttgcaacctgccccctgtgcggcggttcttttgaagatcctgtgctgcttgcttgtgaacacagcttttgtcgagcttgcttggcaaggcgctggggtaccccccctgctactggtaccgaagcgtctcccaccgcctgtccttgttgcggcctcccctgtcccagaagaagcctgcgatcgaatgtcagactagccgtggaggtgcgcatatctcgggagcttctgtttggcgggggaattccacattccttcctcggaactcactcacatgcccattgcagaagcatcaactctaatccccactttcgccctaagataatgcgaccacatctggtgtcaacgtttcctaggccatgtagtaaacctaatcccttcctcccgagcggatctcaaaatcttcttagtccgaccgccacaaccgtcctacccgatttttcgcactccaaccactccaggcctgccatgggtaacaggccaagtccctcagtgcttgtgaaatag

SEQ ID NO: 247375 - DNA, 756 bp, Artificial Sequence
  derived and/or modified sequence
atgtggtggagagatttgacacggcttagattgtggttgaaaagagaagcgatccctggagaggggcgaaaggccgcgaaggtgaatgcaggtgtgggggagaaggggatttacaccgcctccagcaggggcggtccaccatcagctagatctaaggcagtcactgttgtggcagagggggccgccagccgttcttggttgagcatggacgcacccgagctcggtccaggactggtcgagaggctcgagcagttggcgacatgccctctgtgtggaggaagcttcgaggatccggtcctgctcgcctgcgaacactctttttgtcgggcctgtcttgcaaggagatgggggactccccccgcaacagggaccgaggcctctccaactgcctgcccatgctgtggtctcccctgccccagacggagtctccggagtaacgtccggctggcagttgaagtgcggatttctcgcgaactactgttcgggggcgggataccgcacagctttctggggacccactctcacgcccattgtcgatctattaactctaacccgcattttcgcccaaagatcatgcgcccacatctcgtttctaccttcccaaggccctgtagcaagccaaatccgttcttgccatccggcagtcaaaacctactgtctcccacggccaccactgtactaccggatttttcacactcaaaccatagcaggccggcgatgggaaatcgacccagtccttcagtgctggtgaaatag

SEQ ID NO: 247376 - DNA, 756 bp, Artificial Sequence
  derived and/or modified sequence
atgtggtggcgggacctcactagattaagactctggctaaagagagaagccattcctggcgagggacggaaagccgccaaggtcaacgcgggcgtgggtgagaaaggaatctacacggcctcaagtcgaggtggtcctccaagcgcccgcagtaaggcagtaacggtagtagcagagggtgccgccagtcgctcttggctaagcatggacgcccctgaactagggccgggactggtggagaggttggaacagctcgccacctgtccgttgtgtggtggcagcttcgaggatcctgtcctcctcgcgtgtgagcactcattttgtcgtgcttgtctcgctaggagatggggcactcctccagctacgggaactgaagctagtccgacagcttgcccatgctgcggtctcccatgcccccgccgctccttgcgctccaatgtgagactggctgtggaggtgcgcatttctcgcgaactgctattcggaggcgggattccacactcgtttcttggtacgcatagccatgcccactgcagatccatcaacagtaacccccattttaggcctaagatcatgaggcctcacttggtctctaccttcccacggccttgcagtaagcctaacccctttctgccgagcggtagccagaatctactgtccccaaccgccaccacagtgctgccagacttctcccactccaatcactctcggccggctatgggtaatagacccagtccctctgttctcgttaagtag

SEQ ID NO: 247377 - DNA, 756 bp, Artificial Sequence
  derived and/or modified sequence
atgtggtggagagatctgacccgactgaggctttggctgaaaagggaggccatcccgggtgagggccgcaaggcggcaaaagtcaatgccggtgtcggcgagaaaggaatttatactgcctcaagtagaggtggccctccctctgcgcggtctaaagcagttaccgtggtggctgagggcgcggcctctcgatcctggctttcaatggatgcacctgagctgggacccggtctcgtcgaaaggttagaacagctcgccacctgtcctctgtgtggtggctcgttcgaggaccctgttttgctggcatgtgaacacagtttttgcagggcatgcctcgctagacgttgggggacgcccccagccaccggaacagaagctagtccaaccgcatgcccttgctgcggcttgccttgtcctcgcagaagtctgaggtcaaatgtgcggcttgctgttgaagtacggatttcacgcgaattactgtttggcggtggaatcccacattcttttctgggtactcactcccacgcacactgcaggtccatcaactccaatccccatttccgccccaagatcatgcgtccccaccttgtcagtacattcccgaggccttgcagcaaacccaatccctttctaccctctggttcccaaaatctgctctcacctaccgctgctacagtcctacctgacttcagccacagtaaccattctaggcccgccatgggtaatcggccttctccaagcgtcttggtaaagtag

SEQ ID NO: 247378 - DNA, 756 bp, Artificial Sequence
  derived and/or modified sequence
atgtggtggagagatctcacccggctgaggctctggctaaagcgcgaggcgattccaggtgagggacgcaaagccgccaaagttaacgcaggcgtaggtgagaagggaatctacactgcaagttctaggggtggcccgcccagtgcaagatctaaagcggtgacagtggtcgctgagggggcagcaagccgaagttggttatctatggatgcacccgagctagggcccggccttgtcgaaagactggagcaactggccacatgtcctttatgcggcggaagcttcgaggacccggtgctgcttgcctgcgagcattctttttgcagggcttgcttggccaggcggtggggaaccccccctgcaaccggcactgaagcgagcccgactgcctgtccatgttgcggattgccgtgtcctagaaggagtctccgcagcaacgtccgactagccgtggaagtccgcatctctcgggagcttctgtttggtaggggcatcccacactctttcctcggcacacactcacatgcacactgcaggtccatcaattctaacccacactttcgacctaagatcatgcggccccatcttgtgagcactttcccacacccatgcagcaaaccaaatccatttttgccgagcggcagtcaaaatcttctgagccctactgccacaaccgtattgcctgactttagtcactctaaccacagtagacccgccatgggcaaccgaccatctccatctgttctggttaaatag

SEQ ID NO: 247379 - DNA, 756 bp, Artificial Sequence
  derived and/or modified sequence
atgtggtggagggacctgacccggctgcggctgtggctgaagcgggaggccatccctggagagggcaggaaggccgccaaggtgaatgctggggtgggggagaagggcatctacacagccagcagccggggcggcccccccagcgcccggagcaaggctgtgacagtggtggccgagggcgccgccagccgctcctggctgtccatggatgcccctgagctgggccctggcctggtggagcggctggagcagctggccacctgccccctgtgtggcggcagctttgaggaccctgtgctgctggcctgtgagcacagcttctgccgggcctgcctggcccggcgctggggcaccccaccagccaccggcacagaggccagccccacagcctgcccctgctgcggcctgccctgcccccggcgcagcctgcggagcaatgtgcggctggccgtggaggtgcgcatcagccgggagctgctgtttggaggcggcatcccccacagcttcctgggcacccacagccacgcccactgccgcagcatcaacagcaacccccacttccggcccaagatcatgaggccccacctggtgtccaccttcccccggccctgcagcaagcccaaccccttcctgcccagcggcagccagaacctgctgagccccacagccaccaccgtgctgcctgacttcagccacagcaaccacagcaggcctgccatgggcaaccggcccagccccagcgtgctggtgaagtag

SEQ ID NO: 247380 - DNA, 1065 bp, Artificial Sequence
  derived and/or modified sequence
atgtggtggagggacctgacccggctgcggctgtggctgaagcgggaggccatccctggagagggcaggaaggccgccaaggtgaatgctggggtgggggagaagggcatctacacagccagcagccggggcggcccccccagcgcccggagcaaggctgtgacagtggtggccgagggcgccgccagccgctcctggctgtccatggatgcccctgagctgggccctggcctggtggagcggctggagcagctggccacctgccccctgtgtggcggcagctttgaggaccctgtgctgctggcctgtgagcacagcttctgccgggcctgcctggcccggcgctggggcaccccaccagccaccggcacagaggccagccccacagcctgcccctgctgcggcctgccctgcccccggcgcagcctgcggagcaatgtgcggctggccgtggaggtgcgcatcagccgggagctgcgggagaagctggccgagcccggggcccgggccggcagaagaagaggaggccgcatccccaccatgggctgcctggacctgcctggagaggacatgaggaagacctggaggagatttgaggtgcccacccccaagagcagcaacagtgaagatgacctgcctgaggactaccctgtggtgaagaagatgctgcaccggctgacagctgacctgaccctggaccccggcacagcccaccggcggctgctgatcagcacagacagaagatctgtgcagctggcccctcctggcaccccagcccccccagatggccccaagagatttgaccagctgcctgctgtgctgggcgcccagggctttggagctggccgccactgctgggaggtggagacagcagatgctgccagctgccgggacagcagcggggaggatgaagatgatgaggagagccactatgctgtgggcgccgccggggagagcgtgcagaggaagggctgtgcccctggccccctgggggagcgcatcttccccctcttctgcacctgtgacccccgggcccccctgagaattgtgcctgctgagagctag

SEQ ID NO: 247381 - DNA, 1065 bp, Artificial Sequence
  derived and/or modified sequence
atgtggtggagggacctgacccggctgcggctgtggctgaagcgggaggccatccctggagagggcaggaaggccgccaaggtgaatgctggggtgggggagaagggcatctacacagccagcagccggggcggcccccccagcgcccggagcaaggctgtgacagtggtggccgagggcgccgccagccgctcctggctgtccatggatgcccctgagctgggccctggcctggtggagcggctggagcagctggccacctgccccctgtgtggcggcagctttgaggaccctgtgctgctggcctgtgagcacagcttctgccgggcctgcctggcccggcgctggggcaccccaccagccaccggcacagaggccagccccacagcctgcccctgctgcggcctgccctgcccccggcgcagcctgcggagcaatgtgcggctggccgtggaggtgcgcatcagccgggagctgcgggagaagctggccgagcccggggcccgggccggcagaagaagaggaggccgcatccccaccatgggctgcctggacctgcctggagaggacatgaggaagacctggaggagatttgaggtgcccaccagcaagagcagcaacagtgaagatgacctgcctgaggactaccctgtggtgaagaagatgctgcaccggctgacagctgacctgaccctggaccccggcacagcccaccggcggctgctgatctctgctgacagaagatctgtgcagctggcccctcctggcaccccagcccccccagatggccccaagagatttgaccagctgcctgctgtgctgggcgcccagggctttggagctggccgccactgctgggaggtggagacagcagatgctgccagctgccgggacagcagcggggaggatgctgatgatgaggagagccactatgctgtgggcgccgccggggagagcgtgcagaggaagggctgtgcccctggccccctgggggagcgcatcttccccctcttctgcacctgtgacccccgggcccccctgagaattgtgcctgctgagagctag

SEQ ID NO: 247382 - DNA, 1065 bp, Artificial Sequence
  derived and/or modified sequence
atgtggtggagggacctgacccggctgcggctgtggctgaagcgggaggccatccctggagagggcaggaaggccgccaaggtgaatgctggggtgggggagaagggcatctacacagccagcagccggggcggcccccccagcgcccggagcaaggctgtgacagtggtggccgagggcgccgccagccgctcctggctgtccatggatgcccctgagctgggccctggcctggtggagcggctggagcagctggccacctgccccctgtgtggcggcagctttgaggaccctgtgctgctggcctgtgagcacagcttctgccgggcctgcctggcccggcgctggggcaccccaccagccaccggcacagaggccagccccacagcctgcccctgctgcggcctgccctgcccccggcgcagcctgcggagcaatgtgcggctggccgtggaggtgcgcatcagccgggagctgcgggagaagctggccgagcccggggcccgggccggcagaagaagaggaggccgcatccccaccatgggctgcctggacctgcctggagaggacatgaggaagacctggaggagatttgaggtgcccaccagcaagagcagcaacagtgaagatgacctgcctgaggactaccctgtggtgaagaagatgctgcaccggctgacagctgacctgaccctggaccccggcacagcccaccggcggctgctgatctctgctgacagaagatctgtgcagctggcccctcctggcaccccagcccccccagatggccccaagcgcttcaaccagctgcctgctgtgctgggcgcccagggctttggagctggccgccactgctgggaggtggagacagcagatgctgccagctgccgggacagcagcggggaggatgctgatgatgaggagagccactatgctgtgggcgccgccggggagagcgtgcagaggaagggctgtgcccctggccccctgggggagcgcatcttccccctcttctgcacctgtgacccccgggcccccctgagaattgtgcctgctgagagctag

SEQ ID NO: 247383 - DNA, 756 bp, Artificial Sequence
  derived and/or modified sequence
atgtggtggagggacctgacccggctgcggctgtggctgaagcgggaggccatccctggagagggcaggaaggccgccaaggtgaatgctggggtgggggagaagggcatctacacagccagcagccggggcggcccccccagcgcccggagcaaggctgtgacagtggtggccgagggcgccgccagccgctcctggctgtccatggatgcccctgagctgggccctggcctggtggagcggctggagcagctggccacctgccccctgtgtggcggcagctttgaggaccctgtgctgctggcctgtgagcacagcttctgccgggcctgcctggcccggcgctggggcaccccaccagccaccggcacagaggccagccccacagcctgcccctgctgcggcctgccctgcccccggcgcagcctgcggagcaatgtgcggctggccgtggaggtgcgcatcagccgggagctgctgtttggaggcggcatcccccacagcttcctgggcacccacagccacgcccactgccgcagcatcaacagcaacccccacttccggcccaagatcatgaggccccacctggtgtccaccttcccccggccctgcagcaagcccaaccccttcctgcccagcggcagccagaacctgctgagccccacagctgccaccgtgctgcctgacttcagccacagcaaccacagcaggcctgccatgggcaaccggcccagccccagcgtgctggtgaagtag

SEQ ID NO: 247384 - DNA, 756 bp, Artificial Sequence
  derived and/or modified sequence
atgtggtggagggacctgacccggctgcggctgtggctgaagcgggaggccatccctggagagggcaggaaggccgccaaggtgaatgctggggtgggggagaagggcatctacacagccagcagccggggcggcccccccagcgcccggagcaaggctgtgacagtggtggccgagggcgccgccagccgctcctggctgtccatggatgcccctgagctgggccctggcctggtggagcggctggagcagctggccacctgccccctgtgtggcggcagctttgaggaccctgtgctgctggcctgtgagcacagcttctgccgggcctgcctggcccggcgctggggcaccccaccagccaccggcacagaggccagccccacagcctgcccctgctgcggcctgccctgcccccggcgcagcctgcggagcaatgtgcggctggccgtggaggtgcgcatcagccgggagctgctgtttggccggggcatcccccacagcttcctgggcacccacagccacgcccactgccgcagcatcaacagcaacccccacttccggcccaagatcatgaggccccacctggtgtccaccttcccccacccctgcagcaagcccaaccccttcctgcccagcggcagccagaacctgctgagccccacagccaccaccgtgctgcctgacttcagccacagcaaccacagcaggcctgccatgggcaaccggcccagccccagcgtgctggtgaagtag

SEQ ID NO: 247385 - DNA, 756 bp, Artificial Sequence
  derived and/or modified sequence
atgtggtggcgggacctgacccggctgcggctgtggctgaagcgggaagccattcctggcgaaggtaggaaagctgctaaagtgaacgccggcgtcggggagaagggaatctacacagcctcttcacgaggcgggccccctagcgcccgttcaaaggcggtgaccgtggtcgctgaaggagcagctagccgctcttggctctctatggacgccccagaactgggccccggcctggtcgaacggctggagcaactcgcaacttgccccctgtgtggtgggtccttcgaggaccccgtgttactggcttgcgagcacagcttttgcagggcctgcctggcaagacgctgggggacgccccctgccactggtaccgaggctagcccaaccgcctgcccatgttgtggcctgccctgtccaaggagatcccttaggtcgaacgtgaggctcgctgtcgaggtgcgtatttctagggagctgctcttcggcggcggcatcccacattccttcctcgggacccattcacacgctcattgtaggagcattaacagtaacccacactttcgtccaaagattatgagaccgcacctggtgtccaccttccctcgtccatgcagtaaacctaacccatttcttccaagtggcagccaaaatttgctctctccaaccgcaaccacagtgttgccagatttttctcacagtaatcattcaagacccgcgatgggcaacagaccaagtccctctgtcctcgtgaagtag

SEQ ID NO: 247386 - DNA, 1065 bp, Artificial Sequence
  derived and/or modified sequence
atgtggtggcgggacctgacccggctgcggctgtggctgaagcgggaggctatccctggagagggccgtaaagccgcaaaggtgaacgccggcgtcggggagaagggcatatacactgcgagctctcggggcggcccccctagcgccaggtccaaagcggtcaccgtggttgcagaaggcgccgcaagtcgtagttggcttagcatggacgcccctgagctcggcccaggactagtagagagactcgagcaacttgcgacttgccctctgtgcggaggatcctttgaggatcccgttttactggcttgcgagcactccttctgtagagcatgccttgccaggaggtggggcactccaccagcgacaggcacagaagctagtcccacagcctgcccctgctgcgggctgccttgcccacggagaagcctacgcagtaacgtcagattagccgtcgaggtccgcatctcgcgcgaattaagggaaaagcttgctgagccaggtgccagggcgggccgaaggagaggcggccggatcccaacaatgggctgcctagacttgcccggcgaagatatgagaaaaacatggagaaggttcgaggtgcccactccaaagtcttccaattctgaggacgacctcccagaggactacccggtcgtgaagaagatgctccataggttaactgcagatctgacgctggaccctggtaccgctcaccgtcggctcctgattagtacagacaggagatccgttcagttagcaccacctggtacccccgccccacccgatggaccgaagagatttgatcaactgcccgctgttctgggggcccaaggtttcggcgccgggcggcattgttgggaagttgagacggccgatgcagcaagctgcagggacagttccggagaagatgaggatgatgaggaatctcattatgcggtgggcgccgccggagagtccgtgcagcgaaaagggtgtgcacccgggcctctaggggaacgcatctttccgttattttgcacatgtgatccccgtgcaccactgcggatcgtgcctgcagagtcctag

SEQ ID NO: 247387 - DNA, 1065 bp, Artificial Sequence
  derived and/or modified sequence
atgtggtggcgggacctgacccggctgcggctgtggctgaagcgggaagcgattcccggggagggcaggaaggccgccaaggtgaacgcaggagttggcgaaaagggtatctatacggcctctagccggggtggcccgccgtccgcaaggtcaaaggctgtgaccgtggtggctgagggggccgcttcccggtcatggctgtccatggacgcgcccgaactcggaccaggccttgttgagcggcttgaacaacttgcgacttgcccactatgcggcgggagctttgaggatccggtcttgctggcgtgcgagcattccttctgcagggcatgccttgccagacgatggggaactcctccagctaccgggaccgaggcctccccaacggcatgtccctgctgcgggttaccctgcccacgtaggagccttaggagcaatgtgcgcctggcggtggaagttaggattagcagggagctgcgtgagaagctagccgagccaggtgctagagcaggaagacgtcgcggggggagaatcccgacaatggggtgtctagaccttcctggggaggatatgcgtaagacttggcgccgctttgaggtccctacgtccaagagctcaaatagtgaagatgacctcccagaggattacccagtggtaaaaaaaatgctgcatcgcctgaccgctgacctgactctcgacccaggtacggcccatcggagactgctcatctcagcagataggagaagcgtgcaactggctccccctggcactccagcaccgcccgacggccctaagcgtttcgaccaacttccagccgtgctgggtgcacaaggtttcggtgcaggtcggcactgttgggaggtagagacagcagacgcggcttcttgcagggattctagtggggaggacgcagacgacgaggaatcccactacgcagtcggcgcagccggtgagtctgttcagagaaaggggtgcgccccaggaccactcggcgaaaggatttttccactcttctgcacctgtgatccccgggcgcccctcaggatcgtcccggcagaatcatag

SEQ ID NO: 247388 - DNA, 1065 bp, Artificial Sequence
  derived and/or modified sequence
atgtggtggcgggacctgacccggctgcggctgtggctgaagcgggaggccattccaggcgaagggagaaaggccgcgaaggtaaatgccggggtgggcgaaaaagggatatacacagcttcaagccgcggcggcccccctagtgcccgttctaaggcagtgactgtggtcgccgaaggggcagcctcacggtcgtggttgagcatggacgctcctgaactgggtccgggccttgtcgagaggctggagcagttggccacttgccccctctgcgggggaagttttgaagaccccgttctgctggcatgcgaacacagcttttgtagagcgtgcctcgccaggcgatgggggactcctccagccactggcaccgaggcctcgcccacagcatgcccgtgttgtgggttaccgtgccctaggcggtctcttcgcagcaacgtacgtcttgcggtcgaggtccgcatctcacgcgagctgcgcgaaaagctcgccgaacctggagcacgtgctggtagacgtcgaggaggacgtatacccacaatgggctgcctagatttaccaggggaggatatgaggaagacatggaggcgatttgaggtacccaccagcaaatctagcaattctgaagatgatctgcccgaggactaccccgtggtgaagaagatgctgcacaggctgaccgctgacctgaccttagacccaggcacagcccatagaaggctcctgatctctgccgacagaaggtctgttcaactcgcaccacctggaacgcccgcaccacctgatggtccaaagcgcttcaatcagcttccggccgtactgggggcccagggttttggagcaggtcggcactgctgggaggtcgaaactgccgacgccgcctcctgtagggactctagcggagaggatgctgatgacgaggaatcgcattatgcggtgggagctgctggggagtctgtgcagcgcaagggatgcgcccccggtccactgggagaaagaatttttcccctgttctgcacctgtgatccccgggcacccctgcggattgtgccggccgagtcatag

SEQ ID NO: 247389 - DNA, 1065 bp, Artificial Sequence
  derived and/or modified sequence
atgtggtggcgggacctgacccggctgcggctgtggctgaagcgggaagctatacctggggaaggacgcaaggctgctaaagtcaacgcaggcgtgggagaaaaaggtatctatactgcctcgagcaggggcgggccaccttctgcccgatccaaagcggttacagttgtggccgaaggcgctgccagtaggtcgtggctgagtatggatgctcctgagttggggcctggcctcgtagaacgcctggagcaactcgctacctgcccactctgtgggggatcttttgaggacccagtgcttcttgcctgcgaacatagtttctgccgagcttgcctagccagacggtggggaacacctccggctaccgggaccgaggcatcccctacagcctgtccatgttgcggactcccctgcccacgccggtccctgcgatccaacgtgaggctcgctgttgaagtccgcatatctagggagctcagggagaaattagccgagcccggtgctcgggccgggcggagaagagggggccgaatccctacgatgggctgtttagatctgcctggggaagatatgcgtaaaacctggcgcagattcgaggtgcctacttctaagtcttccaatagcgaagacgatcttcctgaggattacccggtggtgaagaaaatgcttcacagacttaccgcggacctcactcttgacccaggaaccgctcatcggcgcctactgatatcagctgatcgccggagcgtccagctcgctccccccggaacccccgcacctcctgatggtcctaagcgctttgatcagctgcctgcagtgctgggagctcaggggtttggggccggacggcactgctgggaggttgaaactgccgatgccgcctcttgtagagactcctcgggagaggacgcggatgatgaggaatctcattatgctgtgggcgcagccggtgaatcagtgcagcggaaaggttgcgcacccgggccacttggagaaaggattttcccactgttctgtacctgtgacccccgcgcgcctctgagaatcgtcccagcggagtcatag

SEQ ID NO: 247390 - DNA, 1065 bp, Artificial Sequence
  derived and/or modified sequence
atgtggtggcgggacctgacccggctgcggctgtggctgaagcgggaagcgatccccggggagggaaggaaagccgctaaagtaaacgccggagtgggcgagaaaggcatctacacagcaagttccaggggcggcccaccatctgcccgcagcaaagcagtgacagtcgtagcagagggggcagcttctagaagttggctgtctatggacgccccagagttgggaccagggttggtagaacgactcgagcagttagccacctgtcccctgtgcggaggctcatttgaagaccctgtgctcttggcctgcgagcactccttctgccgggcctgcctggcacggcgctgggggacccctccagctaccggcaccgaggcatcgcccaccgcctgtccatgctgcggattgccatgtccccgaagaagtttacgctccaacgtgcgactggccgtcgaagttcggatatcccgcgagctaagggagaaattggccgagcccggcgctagggccggacgaaggcgcggggggaggatcccaactatggggtgtttggacttgccaggtgaggacatgcgtaaaacatggcggaggtttgaagttccaacctcgaaatcttctaactctgaggacgatctgcccgaggactaccctgttgtcaaaaaaatgcttcataggttgactgctgatttgaccctcgatcccggcactgcccacaggaggctgctgattagtgccgaccgacggagcgtccaactcgcccctcccgggaccccggctcctccagatggtcctaagcgatttgaccaacttcccgcagtactcggcgcacaagggttcggcgctggccgacactgttgggaagttgaaacggccgacgccgcctcttgtcgcgattcctcgggcgaggatgccgatgacgaggaatcacattatgctgtgggcgcagcaggtgagagtgtacagcggaaggggtgcgcaccaggccccctgggagaaaggatctttccacttttttgtacttgtgatccccgcgctcctctgaggattgtgccggcggagtcctag

SEQ ID NO: 247391 - DNA, 1065 bp, Artificial Sequence
  derived and/or modified sequence
atgtggtggcgggacctgacccggctgcggctgtggctgaagcgggaagcgatcccaggcgaagggagaaaggctgctaaggtgaatgctggagtgggcgagaaggggatctataccgcttcctcccgggggggccctccatctgctcgctccaaggcagtgactgtggtcgctgaaggggcggcgtctcggagttggctgagtatggacgccccagaactggggccaggcctagtggagaggctggagcagctagctacatgccccctatgtggaggctccttcgaggaccccgtactactggcgtgtgagcactctttctgccgggcctgtctcgctagaagatggggaactcctcccgcaaccggaactgaagccagcccaacagcatgtccttgctgcggcctcccatgtccacgcagaagcctcagatcaaacgtgcgcctggctgttgaagttcggatctcaagggaactgcgggagaagttggccgagccaggtgccagagccgggagacgacgcggagggaggattccaacaatgggatgtctggacctgcccggggaggacatgcgaaagacttggaggagatttgaagtgccgactagcaagtcttccaattccgaggatgatttaccggaggattaccccgtcgttaagaaaatgctgcacaggttgactgccgacctgaccctcgacccagggacagctcatcgaagacttctgattagtgcagaccgaaggagtgtccagctcgcccccccaggtacaccagctcccccagacgggcctaagcgattcgaccaattaccagctgtgctgggcgctcaggggttcggtgccggccgacactgctgggaagtagagactgccgatgcggcgtcctgtcgcgactctagcggtgaggatgccgacgatgaggagagccattacgccgtaggcgccgccggtgagtcggtacagagaaagggctgtgcacctggtcccctgggcgaacggatcttcccattgttttgcacctgtgacccccgggcccctctccgcatagtaccagccgaatcttag

SEQ ID NO: 247392 - DNA, 1065 bp, Artificial Sequence
  derived and/or modified sequence
atgtggtggcgggacctgacccggctgcggctgtggctgaagcgggaggcgattcctggagaaggccggaaagccgccaaagtgaatgctggggtaggtgagaagggcatttatacagcaagctctcggggaggtccacccagcgcccgctctaaggccgttacggttgttgccgaaggagcagcttctcgctcatggctctcaatggatgcgcctgagctcggccccggtctagttgagaggctggagcagctggccacctgccccctgtgcggtggttcgttcgaggacccggtactgctcgcctgcgagcactctttctgccgggcctgcttggccaggcgctgggggacgccccctgcaacaggtactgaagcaagtcccacggcttgcccctgttgtgggcttccctgcccacgaaggtctctgcggtctaacgttcgcctggccgtggaggtcagaatcagccgggaattgagagaaaaactggccgagccgggcgccagggccgggcggagacggggcgggaggataccaacaatgggctgcctcgacctacctggggaagacatgcggaagacctggcgccggtttgaggtgcccaccagtaaatcatctaattcagaagacgacttgcctgaagactatcctgtcgtcaagaagatgttacaccggcttacagccgacctgacgcttgatccggggaccgctcacagacggcttctgatctcggcggacagaaggtcagtgcaactagctccaccagggaccccggccccaccagatggtccaaagcgatttgatcagctgccggctgtactgggagcccagggctttggggctggtagacattgttgggaagtggaaaccgctgatgccgccagctgcagggacagtagcggggaagacgccgatgacgaagagtcacattatgccgttggcgcagcaggagagtcggtacagcggaagggatgtgcgccaggccccctgggggaacggatcttccctctattctgtacatgcgacccaagggcccctttgcgaatcgtacccgcagagtcatag

SEQ ID NO: 247393 - DNA, 1065 bp, Artificial Sequence
  derived and/or modified sequence
atgtggtggcgggacctgacccggctgcggctgtggctgaagcgggaggctattccaggggagggccgtaaagctgccaaagtgaacgctggagtgggagagaagggcatctacactgccagctccagaggagggcctccctccgcgagatcaaaggcggtgacagtggtagctgagggggcggccagtcgcagctggctgtctatggatgccccagagttaggccccggcttggtcgagaggctcgagcagctggcaacttgccccttgtgtgggggatcctttgaggaccctgttctattagcatgcgagcacagtttctgtcgggcctgtctagctcgccggtggggaactcccccagctacgggaacggaggccagtcccactgcatgcccatgctgtggcctcccttgcccgaggcgttctctgagatcaaacgtacgactggcagtagaagtgaggatcagtagagaattgagagagaaactagccgagcccggcgcaagagccggacggcgcaggggcggacgtatccccacaatgggttgtctggacttgccaggcgaggacatgcgtaaaacatggcgcagattcgaggttcctacttccaaatccagcaactccgaggacgacttgccagaagactaccctgtggtgaaaaagatgttacacaggcttaccgctgacctgacactggaccccggcacagctcaccggcgcctccttatatctgctgatcgtaggtccgttcaacttgcaccaccgggaaccccagccccacctgacggtcctaaaaggttcgaccagttgccagccgttctgggtgctcagggttttggtgctggccgccattgttgggaggtggagactgcagacgcggctagctgccgggattcttccggtgaggatgctgatgacgaggagagccattatgcggtgggagctgccggagagtccgtccaacggaagggctgcgccccaggtccactaggtgagagaatatttcctctgttttgtacttgtgatccgcgcgccccgctgcggatcgtccctgctgaatcctag

SEQ ID NO: 247394 - DNA, 756 bp, Artificial Sequence
  derived and/or modified sequence
atgtggtggcgggacctgacccggctgcggctgtggctgaagcgggaggcaatacccggagaggggaggaaggccgcaaaagtgaatgctggcgtgggcgaaaaaggaatttataccgccagctcccggggcggacccccatccgcccggtccaaagccgtcactgttgtggcagagggggctgcgagcagatcctggctctccatggacgcccccgaactgggtcccgggcttgtggagcgtctggagcaactggcaacatgccctctgtgtggaggaagcttcgaagatcccgttcttttagcttgcgagcactcattttgtagagcttgtctcgctagacgatggggcacacctcctgcgaccggaaccgaggcctctcctacggcctgtccctgttgcggactcccctgtccacgccggagcctgcgatcgaacgtcagactggctgttgaagtcagaatatcgagagagctcctcttcggaggagggattccacatagctttctaggcacccactcacatgctcattgcagaagcatcaattccaacccccatttccgcccgaagatcatgagaccccacctggtgagcactttccccaggccatgttccaagcccaacccgttcttgccaagtggctctcagaatcttctgtcccccacggctaccactgtcctgcccgatttttctcacagtaaccactctaggcccgcaatgggaaaccgaccctcaccatcagtccttgttaaatag

SEQ ID NO: 247395 - DNA, 756 bp, Artificial Sequence
  derived and/or modified sequence
atgtggtggcgggacctgacccggctgcggctgtggctgaagcgggaggccattcccggggaggggcgaaaggcggcaaaggtgaacgccggggtcggtgagaagggaatttatacagccagttcaaggggcgggcctccctccgccaggtccaaagctgtcacagtggtagctgaaggcgctgcaagccgctcctggcttagcatggacgctccggagttagggcctggtctggttgagcgactggagcagctagccacctgtcctctttgtggcggcagcttcgaggatcccgtgctcttagcctgcgagcattctttttgtcgagcttgtctcgcccgtagatggggcactcccccagcaaccgggaccgaggcatcgcctaccgcgtgtccctgctgcgggttaccatgcccacgaaggtccctgcggtcaaatgttcgcttggcggtggaagtcagaatttctcgcgaacttttatttggcggcggaattccccacagcttcctcggaacccactcccatgctcattgccgatctatcaattcaaatccccacttccggcctaagatcatgcgaccacacctggtgtctacctttcctaggccatgttctaagccaaaccccttcctgccctcaggtagccagaatctgctgagtccgacggctacaaccgttcttcccgactttagccactcgaaccactcacggcccgctatgggtaacagaccatccccaagtgtgctggtgaaatag

SEQ ID NO: 247396 - DNA, 756 bp, Artificial Sequence
  derived and/or modified sequence
atgtggtggcgggacctgacccggctgcggctgtggctgaagcgggaggccatccccggggagggtcggaaagcagccaaggttaacgcgggggtcggtgaaaaaggtatttacactgctagtagtaggggtggtccaccgtctgcacggtccaaagccgtgacggtggtcgccgaaggggcggcctccagatcatggctgtccatggatgctccagagcttgggcccgggctggttgaaagactggagcagcttgccacttgtcccctgtgtggcggatctttcgaggaccccgttctgctcgcctgcgagcacagcttctgccgcgcctgtctggcccggaggtggggtacccctcccgctacaggaacagaagcctcacccactgcctgcccatgttgtggtctgccctgtccacgcaggtcgttgcgctcgaatgtgaggctggccgtcgaagtgcgtatcagccgcgaactgctctttggcgggggaatacctcactcgttcctggggacacacagccacgcccactgccgctccatcaatagcaatcctcattttagacccaaaattatgcgtccgcacctggtcagcaccttccctaggccctgttctaaacctaatcctttcctgccaagcggcagtcagaaccttctttcgccaaccgcaacgactgtgctgcctgactttagccactccaatcacagtcggccagcaatggggaaccgccccagcccctcagtgctcgtgaaatag

SEQ ID NO: 247397 - DNA, 756 bp, Artificial Sequence
  derived and/or modified sequence
atgtggtggcgggacctgacccggctgcggctgtggctgaagcgggaggctattcctggggaagggagaaaagccgccaaggttaacgccggcgtgggcgagaaagggatctataccgccagcagccgaggaggtccaccaagtgctaggtctaaggcggtcactgtggtggctgagggggcagcgtccagaagttggttgagcatggacgcacccgagttggggccaggcctggttgagagactcgagcagctagcgacgtgtccgctgtgcggaggaagcttcgaggaccccgtgctgctggcctgtgagcatagcttctgtcgcgcctgccttgcccgtaggtgggggactcccccagcgactgggactgaagccagtccaaccgcgtgcccctgttgcggcctgccctgcccccggaggtctctacggagcaatgtgagactagctgtcgaagttcgcatctcccgcgaactgctgttcggaggcggcatacctcattcgttcttggggactcacagtcatgctcattgtaggtcaataaattccaacccccactttaggccaaaaatcatgcggccccacttggtgtccacgtttcctcgtccgtgtagcaaaccaaaccctttcctacccagcggttctcagaatctgctgtcgccgaccgctacaactgtgctcccggacttttctcactctaatcactcccggcctgcgatgggcaatcggccctcacccagcgtcttggtaaagtag

SEQ ID NO: 247398 - DNA, 756 bp, Artificial Sequence
  derived and/or modified sequence
atgtggtggcgggacctgacccggctgcggctgtggctgaagcgggaggcgataccaggagaaggacgaaaggctgctaaagtgaacgcaggggtcggggaaaaggggatctatacggcctcaagtcgcggcggtcctccaagtgcgcgctccaaggccgttacagtggtagctgagggagctgcttctcgatcctggctttctatggatgccccagaactgggtcccggattagtagaaagactggaacaattggcgacttgtccactctgtgggggctccttcgaagatcctgtgctgctggcatgcgagcacagtttttgtcgagcctgcctggcccggaggtggggaacgccgcctgctacaggaacggaggcctcacctaccgcctgcccttgctgcggattaccctgtcctcgacgatcgctgcggtccaatgtacgcctggcagtggaggtccggataagccgggaactcctttttggtgggggcatcccacattccttcctcggcacccactcccacgcacattgcaggtcaattaattccaacccacactttcggcctaagatcatgcggccacaccttgtgtccacatttccacgtccatgttctaaaccgaatccatttctgccctccggctctcaaaatcttctgtctcccactgcgactacagtgctccccgacttttctcacagcaaccattcccggcccgccatgggtaataggcccagtccgtccgtactcgtgaagtag

SEQ ID NO: 247399 - DNA, 756 bp, Artificial Sequence
  derived and/or modified sequence
atgtggtggcgggacctgacccggctgcggctgtggctgaagcgggaggccatacccggggaaggcaggaaagccgcaaaagtgaatgctggcgtgggagaaaaaggaatctacaccgcctcctctcggggcggaccgccctccgctcgaagtaaggctgtcacagtggttgctgaaggcgctgcgtcacgctcatggctttccatggacgcaccagaactgggccccggtttggtggagcgcttggaacaactggccacctgtcctctctgcggagggagcttcgaagatcctgttctgctagcctgcgagcacagtttctgccgcgcctgcctagcccgcaggtggggcactcccccggccaccggaactgaagcttctcccaccgcttgtccttgttgcggactgccctgcccacgtaggtcactgaggtccaatgtgcggctcgcagtggaggttaggatcagcagagaactactgtttgggggagggatcccacatagtttcttaggcacacatagccacgctcattgtagaagcattaattccaatccacattttagacccaaaataatgcggcctcacctcgtgtccacgtttcctaggccgtgctcaaaacccaatcctttccttccctccggctctcagaacctgctgagccctactgcagccacagtcctacccgatttttctcatagtaatcactcacggcccgcaatgggcaatcgacccagcccctcagtactcgtgaaatag

SEQ ID NO: 247400 - DNA, 756 bp, Artificial Sequence
  derived and/or modified sequence
atgtggtggcgggacctgacccggctgcggctgtggctgaagcgggaggccatcccaggggaggggcgcaaagcagctaaggtaaatgctggcgtgggcgagaagggaatttatactgcatccagccgcggtggtcctcccagcgccaggtctaaggccgtcacggtggtggcggagggcgcagcaagccgcagctggctgagcatggatgcgccggagctgggccccggcctggtcgagcgcctggagcagctggcaacatgcccactgtgtgggggatcgttcgaagatcccgtcctgctcgcctgtgaacacagcttttgccgggcctgtctcgcccgccgttggggtacaccccccgcaacgggcactgaggcaagccccaccgcatgcccttgttgcggtctaccgtgtcccaggcgatccctgcgatccaacgtcaggttggccgtggaggtgcgaatttcgcgcgaacttttatttggtcggggcatacctcactcgttcctgggcacacactcacatgcacattgccgctccatcaacagtaacccccactttcgcccaaaaattatgaggccacatctggtttcaacgttccctcatccctgttcaaaaccaaatccctttctgccctccggcagccagaacctcctgagtcccaccgccaccactgtacttcctgatttctcacacagcaaccatagccgccccgctatgggcaaccgcccaagcccttcagtgttggtaaagtag

SEQ ID NO: 247401 - DNA, 756 bp, Artificial Sequence
  derived and/or modified sequence
atgtggtggcgagacctaacgagactaagactgtggctgaagagggaagccattcccggtgaaggccgtaaagccgcaaaggttaatgcaggtgtgggcgagaagggtatctacacagcaagttccagaggcggacctccttccgcacgttccaaagcggtgacagtggtcgcagaaggcgcagccagtagaagctggctcagcatggatgcccctgaactgggtccgggattagtcgaaagactggagcagctggcaacatgtccactctgtgggggatcatttgaggatccagtgctgctcgcttgcgagcattcattctgcagggcctgtttagccaggcggtggggcaccccaccggctactggaaccgaggcgtcaccaactgcctgtccctgttgcgggctcccttgtccaagaagaagcctgcggagcaatgttcgactcgcggtggaggttcggatctcccgtgagctcctctttgggggtgggattcctcactcattcctgggcacacattcccacgcacactgtcgctccatcaacagcaacccgcattttagacctaaaatcatgcggccacatttggtatctacttttccacgaccctgctcgaaacccaacccctttctgccatcgggttcacaaaatctcctttctccaacagctaccaccgtgctgcccgacttcagccactctaatcactcgaggcctgcgatggggaaccgccctagtccgtctgtactggtcaagtag

SEQ ID NO: 247402 - DNA, 1065 bp, Artificial Sequence
  derived and/or modified sequence
atgtggtggcgggatctgaccagacttcggctctggctgaaacgggaggcaattcctggcgagggcaggaaagctgcaaaggtcaatgccggtgtcggcgagaaagggatctacaccgcctcttcgcggggtggtcctccctctgcccgaagtaaagctgttaccgtagtcgcagagggagctgcgtctcgctcctggctgtccatggatgccccagagctgggccctgggcttgttgaaagattggaacagctcgccacatgtcccttatgcggaggatccttcgaggatccagtgttgctcgcttgcgaacacagcttctgtcgggcttgcctggctcggcgatgggggactcctccagcgacaggcactgaggctagtcccactgcatgcccttgctgcggcctaccgtgcccgaggcgttctctgcgaagcaatgtccggctggctgtggaggttcgcatttcaagagaactgagggagaagctggccgaaccgggagccagagccggtcggcgacgcggaggcaggatccccacaatgggctgcttggatctccctggagaagacatgcggaaaacttggcgcagatttgaagtgcctacccccaagtcctccaactccgaagatgacttgccagaggattaccccgttgtgaagaaaatgttacatcggctgaccgctgacctcactctggacccgggaactgcacacagaaggttgctgatttccaccgacaggcgatcggtgcagctggcgccacccggaactccggcacctcccgatgggccaaaaaggtttgaccagctgccagctgtgctgggggcacaggggtttggggcagggcgacattgttgggaagtggaaaccgcagacgctgcctcgtgtagagattccagcggcgaggatgaagacgatgaagaaagtcactacgccgtcggagccgctggggagtccgtacagagaaagggttgtgcaccaggtcccctgggtgagcgcatcttccctctgttttgtacgtgtgacccccgagcgccactcaggattgtgccagctgaatcctag

SEQ ID NO: 247403 - DNA, 1065 bp, Artificial Sequence
  derived and/or modified sequence
atgtggtggcgagacttgacacgcttgcgactgtggcttaagcgggaagctatcccaggcgaaggccgaaaggcagctaaggtcaacgcaggtgtgggcgaaaaaggcatctacacagccagctcgagagggggaccaccatccgcaaggagtaaggcagttaccgtagtggcggagggagctgcatcccgatcatggttgtctatggatgctccagagctggggccaggattagtggagcggctggagcaactggcgacatgcccactttgtggaggatcattcgaggacccagtgctgttggcttgtgagcactcattctgtagagcatgcctcgccagaaggtgggggacaccaccggctacaggtacagaggcttcccctaccgcgtgtccttgctgcggattaccatgtccacggaggagcctaaggtctaacgtccggttggcagtagaggtccgtatttcaagggaactgcgggagaagctcgctgagccaggcgcaagagctggacgtagaagggggggacgcattcctacaatgggttgcctggacctgccaggcgaagatatgcgaaaaacgtggcggagattcgaggttccaacttccaagtcgtcgaacagtgaagatgacctcccagaagattaccccgttgttaaaaagatgttgcacagactcaccgccgacctgacattggatccaggcacagcacatcggagactattgattagtgctgatcggcgttctgtccagctggcgccacctggcacccccgctcctcccgatggaccaaaacggttcgatcagctccctgcagttctgggggctcaggggttcggggctgggagacattgctgggaagtagaaaccgcagacgcggcatcctgtcgagacagttccggggaggatgctgatgatgaggagtcccactacgcagtaggagccgcaggcgaatccgtccaaagaaagggctgcgccccaggcccacttggcgaacggatatttcctctcttttgtacgtgtgatccacgtgcccctctgaggatcgttcccgcagagagttag

SEQ ID NO: 247404 - DNA, 1065 bp, Artificial Sequence
  derived and/or modified sequence
atgtggtggagggacttaacccgtctgaggctgtggctgaagcgtgaggccatcccaggggagggtcgcaaagctgcaaaggtgaacgccggagtgggagaaaagggaatttatacggcatcttcccggggtggcccaccctcagctcggagcaaggctgttacagtggtggcggagggtgcagcttctcgcagctggctgagtatggacgcgcctgaactgggcccaggtctggttgaacgactggagcagctagccacctgtcctctatgtgggggatcttttgaggatcctgtcctactggcgtgtgagcactccttctgccgtgcttgcctggctcgcaggtgggggacccctcctgcaactggcaccgaagcctctcctacagcttgtccatgttgtggcctcccctgccccaggagaagcctgcggtcaaatgtaagattagcagtcgaagttcgaatcagtcgggaactgagagaaaagctggccgaaccgggagcgcgagctggcagacggagaggcggacgaattccaactatggggtgtctggacctacctggtgaggatatgaggaaaacttggcgtaggtttgaggtcccaacatccaagagctctaactcagaggacgacctgcccgaggactacccggttgttaagaagatgctgcaccgtttgaccgccgatctgacactggaccctgggactgcgcacaggagacttttgatttccgctgaccgaagatctgtacagctggcaccgccagggacccccgcacccccagacggcccaaaacggttcaaccagctccctgcggtcctgggggcacagggcttcggcgctgggcgacattgctgggaagtggagacggccgacgcagcatcatgccgcgatagttctggagaagacgccgacgatgaagaatcccactatgccgtcggggctgccggagaatccgtacagaggaagggttgcgcccctggcccattgggggagagaatcttccctctcttttgtacatgcgaccctcgggcacctctgaggatcgtgcccgcagagtcatag

SEQ ID NO: 247405 - DNA, 1065 bp, Artificial Sequence
  derived and/or modified sequence
atgtggtggcgggacctcactcggctcaggctctggctcaaacgcgaagcaataccaggagaagggaggaaggccgcaaaagtgaacgccggtgttggtgagaaaggaatttacactgcttcatcgagaggcggacctccaagcgcccgaagcaaagccgtcactgtagtggcagaaggtgccgcatctcggtcttggcttagcatggacgccccagagctgggaccaggacttgtggagaggctggagcagctcgctacctgccctctttgtgggggttcattcgaggatcccgtcctacttgcttgcgaacattccttctgcagggcttgcctcgcgaggcgatggggaaccccgcctgctacaggcactgaagccagcccaaccgcttgcccgtgctgtggcctgccgtgtcctcgcagaagcttgcgctcaaacgtcagattggctgtggaggtccggatctcaagagagctgagggaaaaactcgccgagcccggagccagagcagggaggaggagggggggacgcatccccaccatgggctgtctcgatctccccggtgaggatatgcgtaaaacctggaggcgctttgaagtgcccacatcaaaatccagtaattcagaggacgatcttcctgaagactatcccgtggtcaagaaaatgcttcaccggctgacagctgatctgaccttagatccagggacagcccacaggcgtctccttatatccgcagaccggaggtccgttcagctggctccaccaggcaccccagcaccccctgatggacccaaacggttcgaccagctacccgctgtgctaggtgcccagggatttggagccggacgacattgctgggaggtcgaaactgcggacgccgcttcttgcagggattcaagtggagaagacgcagacgatgaagagagccactacgctgttggggcagctggagaatccgtccagcggaaaggttgcgcaccaggtcccctgggtgagcggatctttcccctgttttgtacttgcgacccccgagctcccctgcgcatagtgccagccgagtcatag

SEQ ID NO: 247406 - DNA, 1065 bp, Artificial Sequence
  derived and/or modified sequence
atgtggtggcgagatcttaccaggctgaggttatggctgaaacgtgaagcgattccgggtgaggggaggaaggcagcgaaggtcaatgccggtgtgggcgagaaagggatttataccgcatcttcacgaggtggcccaccttctgcaaggtccaaggcagtgacagtcgtggcggaaggagccgcaagccggtcttggttgtcaatggacgccccagagctgggaccaggacttgtggagcgcttagaacagctggctacttgtcctctgtgcggtggctcatttgaagacccagtcctgctggcctgtgaacacagcttttgtagagcgtgcctggccagacgctggggcacaccacccgcaactggtacagaggctagccccacagcctgcccatgttgtgggctgccatgccccaggcgcagcctaagatcaaacgtgcgcttagccgtggaggtgcggatatcgcgggaactccgggaaaaactggcagagcctggcgcacgggctggtaggcggaggggcggtcgaatccccacaatgggctgtttggacctgcccggtgaagatatgcggaagacatggcgaagattcgaggtcccaacgtccaaatctagcaactccgaagacgacttacctgaagactatccagtggtcaagaaaatgctgcatagactcaccgccgacttgacgctggaccccggtacagcgcatcgtcggttgttgatatccgctgaccggaggagtgtgcagctggcgcctcctggaacccctgctccaccagacggacctaagagatttgaccagctccctgctgtgcttggtgcacagggattcggcgcaggtagacactgttgggaggtggaaaccgctgacgccgcatcctgcagggactcatccggcgaagacgccgacgacgaggaatcccactacgccgttggggcagccggagagtccgtacagagaaaagggtgtgcacccggtccactgggcgaaaggatcttcccactgttctgtacttgcgacccaagagcaccactgaggattgtgcccgctgaatcctag

SEQ ID NO: 247407 - DNA, 1065 bp, Artificial Sequence
  derived and/or modified sequence
atgtggtggagggatctgacccggttgaggctgtggctgaagagggaagccatcccaggagaaggcagaaaggccgcaaaggttaatgcgggagtgggtgaaaaggggatctacaccgccagctccaggggtggaccccctagtgctaggagtaaggcagtcaccgttgtggctgagggcgcagcctcccgtagctggctctccatggacgcacccgagctggggccaggtcttgtggagcggttggagcagctcgctacctgccccctgtgcggcggatcattcgaggaccccgttctgcttgcgtgcgagcacagtttttgtagggcatgcctagcgaggaggtggggaacaccccctgccactgggaccgaagcaagcccaactgcctgcccatgttgcggtctgccctgccctcgcaggtcactcagaagcaacgtaaggcttgcagtggaggttcggatctccagggagctccgagaaaaacttgcagagcctggagctcgggcaggacggaggagaggcggaagaatccctaccatgggatgtcttgacctgcccggagaggacatgcgcaagacatggaggagattcgaggtgcccacttcaaaatcatctaactccgaagacgacctgcctgaagactacccggtagtcaaaaaaatgttgcatcgcttgacagctgaccttactctagaccctgggactgcacacaggcggctgttgatctccgccgataggaggtctgtccaactcgccccacctggtacccctgcacctccagatggccctaaaaggtttgaccaactgccagccgtgttgggtgcacagggcttcggggctggcaggcactgttgggaggttgagaccgctgatgctgcttcttgtcgagactcctccggcgaggacgcagatgacgaggagtcccattatgccgtcggcgctgctggagaatcagtccagcgaaagggctgcgcccctgggccacttggggagcgaattttcccactgttttgtacatgtgaccctcgggctcccctgaggatcgtgcccgctgagtcatag

SEQ ID NO: 247408 - DNA, 1065 bp, Artificial Sequence
  derived and/or modified sequence
atgtggtggagggatttgacccgcctacgtctatggttgaagcgcgaggcaatccctggagagggaagaaaagccgctaaagtgaatgccggagtgggagaaaagggcatctatacagcgtcatcaaggggtggaccaccaagtgcaaggagcaaggccgtgacagtcgtcgcagaaggggctgcctcacgctcctggctgagcatggatgcaccagagttaggcccaggacttgttgagcggctggagcagctggcgacttgtccattgtgtggtgggagctttgaggatcccgtcttattggcctgcgagcactcgttttgtcgcgcttgcctggctcggagatgggggactccgccagcgaccggcaccgaggctagccctacagcgtgcccctgttgcggtttgccatgtcccaggaggtccctccgaagcaacgttagactggctgtggaggtgcgcatctcaagagaacttcgcgagaagctcgccgagcctggcgctagggctggcaggagaaggggcggtcggattcccactatgggctgcctggatctgcctggcgaggacatgcgcaaaacctggcggcgatttgaggtgccaacctctaagtcctcaaactccgaagacgaccttcccgaggattaccccgttgtgaagaaaatgctccataggctcactgccgacttaactctggaccccggaacagcccaccgtagactgctcatttccgcagaccgtagaagcgtccaacttgctcctccaggaacaccagccccacccgatggacccaagcgattcgaccagcttcctgcagtccttggggcacagggttttggggcagggagacactgctgggaagtggaaacagccgacgccgcaagttgccgcgatagttcaggggaggatgccgatgacgaagagtcccactatgccgtgggagctgcaggtgagagcgttcaaaggaaaggttgtgctcccggtccattgggagaacgcatcttcccactgttttgtacatgcgacccacgggctcctttgaggatcgtcccagctgagtcctag

SEQ ID NO: 247409 - DNA, 1065 bp, Artificial Sequence
  derived and/or modified sequence
atgtggtggagagacctgactcgtctgagactctggctgaaacgtgaggctatcccaggtgagggaaggaaggccgcaaaagtgaatgcaggcgtgggagagaagggcatttacaccgcctctagcagaggcggtcctccgtcagctcgctcgaaggccgtcactgtggtagcggagggggcagcctcacgtagctggctgtctatggatgccccagagctgggccctggccttgtggaaaggctcgagcagttggccacttgcccactgtgtgggggtagtttcgaggatccggtgctgctagcctgtgagcacagtttttgtcgcgcatgtttagcacgcagatggggcactccccctgctactggcaccgaggcctctccgacagcctgtccctgttgtggccttccttgccccaggaggagcttgcgctcaaacgtcaggctcgcagtcgaggtccgtatttctagggagcttagggagaagctagctgagcccggagcccgtgccggaagacgaagggggggtcggatccccacgatgggctgcttggatttacccggagaggacatgcgtaaaacttggcgccgattcgaggtcccaacatccaagtcgtctaacagcgaagatgacctacccgaggactaccctgtagtgaagaagatgctacaccggttaactgccgatctcacgctcgaccctggcacagcccatcgacgcctattgatctctgccgacagaagatctgtgcagctcgctccacccggaacaccagcacccccagacggcccaaagaggttcgaccagctgcccgcagtgctcggggcacagggatttggtgccggtaggcactgctgggaagtggaaaccgccgacgccgcatcttgtcgggatagctccggagaagacgccgacgacgaggaatcccactatgccgttggggctgccggagagtccgtacaacgcaaggggtgcgctccagggccactaggcgaacgcatctttcccctcttttgcacctgcgaccccagggctccccttagaatcgtgccagctgagtcatag

SEQ ID NO: 247410 - DNA, 756 bp, Artificial Sequence
  derived and/or modified sequence
atgtggtggcgggacctcacccgtctgcggttgtggcttaagcgcgaggctattccaggggaggggagaaaagccgcaaaagtgaatgccggagttggagagaagggcatttacactgcttcctcacggggaggccctcctagtgcacgctctaaagctgtcacagtggtcgctgaaggggcagcgtccagaagttggctgtcaatggatgctcctgaactgggccctggcctggtcgaacgcctcgaacagctcgccacctgtcccctgtgcggaggtagtttcgaagatccagtgttactggcctgcgaacacagcttctgtcgtgcctgcctcgctcggagatggggcacgcccccagcaacgggaacagaagctagccctactgcctgcccctgttgtggtcttccctgcccgagacgctctctgcgatccaacgtccggttggctgtcgaggtacgcatcagcagagagctgctgtttggcggaggaatcccgcatagctttctcggcactcactcccacgcacattgcagatcaataaactctaatccgcacttccggcctaagatcatgagacctcatctagtttcaacattcccaagaccgtgcagcaaaccgaatccttttcttccatctggatcacagaaccttttgagtcccacggccactaccgttttgcctgacttctctcactcaaatcactctcgacccgcaatggggaatagacccagtccctcagtacttgttaagtag

SEQ ID NO: 247411 - DNA, 756 bp, Artificial Sequence
  derived and/or modified sequence
atgtggtggcgggatctgacccgcctgagactgtggctcaagcgtgaagcaatccctggcgaaggcaggaaggcagccaaggtcaatgcaggagtaggcgaaaaaggaatttacactgctagctctcgcggaggccctccaagcgctcgaagcaaagcggttactgttgtggctgagggagcggcttctcggtcctggttgagcatggatgcaccagagctcggaccgggtcttgtggaacgcctggagcaactcgcaacatgccccctgtgtggtggcagttttgaggaccccgtgctactggcgtgcgagcactccttctgcagagcctgtcttgctaggcgttggggcacaccgccagcgaccggaactgaggccagtcccaccgcctgtccatgctgtgggctaccttgccctaggaggagcttgaggtccaacgtgcgcctggctgtggaggtgcgaatctcaagggagttactctttggaggagggattccccacagttttcttggcacccactcacatgcccattgtaggagcattaatagtaacccacactttcggcctaaaatcatgaggccccatctggtctcaactttcccgagaccctgtagcaagcctaaccccttcctgccctccggtagtcagaacctcctatctcccaccgcaacaacagttttgccagatttctcacactcaaaccatagtagaccggcaatggggaatagaccctcgccctcagtgcttgtgaaatag

SEQ ID NO: 247412 - DNA, 756 bp, Artificial Sequence
  derived and/or modified sequence
atgtggtggagggacctcactaggctgaggctgtggctgaaacgggaggccattccaggcgagggaagaaaggcagcaaaggtgaacgctggcgtgggcgagaaagggatttacaccgcctctagcaggggcggaccacctagtgcacgctccaaggccgtgacagtggtagcagaaggggcagcgtctaggagttggctgagtatggatgcgcctgagctgggccctggactggtggaacggctcgaacaactggctacgtgcccactgtgcggcggaagcttcgaagatcctgtcctgttagcttgtgagcattctttttgtcgtgcatgcctggccaggcgctggggcaccccaccagcaactggcaccgaagcaagtcccacggcatgcccgtgttgtggcctgccgtgcccacgacgaagcctccgaagtaatgtcagactggctgtggaagtccgaatctctagggaactccttttcggcggtggtattcctcattcatttctgggaacgcactcacacgcccattgtagatccattaacagcaatccccatttcagaccaaaaatcatgcgcccacatctggtaagcaccttcccacgcccttgcagcaagcccaacccctttctcccaagcggctcccagaatctcttgtctcctaccgccactactgtgctccccgacttcagtcacagcaaccacagcaggcccgctatgggcaaccgtccttccccctccgtcctggtgaaatag

SEQ ID NO: 247413 - DNA, 756 bp, Artificial Sequence
  derived and/or modified sequence
atgtggtggagggacttgactaggctccgactgtggctgaagcgagaggcaatccccggagagggcaggaaggccgcaaaagtaaacgcaggggtcggcgaaaaagggatatataccgcctcctcgaggggcggtcccccaagtgctcgctccaaggccgtgacagtggtcgccgaaggggcagcgtctaggtcctggttgtccatggatgcacccgagctgggacctggcttagtggaacgcttagagcagctggctacgtgtcccctctgtggtggatcattcgaggaccctgtgttgctggcttgcgaacactcgttttgtcgggcatgtctggccagaagatgggggacgcctccagcaacaggtacagaggcctccccaaccgcctgcccttgctgcggcctgccttgtcctcgacgatctcttcggtctaatgtgaggctagcagtggaggtgcggattagcagggagctcctgttcgggggaggcatcccccactccttcttagggactcattcccacgctcactgcaggtcaatcaacagtaatccccatttccgtcccaagatcatgcgccctcacctcgtgtcaaccttccccaggccgtgctcaaaacctaaccctttcttgccttccgggagccaaaaccttttgtccccaacagccacaaccgtcctgccggatttttcacactccaaccactcgcgacccgctatgggcaaccggcctagtccgtctgttttggtcaagtag

SEQ ID NO: 247414 - DNA, 756 bp, Artificial Sequence
  derived and/or modified sequence
atgtggtggcgggacctcacgagactgcggctgtggttaaaacgggaagccattcccggagaggggaggaaggccgctaaagtcaacgcaggcgtgggtgaaaagggaatttacactgcctcatccaggggaggtccccctagcgccagatccaaggccgtgacggtcgtggccgagggcgcagccagcaggtcatggctctccatggatgcgcctgaactgggcccaggtctggtcgagaggctcgagcagttggcaacttgccccttgtgcggtggctcattcgaagacccagtgcttctcgcgtgtgagcattctttttgcagggcttgtctggcgcgacgttgggggacaccgccagcgaccggcacagaggcatccccgacagcctgtccatgttgtggtttgccgtgccctaggcgttcactgcggagcaacgtacgcctggccgtggaggttcgcatcagccgagaattgctctttggtggcggaattccacacagtttcttgggcacacactcccacgcccactgtcgtagtatcaattctaatccacatttcaggccaaagatcatgcgtccccacctggtgtctacatttccccgaccttgctctaagccaaacccttttctgccttcaggtagtcagaacctgctcagccctactgccacaactgtgctacctgacttttcccactccaatcactcgcggccagcaatggggaaccgtcctagcccctcggtattagttaaatag

SEQ ID NO: 247415 - DNA, 756 bp, Artificial Sequence
  derived and/or modified sequence
atgtggtggcgcgacctgactcgccttcggctgtggttgaagcgcgaagccatccccggagagggcagaaaagccgcaaaggtaaacgccggagttggcgaaaagggcatctatactgcctcgtctcggggaggacctcccagtgctcgatctaaagccgtcaccgttgttgctgagggagctgcttcaaggagctggctctcgatggacgctcctgagctgggcccaggcctcgtcgagcgcctggagcaactcgcaacatgtcccctgtgcggagggtcatttgaggaccctgtgctcctcgcttgcgagcacagtttctgccgggcttgcctcgcaagacggtggggtacacccccagcgactggcaccgaagccagtccaactgcatgcccatgttgcggactcccgtgtcccaggcggagtctgcgctccaacgttcgtcttgcggtggaggttagaatctctcgcgaactgttatttgggggagggatcccccatagcttccttgggacccacagccatgctcattgccggagcattaatagcaatcctcacttccgacccaaaatcatgcgaccacaccttgtcagtaccttccctcggccttgctcaaaacccaacccattcctcccatccgggtctcaaaacctgctgagcccaaccgctgccactgtcctgcccgatttcagccacagtaaccattctcgtccagccatgggtaacaggccatcccctagcgtgctggtgaagtag

SEQ ID NO: 247416 - DNA, 756 bp, Artificial Sequence
  derived and/or modified sequence
atgtggtggagagatcttacaagactacggctctggctgaagagagaggcgatcccaggcgagggcaggaaggcagcaaaagtcaatgccggagtgggagagaaaggcatttatacggcaagttcccgcggtggcccaccgtccgctaggtccaaggctgtcaccgtcgtcgccgaaggcgcagcctctagatcttggctcagcatggacgcacccgagctcgggcctggcctggtggaacgcctagagcagctggccacatgcccattatgcggcggatccttcgaagatcctgttttgctggcctgcgaacattctttctgcagagcatgtctggcacgacgctgggggactcccccagccacaggtaccgaggcatccccaacagcctgcccctgctgcggccttccttgcccacgcagaagcctgaggtccaacgtaagattggctgtcgaagtccgcatctctagggagcttcttttcggtcgcggaatcccgcattccttccttggcacacatagccacgcccactgtagaagcataaactcaaatccacattttcggccaaagataatgcgcccacacctggtcagtaccttcccccatccttgttcaaaaccgaatccctttcttccttctggctcccaaaacctgcttagccccacggccacaacagtgctaccagacttttcgcattccaatcattcccggccagcgatgggtaacaggccatccccttcagtcttggtgaagtag

SEQ ID NO: 247417 - DNA, 756 bp, Artificial Sequence
  derived and/or modified sequence
atgtggtggagagatttgacgagactgagactctggttgaagagagaggcaatcccaggagaggggcggaaagcggcaaaagttaatgcgggagtcggagagaagggcatctacacagcaagcagcaggggcggcccgccatctgcgcgctcgaaggcggtcacggtggtcgcggaaggggcggcgtccagatcctggctttccatggatgcgcccgagctgggcccggggctggtggagcgtctggagcagctggcgacgtgtcctctgtgcgggggctccttcgaggacccggtgcttctggcgtgcgagcacagcttctgccgcgcgtgtctggcccgccgctgggggactccgccggcgaccggcaccgaggcttcccccaccgcctgtccctgctgcggcctgccgtgtccccgccgcagcctgaggtctaatgtgcggctggcggtggaggtgcgaatcagccgcgagctgctttttgggggtggaattccccactcatttctgggaacacattcacacgcccattgcaggagtattaatagcaacccacattttcgccccaaaataatgagacctcacctggtctccacgtttccacgtccctgctcaaaaccaaatccattcctgccttctggctctcagaatcttctctcccctacagctactacagtacttcctgacttctcccattcaaaccattctaggcctgcaatggggaacaggccctccccatcagtattggtaaagtga

SEQ ID NO: 247418 - DNA, 1961 bp, Artificial Sequence
  derived and/or modified sequence
cgttacgcaaggcctggtgtttacctcccgtgggagcctcctccctccctataaagcctgatgtggtggagagatttgacgagactgagactctggttgaagagagaggcaatcccaggagaggggcggaaagcggcaaaagttaatgcgggagtcggagagaagggcatctacacagcaagcagcaggggcggcccgccatctgcgcgctcgaaggcggtcacggtggtcgcggaaggggcggcgtccagatcctggctttccatggatgcgcccgagctgggcccggggctggtggagcgtctggagcagctggcgacgtgtcctctgtgcgggggctccttcgaggacccggtgcttctggcgtgcgagcacagcttctgccgcgcgtgtctggcccgccgctgggggactccgccggcgaccggcaccgaggcttcccccaccgcctgtccgtgctgcggcctgccgtgtccccgccgcagcctgaggtctaatgtgcggctggcggtggaggtgcgaatcagccgcgagctgcgagagaagctggctgagcctggggcccgtgcggggagacgccgaggggggcgcatccccaccatgggctgcctggacctgcccggagaggatatgaggaagacatggagacgatttgaagtcccaacacccaagtcatctaattcagaggatgatctccctgaagattatccagtggtcaaaaaaatgcttcatagactgacagccgacctgaccctggaccctgggaccgcacaccgccgcctgctcatctccaccgaccgccgcagcgtacaactggccccaccagggacgcccgcgccccctgacggccccaagcgcttcgatcagctcccagctgtgctgggtgcgcagggcttcggggccggccgccactgctgggaggtggagactgcggacgccgcctcctgcagagactcttctggggaggatgaggacgacgaggagagccactatgcagtgggcgcggccggggaatcagtgcaacgcaagggctgcgcgcctggccccctgggggagcgcatcttcccgctgttctgcacctgcgaccctcgtgctccgctccgcattgtaccagcggaaagctgagtctcgtctccaactagaagtttggcccggccactggccctgcagctgctttttgggcgtggaattccccactcatttctgggaacacattcacacgcccattgcaggagtattaatagcaacccacattttcgccccaaaataatgagacctcacctggtctccacgtttccacatccctgctcaaaaccaaatccattcctgccttctggctctcagaatcttctctcccctacagctactacagtacttcctgacttctcccattcaaaccattctaggcctgcaatggggaacaggccctccccatcagtattggtaaagtgaccatgattcctacatagaggctctgctggtcaaatacttgactcccactcttgccactcctagctccagaagggctcagggccttccccacagatctaaggactgggctaccctgcctgtccactgaggtttctcctaaaacaagaggcttgactctggtctgggccctgtggccctctgggaagctttgtactcttttgcaggatctgggggtggggagggacaagctagttccccaacctcctatgactgctttctatgctcacagccttttttccataagaaccttcttgaaacttctccccgcacatacggaaaggaaccaatggtgctatttcccctctctcctcctcaacctgggaatacttcagacatctccaaactcatccttgtgtatagtctcacacccttccccataagtataaatgggcccatatttaacacattttgtgattttgggttatttattttgtgcatctgtggcaataaatgagatctcagtggtggta

SEQ ID NO: 247419 - DNA, 1970 bp, Artificial Sequence
  derived and/or modified sequence
cgttacgcaaggcctggtgtttacctcccgtgggagcctcctccctccctataaagcctgatgtggtggagagatttgacgagactgagactctggttgaagagagaggcaatcccaggagaggggcggaaagcggcaaaagttaatgcgggagtcggagagaagggcatctacacagcaagcagcaggggcggcccgccatctgcgcgctcgaaggcggtcacggtggtcgcggaaggggcggcgtccagatcctggctttccatggatgcgcccgagctgggcccggggctggtggagcgtctggagcagctggcgacgtgtcctctgtgcgggggctccttcgaggacccggtgcttctggcgtgcgagcacagcttctgccgcgcgtgtctggcccgccgctgggggactccgccggcgaccggcaccgaggcttcccccaccgcctgtccctgctgcggcctgccgtgtccccgccgcagcctgaggtctaatgtgcggctggcggtggaggtgcgaatcagccgcgagctgcgagagaagctggctgagcctggggcccgtgcggggagacgccgaggggggcgcatccccaccatgggctgcctggacctgcccggagaggatatgaggaagacatggagacgatttgaagtcccaacatccaagtcatctaattcagaggatgatctccctgaagattatccagtggtcaaaaaaatgcttcatagactgacagccgacctgaccctggaccctgggaccgcacaccgccgcctgctcatctccgccgaccgccgcagcgtacaactggccccaccagggacgcccgcgccccctgacggccccaagcgcttcgatcagctcccagctgtgctgggtgcgcagggcttcggggccggccgccactgctgggaggtggagactgcggacgccgcctcctgcagagactcttctggggaggatgcggacgacgaggagagccactatgcagtgggcgcggccggggaatcagtgcaacgcaagggctgcgcgcctggccccctgggggagcgcatcttcccgctgttctgcacctgcgaccctcgtgctccgctccgcattgtaccagcggaaagctgagtctcgtctccaactagaagtttggcccggccactggccctgcagctgctttttgggggtggaattccccactcatttctgggaacacattcacacgcccattgcaggagtattaatagcaacccacattttcgccccaaaataatgagacctcacctggtctccacgtttccacgtccctgctcaaaaccaaatccattcctgccttctggctctcagaatcttctctcccctacagctactacagtacttcctgacttctcccattcaaaccattctaggcctgcaatggggaacaggccctccccatcagtattggtaaagtgaccatgattcctacatagaggctctgctggtcaaatacttgactcccactcttgccactcctagctccagaagggctcagggccttccccacagatctaaggactgggctaccctgcctgtccactgaggtttctcctaaaacaagaggcttgactctggtctgggccctgtggccctctgggaagctttgtacctcttttgcaggatctgggggtggggagggacaagctagttccccaacctcctatgactgctttctatgctcacagccttttttccataagaaccttcttgaaacttctccccgcacatactcacggaaaggaaccaatggtgctatttcccctctctcctcctcaacctgggaatacttcagacatctccaaactcatccttgtgtatagtctcacacccttccccataagtataaatgggcccatatttaacacattttgtgattttgggttatttattttgtgcatctgtggcaataaatgagatctcagtggtggtatgga

SEQ ID NO: 247420 - DNA, 1970 bp, Artificial Sequence
  derived and/or modified sequence
cgttacgcaaggcctggtgtttacctcccgtgggagcctcctccctccctataaagcctgatgtggtggagagatttgacgagactgagactctggttgaagagagaggcaatcccaggagaggggcggaaagcggcaaaagttaatgcgggagtcggagagaagggcatctacacagcaagcagcaggggcggcccgccatctgcgcgctcgaaggcggtcacggtggtcgcggaaggggcggcgtccagatcctggctttccatggatgcgcccgagctgggcccggggctggtggagcgtctggagcagctggcgacgtgtcctctgtgcgggggctccttcgaggacccggtgcttctggcgtgcgagcacagcttctgccgcgcgtgtctggcccgccgctgggggactccgccggcgaccggcaccgaggcttcccccaccgcctgtccctgctgcggcctgccgtgtccccgccgcagcctgaggtctaatgtgcggctggcggtggaggtgcgaatcagccgcgagctgcgagagaagctggctgagcctggggcccgtgcggggagacgccgaggggggcgcatccccaccatgggctgcctggacctgcccggagaggatatgaggaagacatggagacgatttgaagtcccaacatccaagtcatctaattcagaggatgatctccctgaagattatccagtggtcaaaaaaatgcttcatagactgacagccgacctgaccctggaccctgggaccgcacaccgccgcctgctcatctccgccgaccgccgcagcgtacaactggccccaccagggacgcccgcgccccctgacggccccaagcgcttcaatcagctcccagctgtgctgggtgcgcagggcttcggggccggccgccactgctgggaggtggagactgcggacgccgcctcctgcagagactcttctggggaggatgcggacgacgaggagagccactatgcagtgggcgcggccggggaatcagtgcaacgcaagggctgcgcgcctggccccctgggggagcgcatcttcccgctgttctgcacctgcgaccctcgtgctccgctccgcattgtaccagcggaaagctgagtctcgtctccaactagaagtttggcccggccactggccctgcagctgctttttgggggtggaattccccactcatttctgggaacacattcacacgcccattgcaggagtattaatagcaacccacattttcgccccaaaataatgagacctcacctggtctccacgtttccacgtccctgctcaaaaccaaatccattcctgccttctggctctcagaatcttctctcccctacagctactacagtacttcctgacttctcccattcaaaccattctaggcctgcaatggggaacaggccctccccatcagtattggtaaagtgaccatgattcctacatagaggctctgctggtcaaatacttgactcccactcttgccactcctagctccagaagggctcagggccttccccacagatctaaggactgggctaccctgcctgtccactgaggtttctcctaaaacaagaggcttgactctggtctgggccctgtggccctctgggaagctttgtacctcttttgcaggatctgggggtggggagggacaagctagttccccaacctcctatgactgctttctatgctcacagccttttttccataagaaccttcttgaaacttctccccgcacatactcacggaaaggaaccaatggtgctatttcccctctctcctcctcaacctgggaatacttcagacatctccaaactcatccttgtgtatagtctcacacccttccccataagtataaatgggcccatatttaacacattttgtgattttgggttatttattttgtgcatctgtggcaataaatgagatctcagtggtggtatgga

SEQ ID NO: 247421 - DNA, 1970 bp, Artificial Sequence
  derived and/or modified sequence
cgttacgcaaggcctggtgtttacctcccgtgggagcctcctccctccctataaagcctgatgtggtggagagatttgacgagactgagactctggttgaagagagaggcaatcccaggagaggggcggaaagcggcaaaagttaatgcgggagtcggagagaagggcatctacacagcaagcagcaggggcggcccgccatctgcgcgctcgaaggcggtcacggtggtcgcggaaggggcggcgtccagatcctggctttccatggatgcgcccgagctgggcccggggctggtggagcgtctggagcagctggcgacgtgtcctctgtgcgggggctccttcgaggacccggtgcttctggcgtgcgagcacagcttctgccgcgcgtgtctggcccgccgctgggggactccgccggcgaccggcaccgaggcttcccccaccgcctgtccctgctgcggcctgccgtgtccccgccgcagcctgaggtctaatgtgcggctggcggtggaggtgcgaatcagccgcgagctgcgagagaagctggctgagcctggggcccgtgcggggagacgccgaggggggcgcatccccaccatgggctgcctggacctgcccggagaggatatgaggaagacatggagacgatttgaagtcccaacatccaagtcatctaattcagaggatgatctccctgaagattatccagtggtcaaaaaaatgcttcatagactgacagccgacctgaccctggaccctgggaccgcacaccgccgcctgctcatctccgccgaccgccgcagcgtacaactggccccaccagggacgcccgcgccccctgacggccccaagcgcttcgatcagctcccagctgtgctgggtgcgcagggcttcggggccggccgccactgctgggaggtggagactgcggacgccgcctcctgcagagactcttctggggaggatgcggacgacgaggagagccactatgcagtgggcgcggccggggaatcagtgcaacgcaagggctgcgcgcctggccccctgggggagcgcatcttcccgctgttctgcacctgcgaccctcgtgctccgctccgcattgtaccagcggaaagctgagtctcgtctccaactagaagtttggcccggccactggccctgcagctgctttttgggggtggaattccccactcatttctgggaacacattcacacgcccattgcaggagtattaatagcaacccacattttcgccccaaaataatgagacctcacctggtctccacgtttccacgtccctgctcaaaaccaaatccattcctgccttctggctctcagaatcttctctcccctacagctactacagtacttcctgacttctcccattcaaaccattctaggcctgcaatggggaacaggccctccccatcagtattggtaaagtgaccatgattcctacatagaggctctgctggtcaaatacttgactcccactcttgccactcctagctccagaagggctcagggccttccccacagatctaaggactgggctaccctgcctgtccactgaggtttctcctaaaacaagaggcttgactctggtctgggccctgtggccctctgggaagctttgtacctcttttgcaggatccgggggtggggagggacaagctagttccccaacctcctatgactgctttctatgctcacagccttttttccataagaaccttcttgaaacttctccccgcacatactcacggaaaggaaccaatggtgctatttcccctctctcctcctcaacctgggaatacttcagacatctccaaactcatccttgtgtatagtctcacacccttccccataagtataaatgggcccatatttaacacattttgtgattttgggttatttattttgtgcatctgtggcaataaatgagatctcagtggtggtatgga

SEQ ID NO: 247422 - DNA, 1970 bp, Artificial Sequence
  derived and/or modified sequence
cgttacgcaaggcctggtgtttacctcccgtgggagcctcctccctccctataaagcctgatgtggtggagagatttgacgagactgagactctggttgaagagagaggcaatcccaggagaggggcggaaagcggcaaaagttaatgcgggagtcggagagaagggcatctacacagcaagcagcaggggcggcccgccatctgcgcgctcgaaggcggtcacggtggtcgcggaaggggcggcgtccagatcctggctttccatggatgcgcccgagctgggcccggggctggtggagcgtctggagcagctggcgacgtgtcctctgtgcgggggctccttcgaggacccggtgcttctggcgtgcgagcacagcttctgccgcgcgtgtctggcccgccgctgggggactccgccggcgaccggcaccgaggcttcccccaccgcctgtccctgctgcggcctgccgtgtccccgccgcagcctgaggtctaatgtgcggctggcggtggaggtgcgaatcagccgcgagctgcgagagaagctggctgagcctggggcccgtgcggggagacgccgaggggggcgcatccccaccatgggctgcctggacctgcccggagaggatatgaggaagacatggagacgatttgaagtcccaacatccaagtcatctaattcagaggatgatctccctgaagattatccagtggtcaaaaaaatgcttcatagactgacagccgacctgaccctggaccctgggaccgcacaccgccgcctgctcatctccgccgaccgccgcagcgtacaactggccccaccagggacgcccgcgccccctgacggccccaagcgcttcgatcagctcccagctgtgctgggtgcgcagggcttcggggccggccgccactgctgggaggtggagactgcggacgccgcctcctgcagagactcttctggggaggatgcggacgacgaggagagccactatgcagtgggcgcggccggggaatcagtgcaacgcaagggctgcgcgcctggccccctgggggagcgcatcttcccgctgttctgcacctgcgaccctcgtgctccgctccgcattgtaccagcggaaagctgagtctcgtctccaactagaagtttggcccggccactggccctgcagctgctttttgggggtggaattccccactcatttctgggaacacattcacacgcccattgcaggagtattaatagcaacccacattttcgccccaaaataatgagacctcacctggtctccacgtttccacgtccctgctcaaaaccaaatccattcctgccttctggctctcagaatcttctctcccctacagctgctacagtacttcctgacttctcccattcaaaccattctaggcctgcaatggggaacaggccctccccatcagtattggtaaagtgaccatgattcctacatagaggctctgctggtcaaatacttgactcccactcttgccactcctagctccagaagggctcagggccttccccacagatctaaggactgggctaccctgcctgtccactgaggtttctcctaaaacaagaggcttgactctggtctgggccctgtggccctctgggaagctttgtacctcttttgcaggatccgggggtggggagggacaagctagttccccaacctcctatgactgctttctatgctcacagccttttttccataagaaccttcttgaaacttctccccgcacatactcacggaaaggaaccaatggtgctatttcccctctctcctcctcaacctgggaatacttcagacatctccaaactcatccttgtgtatagtctcacacccttccccataagtataaatgggcccatatttaacacattttgtgattttgggttatttattttgtgcatctgtggcaataaatgagatctcagtggtggtatgga

SEQ ID NO: 247423 - DNA, 756 bp, Artificial Sequence
  derived and/or modified sequence
atgtggtggagagatttgacgagactgagactctggttgaagagagaggcaatcccaggagaggggcggaaagcggcaaaagttaatgcgggagtcggagagaagggcatctacacagcaagcagcaggggcggcccgccatctgcgcgctcgaaggcggtcacggtggtcgcggaaggggcggcgtccagatcctggctttccatggatgcgcccgagctgggcccggggctggtggagcgtctggagcagctggcgacgtgtcctctgtgcgggggctccttcgaggacccggtgcttctggcgtgcgagcacagcttctgccgcgcgtgtctggcccgccgctgggggactccgccggcgaccggcaccgaggcttcccccaccgcctgtccctgctgcggcctgccgtgtccccgccgcagcctgaggtctaatgtgcggctggcggtggaggtgcgaatcagccgcgagctgctttttgggggtggaattccccactcatttctgggaacacattcacacgcccattgcaggagtattaatagcaacccacattttcgccccaaaataatgagacctcacctggtctccacgtttccacgtccctgctcaaaaccaaatccattcctgccttctggctctcagaatcttctctcccctacagctgctacagtacttcctgacttctcccattcaaaccattctaggcctgcaatggggaacaggccctccccatcagtattggtaaagtga

SEQ ID NO: 247424 - DNA, 756 bp, Artificial Sequence
  derived and/or modified sequence
atgtggtggagagatttgacgagactgagactctggttgaagagagaggcaatcccaggagaggggcggaaagcggcaaaagttaatgcgggagtcggagagaagggcatctacacagcaagcagcaggggcggcccgccatctgcgcgctcgaaggcggtcacggtggtcgcggaaggggcggcgtccagatcctggctttccatggatgcgcccgagctgggcccggggctggtggagcgtctggagcagctggcgacgtgtcctctgtgcgggggctccttcgaggacccggtgcttctggcgtgcgagcacagcttctgccgcgcgtgtctggcccgccgctgggggactccgccggcgaccggcaccgaggcttcccccaccgcctgtccgtgctgcggcctgccgtgtccccgccgcagcctgaggtctaatgtgcggctggcggtggaggtgcgaatcagccgcgagctgctttttgggcgtggaattccccactcatttctgggaacacattcacacgcccattgcaggagtattaatagcaacccacattttcgccccaaaataatgagacctcacctggtctccacgtttccacatccctgctcaaaaccaaatccattcctgccttctggctctcagaatcttctctcccctacagctactacagtacttcctgacttctcccattcaaaccattctaggcctgcaatggggaacaggccctccccatcagtattggtaaagtga

SEQ ID NO: 247425 - DNA, 756 bp, Artificial Sequence
  derived and/or modified sequence
atgtggtggagagacctgaccagactgagactgtggctgaagagagaggccatccccggcgagggcagaaaggccgccaaggtgaacgccggcgtgggcgagaagggcatctacaccgccagcagcagaggcggcccccccagcgccagaagcaaggccgtgaccgtggtggccgagggcgccgccagcagaagctggctgagcatggacgcccccgagctgggccccggcctggtggagagactggagcagctggccacctgccccctgtgcggcggcagcttcgaggaccccgtgctgctggcctgcgagcacagcttctgcagagcctgcctggccagaagatggggcaccccccccgccaccggcaccgaggccagccccaccgcctgcccctgctgcggcctgccctgccccagaagaagcctgagaagcaacgtgagactggccgtggaggtgagaatcagcagagagctgctgttcggcggcggcatcccccacagcttcctgggcacccacagccacgcccactgcagaagcatcaacagcaacccccacttcagacccaagatcatgagaccccacctggtgagcaccttccccagaccctgcagcaagcccaaccccttcctgcccagcggcagccagaacctgctgagccccaccgccaccaccgtgctgcccgacttcagccacagcaaccacagcagacccgccatgggcaacagacccagccccagcgtgctggtgaagtag

SEQ ID NO: 247426 - DNA, 1065 bp, Artificial Sequence
  derived and/or modified sequence
atgtggtggagagacctgaccagactgagactgtggctgaagagagaggccatccccggcgagggcagaaaggccgccaaggtgaacgccggcgtgggcgagaagggcatctacaccgccagcagcagaggcggcccccccagcgccagaagcaaggccgtgaccgtggtggccgagggcgccgccagcagaagctggctgagcatggacgcccccgagctgggccccggcctggtggagagactggagcagctggccacctgccccctgtgcggcggcagcttcgaggaccccgtgctgctggcctgcgagcacagcttctgcagagcctgcctggccagaagatggggcaccccccccgccaccggcaccgaggccagccccaccgcctgcccctgctgcggcctgccctgccccagaagaagcctgagaagcaacgtgagactggccgtggaggtgagaatcagcagagagctgagagagaagctggccgagcccggcgccagagccggcagaagaagaggcggcagaatccccaccatgggctgcctggacctgcccggcgaggacatgagaaagacctggagaagattcgaggtgcccacccccaagagcagcaacagcgaggacgacctgcccgaggactaccccgtggtgaagaagatgctgcacagactgaccgccgacctgaccctggaccccggcaccgcccacagaagactgctgatcagcaccgacagaagaagcgtgcagctggccccccccggcacccccgccccccccgacggccccaagagattcgaccagctgcccgccgtgctgggcgcccagggcttcggcgccggcagacactgctgggaggtggagaccgccgacgccgccagctgcagagacagcagcggcgaggacgaggacgacgaggagagccactacgccgtgggcgccgccggcgagagcgtgcagagaaagggctgcgcccccggccccctgggcgagagaatcttccccctgttctgcacctgcgaccccagagcccccctgagaatcgtgcccgccgagagctag

SEQ ID NO: 247427 - DNA, 1065 bp, Artificial Sequence
  derived and/or modified sequence
atgtggtggagagacctgaccagactgagactgtggctgaagagagaggccatccccggcgagggcagaaaggccgccaaggtgaacgccggcgtgggcgagaagggcatctacaccgccagcagcagaggcggcccccccagcgccagaagcaaggccgtgaccgtggtggccgagggcgccgccagcagaagctggctgagcatggacgcccccgagctgggccccggcctggtggagagactggagcagctggccacctgccccctgtgcggcggcagcttcgaggaccccgtgctgctggcctgcgagcacagcttctgcagagcctgcctggccagaagatggggcaccccccccgccaccggcaccgaggccagccccaccgcctgcccctgctgcggcctgccctgccccagaagaagcctgagaagcaacgtgagactggccgtggaggtgagaatcagcagagagctgagagagaagctggccgagcccggcgccagagccggcagaagaagaggcggcagaatccccaccatgggctgcctggacctgcccggcgaggacatgagaaagacctggagaagattcgaggtgcccaccagcaagagcagcaacagcgaggacgacctgcccgaggactaccccgtggtgaagaagatgctgcacagactgaccgccgacctgaccctggaccccggcaccgcccacagaagactgctgatcagcgccgacagaagaagcgtgcagctggccccccccggcacccccgccccccccgacggccccaagagattcgaccagctgcccgccgtgctgggcgcccagggcttcggcgccggcagacactgctgggaggtggagaccgccgacgccgccagctgcagagacagcagcggcgaggacgccgacgacgaggagagccactacgccgtgggcgccgccggcgagagcgtgcagagaaagggctgcgcccccggccccctgggcgagagaatcttccccctgttctgcacctgcgaccccagagcccccctgagaatcgtgcccgccgagagctag

SEQ ID NO: 247428 - DNA, 1065 bp, Artificial Sequence
  derived and/or modified sequence
atgtggtggagagacctgaccagactgagactgtggctgaagagagaggccatccccggcgagggcagaaaggccgccaaggtgaacgccggcgtgggcgagaagggcatctacaccgccagcagcagaggcggcccccccagcgccagaagcaaggccgtgaccgtggtggccgagggcgccgccagcagaagctggctgagcatggacgcccccgagctgggccccggcctggtggagagactggagcagctggccacctgccccctgtgcggcggcagcttcgaggaccccgtgctgctggcctgcgagcacagcttctgcagagcctgcctggccagaagatggggcaccccccccgccaccggcaccgaggccagccccaccgcctgcccctgctgcggcctgccctgccccagaagaagcctgagaagcaacgtgagactggccgtggaggtgagaatcagcagagagctgagagagaagctggccgagcccggcgccagagccggcagaagaagaggcggcagaatccccaccatgggctgcctggacctgcccggcgaggacatgagaaagacctggagaagattcgaggtgcccaccagcaagagcagcaacagcgaggacgacctgcccgaggactaccccgtggtgaagaagatgctgcacagactgaccgccgacctgaccctggaccccggcaccgcccacagaagactgctgatcagcgccgacagaagaagcgtgcagctggccccccccggcacccccgccccccccgacggccccaagagattcaaccagctgcccgccgtgctgggcgcccagggcttcggcgccggcagacactgctgggaggtggagaccgccgacgccgccagctgcagagacagcagcggcgaggacgccgacgacgaggagagccactacgccgtgggcgccgccggcgagagcgtgcagagaaagggctgcgcccccggccccctgggcgagagaatcttccccctgttctgcacctgcgaccccagagcccccctgagaatcgtgcccgccgagagctag

SEQ ID NO: 247429 - DNA, 756 bp, Artificial Sequence
  derived and/or modified sequence
atgtggtggagagacctgaccagactgagactgtggctgaagagagaggccatccccggcgagggcagaaaggccgccaaggtgaacgccggcgtgggcgagaagggcatctacaccgccagcagcagaggcggcccccccagcgccagaagcaaggccgtgaccgtggtggccgagggcgccgccagcagaagctggctgagcatggacgcccccgagctgggccccggcctggtggagagactggagcagctggccacctgccccctgtgcggcggcagcttcgaggaccccgtgctgctggcctgcgagcacagcttctgcagagcctgcctggccagaagatggggcaccccccccgccaccggcaccgaggccagccccaccgcctgcccctgctgcggcctgccctgccccagaagaagcctgagaagcaacgtgagactggccgtggaggtgagaatcagcagagagctgctgttcggcggcggcatcccccacagcttcctgggcacccacagccacgcccactgcagaagcatcaacagcaacccccacttcagacccaagatcatgagaccccacctggtgagcaccttccccagaccctgcagcaagcccaaccccttcctgcccagcggcagccagaacctgctgagccccaccgccgccaccgtgctgcccgacttcagccacagcaaccacagcagacccgccatgggcaacagacccagccccagcgtgctggtgaagtag

SEQ ID NO: 247430 - DNA, 756 bp, Artificial Sequence
  derived and/or modified sequence
atgtggtggagagacctgaccagactgagactgtggctgaagagagaggccatccccggcgagggcagaaaggccgccaaggtgaacgccggcgtgggcgagaagggcatctacaccgccagcagcagaggcggcccccccagcgccagaagcaaggccgtgaccgtggtggccgagggcgccgccagcagaagctggctgagcatggacgcccccgagctgggccccggcctggtggagagactggagcagctggccacctgccccctgtgcggcggcagcttcgaggaccccgtgctgctggcctgcgagcacagcttctgcagagcctgcctggccagaagatggggcaccccccccgccaccggcaccgaggccagccccaccgcctgcccctgctgcggcctgccctgccccagaagaagcctgagaagcaacgtgagactggccgtggaggtgagaatcagcagagagctgctgttcggcagaggcatcccccacagcttcctgggcacccacagccacgcccactgcagaagcatcaacagcaacccccacttcagacccaagatcatgagaccccacctggtgagcaccttcccccacccctgcagcaagcccaaccccttcctgcccagcggcagccagaacctgctgagccccaccgccaccaccgtgctgcccgacttcagccacagcaaccacagcagacccgccatgggcaacagacccagccccagcgtgctggtgaagtag

SEQ ID NO: 247431 - protein, 231 aa, Artificial Sequence
  derived and/or modified sequence
MWLISITFLSIGYGDMVPNTYCGKGVCLLTGIMGAGCTALVVAVVARKLELTKAEKHVHNFMMDTQLTKRVKNAAANVLRETWLIYKNTKLVKKIDHAKVRKHQRKFLQAIHQLRSVKMEQRKLNDQANTLVDLAKTQNIMYDMISDLNERSEDFEKRIVTLETKLETLIGSIHALPGLISQTIRQQQRDFIEAQMESYDKHVTYNAERSRSSSRRRRSSSTAPPTSSESS

SEQ ID NO: 247432 - DNA, 696 bp, Artificial Sequence
  derived and/or modified sequence
atgtggctaatctccattacctttctgtctatcgggtacggggacatggtgcctaatacttactgcgggaaaggggtctgtcttctgacaggcataatgggagcggggtgtaccgcgctggtcgtagccgtggttgcaaggaagctagagctgacaaaggccgagaagcatgtgcacaacttcatgatggacacgcagctgaccaagcgagtcaaaaatgctgccgctaatgtgttgcgggagacatggctgatctacaaaaacactaagctagttaaaaaaatcgatcatgccaaggtccgcaaacatcaacggaagtttctccaggctattcatcagctgcggtccgtaaaaatggaacagcgcaagctgaatgatcaggctaacaccctggtggacctggccaagacccagaacattatgtatgacatgatctcagacttaaatgagaggagtgaagacttcgagaaacgcattgtgaccctggagactaagctcgagacgctgatcgggagtattcacgcgcttcctggccttatcagccagaccataaggcaacagcagcgcgacttcatcgaggctcagatggagtcctacgataaacacgtcacttacaacgctgagcggtcacgtagttcctctcgccgacggaggtcgagctccacagcacccccaacttcctcagagagttcttag

SEQ ID NO: 247433 - DNA, 696 bp, Artificial Sequence
  derived and/or modified sequence
atgtggctgatcagcatcaccttcctgagcatcggctatggagacatggtgcccaacacctactgtgggaagggcgtgtgcctgctgaccggcatcatgggcgccggctgcacagccctggtggtggccgtggtggccaggaagctggagctgaccaaggccgagaagcacgtgcacaacttcatgatggacacccagctgaccaagagggtgaagaatgctgctgccaacgtgctgcgggagacctggctgatctacaagaacaccaagctggtgaagaagattgaccacgccaaggtgaggaagcaccagaggaagttcctgcaggccatccaccagctgcggtctgtgaagatggagcagaggaagctgaatgaccaggccaacaccctggtggacctggccaagacccagaacatcatgtatgacatgatcagtgacctgaatgaaagaagtgaagattttgagaagagaattgtgaccctggagaccaagctggagaccctcatcggcagcatccacgccctgcccggcctcatcagccagaccatccggcagcagcagagggacttcatcgaggcccagatggagagctatgacaagcacgtgacctacaatgctgagaggagccgcagcagcagcagaagaagaagaagcagcagcacagccccacccaccagcagcgagagcagctag

SEQ ID NO: 247434 - DNA, 696 bp, Artificial Sequence
  derived and/or modified sequence
atgtggctgatcagcatcaccttcctgagcatcggctacggcgacatggtccctaacacctactgcggaaagggagtttgtctcttaacagggattatgggagcgggctgtaccgcactggtggtggctgtcgtagcaaggaagctggagttgacaaaagccgaaaagcatgttcacaatttcatgatggatacccaactgaccaaaagagtgaagaacgctgcagccaatgtgcttcgggagacctggctaatttacaaaaatacaaaactggtgaaaaagatcgaccacgccaaagtgcggaaacaccagagaaaattcctgcaggcgattcatcaactgcgcagcgtgaagatggaacaacgcaaactcaatgatcaggccaatacattggtcgatctggccaagacacagaacatcatgtacgacatgatttctgatctgaatgagaggtccgaggatttcgaaaagcgaatcgtgactctggagacaaaactggaaacgctcattggatcaattcatgccctacccggccttatcagtcaaactattagacagcagcagagggactttatcgaggcccagatggagagctacgacaagcatgtcacctacaatgctgagagaagcagatcctccagcagaagaagacgttccagctctacggccccccctactagtagcgaaagctcatag

SEQ ID NO: 247435 - DNA, 696 bp, Artificial Sequence
  derived and/or modified sequence
atgtggctcatatctatcacttttctatcaattggctacggtgatatggttcctaatacttattgcggcaagggagtgtgcctactaactggtataatgggggcaggctgtaccgcactggttgtcgcggtcgttgcgagaaagttggagcttaccaaagcagaaaaacatgtccacaatttcatgatggatacacagctgacaaaaagagtcaagaatgccgctgccaatgtgctgagagagacttggcttatctataaaaacactaaattggttaagaagattgaccacgcaaaggtccggaaacaccagcggaagttcctccaggccattcaccagctgaggagcgtgaagatggagcagcggaaactcaatgatcaagctaacacgctggtggatctggccaaaactcagaacatcatgtacgatatgatctccgacctcaatgagcgctcagaggactttgagaagagaatagtaaccctggagaccaagcttgagactttgataggatcaattcatgcacttcctggccttatatcccaaaccattaggcagcagcagcgggatttcatagaggctcaaatggaaagttatgacaaacatgtgacatacaacgccgaacgctcgcggagtagtagtcgaaggcgccgttcaagcagcaccgcccctcccacctccagcgagagcagctag

SEQ ID NO: 247436 - DNA, 696 bp, Artificial Sequence
  derived and/or modified sequence
atgtggctgatcagcatcaccttcctgagcatcggctacggcgacatggtgcccaacacctactgcggcaagggcgtgtgcctgctgaccggcatcatgggcgccggctgcaccgccctggtggtggccgtggtggccagaaagctggagctgaccaaggccgagaagcacgtgcacaacttcatgatggacacccagctgaccaagagagtgaagaacgccgccgccaacgtgctgagagagacctggctgatctacaagaacaccaagctggtgaagaagatcgaccacgccaaggtgagaaagcaccagagaaagttcctgcaggccatccaccagctgagaagcgtgaagatggagcagagaaagctgaacgaccaggccaacaccctggtggacctggccaagacccagaacatcatgtacgacatgatcagcgacctgaacgagagaagcgaggacttcgagaagagaatcgtgaccctggagaccaagctggagaccctgatcggcagcatccacgccctgcccggcctgatcagccagaccatcagacagcagcagagagacttcatcgaggcccagatggagagctacgacaagcacgtgacctacaacgccgagagaagcagaagcagcagcagaagaagaagaagcagcagcaccgccccccccaccagcagcgagagcagctag

SEQ ID NO: 247437 - protein, 390 aa, Artificial Sequence
  derived and/or modified sequence
MTLTCVFWDVTKGTTGDWSSEGCSTEVRPEGTVCCCDHLTFFALLLRPTLDQSTVHILTRISQAGCGVSMIFLAFTIILYAFLRLSRERFKSEDAPKIHVALGGSLFLLNLAFLVNVGSGSKGSDAACWARGAVFHYFLLCAFTWMGLEAFHLYLLAVRVFNTYFGHYFLKLSLVGWGLPALMVIGTGSANSYGLYTIRDRENRTSLELCWFREGTTMYALYITVHGYFLITFLFGMVVLALVVWKIFTLSRATAVKERGKNRKKVLTLLGLSSLVGVTWGLAIFTPLGLSTVYIFALFNSLQGSSVDCQALSAGEKLLSLLGLPQQPWKLRAAAHLPVRMLGADVDCKWMRFASPPSPQAVERQEGGPSLYARRCVPGREILGRGHCII

SEQ ID NO: 247438 - protein, 549 aa, Artificial Sequence
  derived and/or modified sequence
MATPRGLGALLLLLLLPTSGQEKPTEGPRNTCLGSNNMYDIFNLNDKALCFTKCRQSGSDSCNVENLQRYWLNYEAHLMKEGLTQKVNTPFLKALVQNLSTNTAEDFYFSLEPSQVPRQVMKDEDKPPDRVRLPKSLFRSLPGNRSVVRLAVTILDIGPGTLFKGPRLGLGDGSGVLNNRLVGLSVGQMHVTKLAEPLEIVFSHQRPPPNMTLTCVFWDVTKGTTGDWSSEGCSTEVRPEGTVCCCDHLTFFALLLRPTLDQSTVHILTRISQAGCGVSMIFLAFTIILYAFLRLSRERFKSEDAPKIHVALGGSLFLLNLAFLVNVGSGSKGSDAACWARGAVFHYFLLCAFTWMGLEAFHLYLLAVRVFNTYFGHYFLKLSLVGWGLPALMVIGTGSANSYGLYTIRDRENRTSLELCWFREGTTMYALYITVHGYFLITFLFGMVVLALVVWKIFTLSRATAVKERGKNRKKVLTLLGLSSLVGVTWGLAIFTPLGLSTVYIFALFNSLQGVFICCWFTILYLPSQSTTVSSSTARLDQAHSASQE

SEQ ID NO: 247439 - protein, 429 aa, Artificial Sequence
  derived and/or modified sequence
MKDEDKPPDRVRLPKSLFRSLPGNRSVVRLAVTILDIGPGTLFKGPRLGLGDGSGVLNNRLVGLSVGQMHVTKLAEPLEIVFSHQRPPPNMTLTCVFWDVTKGTTGDWSSEGCSTEVRPEGTVCCCDHLTFFALLLRPTLDQSTVHILTRISQAGCGVSMIFLAFTIILYAFLRLSRERFKSEDAPKIHVALGGSLFLLNLAFLVNVGSGSKGSDAACWARGAVFHYFLLCAFTWMGLEAFHLYLLAVRVFNTYFGHYFLKLSLVGWGLPALMVIGTGSANSYGLYTIRDRENRTSLELCWFREGTTMYALYITVHGYFLITFLFGMVVLALVVWKIFTLSRATAVKERGKNRKKVLTLLGLSSLVGVTWGLAIFTPLGLSTVYIFALFNSLQGVFICCWFTILYLPSQSTTVSSSTARLDQAHSASQE

SEQ ID NO: 247440 - DNA, 1650 bp, Artificial Sequence
  derived and/or modified sequence
atggccacccccagaggcctgggcgccctgctgctgctgctgctgctgcccaccagcggccaggagaagcccaccgagggccccagaaacacctgcctgggcagcaacaacatgtacgacatcttcaacctgaacgacaaggccctgtgcttcaccaagtgcagacagagcggcagcgacagctgcaacgtggagaacctgcagagatactggctgaactacgaggcccacctgatgaaggagggcctgacccagaaggtgaacacccccttcctgaaggccctggtgcagaacctgagcaccaacaccgccgaggacttctacttcagcctggagcccagccaggtgcccagacaggtgatgaaggacgaggacaagccccccgacagagtgagactgcccaagagcctgttcagaagcctgcccggcaacagaagcgtggtgagactggccgtgaccatcctggacatcggccccggcaccctgttcaagggccccagactgggcctgggcgacggcagcggcgtgctgaacaacagactggtgggcctgagcgtgggccagatgcacgtgaccaagctggccgagcccctggagatcgtgttcagccaccagagacccccccccaacatgaccctgacctgcgtgttctgggacgtgaccaagggcaccaccggcgactggagcagcgagggctgcagcaccgaggtgagacccgagggcaccgtgtgctgctgcgaccacctgaccttcttcgccctgctgctgagacccaccctggaccagagcaccgtgcacatcctgaccagaatcagccaggccggctgcggcgtgagcatgatcttcctggccttcaccatcatcctgtacgccttcctgagactgagcagagagagattcaagagcgaggacgcccccaagatccacgtggccctgggcggcagcctgttcctgctgaacctggccttcctggtgaacgtgggcagcggcagcaagggcagcgacgccgcctgctgggccagaggcgccgtgttccactacttcctgctgtgcgccttcacctggatgggcctggaggccttccacctgtacctgctggccgtgagagtgttcaacacctacttcggccactacttcctgaagctgagcctggtgggctggggcctgcccgccctgatggtgatcggcaccggcagcgccaacagctacggcctgtacaccatcagagacagagagaacagaaccagcctggagctgtgctggttcagagagggcaccaccatgtacgccctgtacatcaccgtgcacggctacttcctgatcaccttcctgttcggcatggtggtgctggccctggtggtgtggaagatcttcaccctgagcagagccaccgccgtgaaggagagaggcaagaacagaaagaaggtgctgaccctgctgggcctgagcagcctggtgggcgtgacctggggcctggccatcttcacccccctgggcctgagcaccgtgtacatcttcgccctgttcaacagcctgcagggcgtgttcatctgctgctggttcaccatcctgtacctgcccagccagagcaccaccgtgagcagcagcaccgccagactggaccaggcccacagcgccagccaggagtag

SEQ ID NO: 247441 - DNA, 1906 bp, Artificial Sequence
  derived and/or modified sequence
agagtggtggggctgcagggtgggggcaggccagctcagcagagcctggggccagagggccagacagccacagagctcctggcgtgggcaaggctggccaaggatggcgacgcccaggggcctgggggccctgctcctgctcctcctgctcccgacctcaggtcaggaaaagcccaccgaagggccaagaaacacctgcctggggagcaacaacatgtacgacatcttcaacttgaatgacaaggctttgtgcttcaccaagtgcaggcagtcgggcagcgactcctgcaatgtggaaaacttgcagagatactggctaaactacgaggcccatctgatgaaggaaggtttgacgcagaaggtgaacacgcctttcctgaaggctttggtccagaacctcagcaccaacactgcagaagacttctatttctctctggagccctctcaggttccgaggcaggtgatgaaggacgaggacaagccccctgacagagtgcgacttcccaagagcctttttcgatccctgccaggcaacaggtctgtggtccgcttggccgtcaccattctggacattggtccagggactctcttcaagggcccccggctcggcctgggagatggcagcggcgtgttgaacaatcgcctggtgggtttgagtgtgggacaaatgcatgtcaccaagctggctgagcctctggagatcgtcttctctcaccagcgaccgccccctaacatgaccctcacctgtgtattctgggatgtgactaaagggaccactggagactggtcttctgagggctgctccacggaggtcagacctgaggggaccgtgtgctgctgtgaccacctgacctttttcgccctgctcctgagacccaccttggaccagtccacggtgcatatcctcacacgcatctcccaggcgggctgtggggtctccatgatcttcctggccttcaccattattctttatgcctttctgaggctttcccgggagaggttcaagtcagaagatgccccaaagatccacgtggccctgggtggcagcctgttcctcctgaatctggccttcttggtcaatgtggggagtggctcaaaggggtctgatgctgcctgctgggcccggggggctgtcttccactacttcctgctctgtgccttcacctggatgggccttgaagccttccacctctacctgctcgctgtcagggtcttcaacacctacttcgggcactacttcctgaagctgagcctggtgggctggggcctgcccgccctgatggtcatcggcactgggagtgccaacagctacggcctctacaccatccgtgatagggagaaccgcacctctctggagctatgctggttccgtgaagggacaaccatgtacgccctctatatcaccgtccacggctacttcctcatcaccttcctctttggcatggtggtcctggccctggtggtctggaagatcttcaccctgtcccgtgctacagcggtcaaggagcgggggaagaaccggaagaaggtgctcaccctgctgggcctctcgagcctggtgggtgtgacatgggggttggccatcttcaccccgttgggcctctccaccgtctacatctttgcacttttcaactccttgcaagggagctctgtggactgtcaagccctgtctgcaggtgagaagttactgtcactgttaggcctcccccaacagccctggaagctgcgggctgcagcccacctccccgtccggatgctgggtgctgacgttgactgcaaatggatgcgcttcgcttcccctcccagcccacaagcagttgaaagacaggaaggtgggccctcactttatgcaaggcgctgtgttcctggaagggaaattctggggcgtggacattgcatcatttga

SEQ ID NO: 247442 - DNA, 2670 bp, Artificial Sequence
  derived and/or modified sequence
agagtggtggggctgcagggtgggggcaggccagctcagcagagcctggggccagagggccagacagccacagagctcctggcgtgggcaaggctggccaaggatggcgacgcccaggggcctgggggccctgctcctgctcctcctgctcccgacctcaggtcaggaaaagcccaccgaagggccaagaaacacctgcctggggagcaacaacatgtacgacatcttcaacttgaatgacaaggctttgtgcttcaccaagtgcaggcagtcgggcagcgactcctgcaatgtggaaaacttgcagagatactggctaaactacgaggcccatctgatgaaggaaggtttgacgcagaaggtgaacacgcctttcctgaaggctttggtccagaacctcagcaccaacactgcagaagacttctatttctctctggagccctctcaggttccgaggcaggtgatgaaggacgaggacaagccccctgacagagtgcgacttcccaagagcctttttcgatccctgccaggcaacaggtctgtggtccgcttggccgtcaccattctggacattggtccagggactctcttcaagggcccccggctcggcctgggagatggcagcggcgtgttgaacaatcgcctggtgggtttgagtgtgggacaaatgcatgtcaccaagctggctgagcctctggagatcgtcttctctcaccagcgaccgccccctaacatgaccctcacctgtgtattctgggatgtgactaaagggaccactggagactggtcttctgagggctgctccacggaggtcagacctgaggggaccgtgtgctgctgtgaccacctgacctttttcgccctgctcctgagacccaccttggaccagtccacggtgcatatcctcacacgcatctcccaggcgggctgtggggtctccatgatcttcctggccttcaccattattctttatgcctttctgaggctttcccgggagaggttcaagtcagaagatgccccaaagatccacgtggccctgggtggcagcctgttcctcctgaatctggccttcttggtcaatgtggggagtggctcaaaggggtctgatgctgcctgctgggcccggggggctgtcttccactacttcctgctctgtgccttcacctggatgggccttgaagccttccacctctacctgctcgctgtcagggtcttcaacacctacttcgggcactacttcctgaagctgagcctggtgggctggggcctgcccgccctgatggtcatcggcactgggagtgccaacagctacggcctctacaccatccgtgatagggagaaccgcacctctctggagctatgctggttccgtgaagggacaaccatgtacgccctctatatcaccgtccacggctacttcctcatcaccttcctctttggcatggtggtcctggccctggtggtctggaagatcttcaccctgtcccgtgctacagcggtcaaggagcgggggaagaaccggaagaaggtgctcaccctgctgggcctctcgagcctggtgggtgtgacatgggggttggccatcttcaccccgttgggcctctccaccgtctacatctttgcacttttcaactccttgcaaggtgtcttcatctgctgctggttcaccatcctttacctcccaagtcagagcaccacagtctcctcctctactgcaagattggaccaggcccactccgcatctcaagaataggaaggcacggccctgcaatatggactcagctctggctctctgtgtgaccttgggcagctccgtgcctctctctgtactccctcagtttccttctctgtacaatgtggctggggagggagaggatgggaccaggttggaccacgtggcatcagaggtcccatccagatccaactataggtccaagagtccacgtaagcaggtttgcaaggctctaaagttcctatagtcctgagaccccctgccagcaaagagtgacagtcacctccatgccctgccctcattgcaaagccctcactcaccttctggtctcagcaagggaggagagtctgttgctggcatagccctggaaggagcccccagcctctcccctcctcctccttgtcactggcctcccacaactccccttctggctgcctgtaaccttgaggggcattcaggaggccagcgttccctcaggcactgggggtttgttttggggggtgggagttgatcctcccacccagtctgcccctggtctctgcccatccaatcagagcccaccctcctggaagagacccccgtgttcagagtgctggcagccctgcacgtgtccagggacactgcatttcaaagaaccactgagtgggtgagctaccttgggcaaaccccccactcctgactctgactgccacgtgggtggcccgacctctgacctgctgtcatcgtagaggtagaaagcaaacaatctggggctcagcacacctgggggtgctcccactcattcagtgtgtggggcccctgagcagaggctgggcattgccactaggacctgagctcctagagaacaaggacctgggtggcctcgcttactgttccagcccaggccaagcacagggtctggctcgtggcaaaccttgaataaatatttgttggctgaa

SEQ ID NO: 247443 - DNA, 1785 bp, Artificial Sequence
  derived and/or modified sequence
acagccacagagctcctggcgtgggcaaggctggccaaggatggcgacgcccaggggcctgggggccctgctcctgctcctcctgctcccgacctcaggtcaggaaaagcccaccgaagggccaagaaacacctgcctggggagcaacaacatgtacgacatcttcaacttgaatgacaaggctttgtgcttcaccaagtgcaggcagtcgggcagcgactcctgcaatgtggaaaacttgcagaggttccgaggcaggtgatgaaggacgaggacaagccccctgacagagtgcgacttcccaagagcctttttcgatccctgccaggcaacaggtctgtggtccgcttggccgtcaccattctggacattggtccagggactctcttcaagggcccccggctcggcctgggagatggcagcggcgtgttgaacaatcgcctggtgggtttgagtgtgggacaaatgcatgtcaccaagctggctgagcctctggagatcgtcttctctcaccagcgaccgccccctaacatgaccctcacctgtgtattctgggatgtgactaaagggaccactggagactggtcttctgagggctgctccacggaggtcagacctgaggggaccgtgtgctgctgtgaccacctgacctttttcgccctgctcctgagacccaccttggaccagtccacggtgcatatcctcacacgcatctcccaggcgggctgtggggtctccatgatcttcctggccttcaccattattctttatgcctttctgaggctttcccgggagaggttcaagtcagaagatgccccaaagatccacgtggccctgggtggcagcctgttcctcctgaatctggccttcttggtcaatgtggggagtggctcaaaggggtctgatgctgcctgctgggcccggggggctgtcttccactacttcctgctctgtgccttcacctggatgggccttgaagccttccacctctacctgctcgctgtcagggtcttcaacacctacttcgggcactacttcctgaagctgagcctggtgggctggggcctgcccgccctgatggtcatcggcactgggagtgccaacagctacggcctctacaccatccgtgatagggagaaccgcacctctctggagctatgctggttccgtgaagggacaaccatgtacgccctctatatcaccgtccacggctacttcctcatcaccttcctctttggcatggtggtcctggccctggtggtctggaagatcttcaccctgtcccgtgctacagcggtcaaggagcgggggaagaaccggaagaaggtgctcaccctgctgggcctctcgagcctggtgggtgtgacatgggggttggccatcttcaccccgttgggcctctccaccgtctacatctttgcacttttcaactccttgcaaggtgtcttcatctgctgctggttcaccatcctttacctcccaagtcagagcaccacagtctcctcctctactgcaagattggaccaggcccactccgcatctcaagaataggaaggcacggccctgcaatatggactcagctctggctctctgtgtgaccttgggcagctccgtgcctctctctgtactccctcagtttccttctctgtacaatgtggctggggagggagaggatgggaccaggttggaccacgtggcatcagaggtcccatccagatccaactataggtccaagagtccacgtaagcaggtttgcaaggctctaaagttcctatagtcctgaga

SEQ ID NO: 247444 - DNA, 1650 bp, Artificial Sequence
  derived and/or modified sequence
atggctaccccccggggactgggtgctcttcttctactcctgctactgccaacatccggacaagagaagcctaccgaaggtcctcgaaacacttgtcttggttccaacaatatgtacgacatcttcaacttgaacgataaggccctctgtttcaccaaatgccgacaaagcgggtccgacagctgtaacgttgagaacctgcagcgatactggctgaactacgaggcccacctcatgaaggagggcctgacccagaaggtcaacacacctttcctaaaggctctcgtccaaaacttaagcactaacacggctgaggacttttacttcagcctggaacctagccaagtccccagacaagtgatgaaagacgaggataagccccctgaccgagtcagactgcccaagtccctgttcagatcccttcccggaaataggagtgtggtgaggctggccgtcaccattcttgatataggacccggcaccctcttcaagggaccacgcctgggcctcggcgatggctctggcgttttaaacaaccgccttgttggcttgtctgttgggcagatgcacgtgactaagctggccgagcctcttgaaatcgtgtttagccatcagcggccaccacccaacatgacccttacttgtgtattttgggatgtgacgaaagggaccaccggagactggagctccgaggggtgttccaccgaagtaagacccgagggaactgtgtgttgctgtgatcacctgacttttttcgctctcctcctgcggcccaccctggaccagagtactgtccatattctgactagaattagccaagccggttgtggcgtatctatgatcttcctggccttcacaataatcctgtatgccttcctgcggcttagtagagagaggtttaaatcagaggacgcgcctaaaatccacgtcgcgctcggaggcagcttgttcctgctgaatttagcgtttttggtgaatgtgggatctggcagtaagggttcggacgcagcgtgttgggcacgcggggcagtattccactattttctgctgtgtgccttcacttggatgggtctggaggctttccatctgtacttgttagctgtgagagtgtttaacacatactttggccactatttcctcaagttgtccctggtcggatggggcctacctgcgctcatggtgattggaacgggatcagccaatagctacgggttatacacgatcagggacagggaaaatcgcactagcttggaactctgctggtttagagagggaacaaccatgtacgcactctatattacagtgcatggttacttcttaatcacatttttgttcggcatggtggttctggccttggtggtgtggaaaatctttaccctttcaagagccacggccgtgaaggaaaggggaaagaaccggaaaaaagtgctaaccctgcttggcctgtctagtttggtgggtgttacctgggggctagccatcttcacgcctttgggactttctacggtttacatcttcgcgctgttcaatagcctacagggtgttttcatctgttgttggttcacaatcctgtacctgccttcccaatccacaacagttagtagcagtactgcccggctggaccaggcccacagcgcttcgcaggagtag

SEQ ID NO: 247445 - DNA, 1650 bp, Artificial Sequence
  derived and/or modified sequence
atggccaccccccggggcctgggcgccctgctgctgctgctgctgctgcccaccagcggccaggagaagcccacagagggccccaggaacacctgcctgggcagcaacaacatgtatgacatcttcaacctgaatgacaaggccctgtgcttcaccaagtgccggcagagcggcagtgacagctgcaatgtggagaacctgcagcgctactggctgaactatgaggcccacctgatgaaggagggcctgacccagaaggtgaacacccccttcctgaaggccctggtgcagaacctgagcaccaacacagctgaggacttctacttcagcctggagcccagccaggtgccccggcaggtgatgaaggatgaggacaagcccccagacagagtgcggctgcccaagagcctcttccgcagcctgcccggcaacagatctgtggtgcggctggccgtgaccatcctggacatcggccctggcaccctcttcaagggcccccggctgggcctgggagatggcagcggcgtgctgaacaaccggctggtgggcctgtctgtgggccagatgcacgtgaccaagctggccgagcccctggagatcgtgttcagccaccagaggcccccacccaacatgaccctgacctgtgtgttctgggatgtgaccaagggcaccactggagactggagcagcgagggctgcagcacagaggtgcggcctgagggcaccgtgtgctgctgtgaccacctgaccttctttgccctgctgctgcggcccaccctggaccagagcacagtgcacatcctgacccgcatcagccaggccggctgcggcgtgtccatgatcttcctggccttcaccatcatcctgtatgccttcctgcggctgagccgggagcgcttcaagtcagaagatgcccccaagatccacgtggccctgggcggcagcctcttcctgctgaacctggccttcctggtgaatgtgggcagcggcagcaagggcagtgatgctgcctgctgggcccggggagctgtgttccactacttcctgctgtgtgccttcacctggatgggcctggaggccttccacctgtacctgctggccgtgcgggtcttcaacacctacttcggccactacttcctgaagctgagcctggtgggctggggcctgcctgccctgatggtgattggaactggaagtgccaacagctatggcctgtacaccatccgggaccgggagaacagaaccagcctggagctgtgctggttccgggagggcaccaccatgtatgccctgtacatcaccgtgcacggctacttcctgatcaccttcctgtttggcatggtggtgctggccctggtggtgtggaagatcttcaccctgagccgggccacagctgtgaaggagcggggcaagaacaggaagaaggtgctgaccctgctgggcctgagcagcctggtgggcgtgacctggggcctggccatcttcacccccctgggcctgagcacagtgtacatctttgccctcttcaacagcctgcagggcgtcttcatctgctgctggttcaccatcctgtacctgcccagccagagcaccaccgtgagcagcagcacagcccggctggaccaggcccacagcgccagccaggagtag

SEQ ID NO: 247446 - DNA, 1650 bp, Artificial Sequence
  derived and/or modified sequence
atggccaccccccggggcctgggcgccctgctgctgctgctgctgctcccaacctctggccaggagaagcctactgaagggcccagaaatacctgcctgggaagcaataatatgtacgacatttttaatctgaacgacaaggccctgtgctttaccaagtgtaggcagtctggaagcgattcctgcaacgtagagaacctccagcgttattggttaaactacgaggcacatttgatgaaagaaggtctgactcagaaggtcaacacaccctttttgaaggctttggtacaaaacctgtctaccaacaccgcagaggatttctatttcagtctggagccgtcacaggtcccgcgccaggttatgaaggacgaggacaaacccccagacagagttcgcctgccaaagtcattgttccggtctctgccgggcaataggagcgtcgttcgactggcagtgacaattttggatattgggcctgggacgttgttcaaagggccacgactgggcctcggcgacggctccggggtcctgaacaataggctcgtaggtctgtctgttggtcaaatgcacgtgaccaaactcgctgaacccctggaaatcgtttttagtcaccaacggcctcctccaaacatgactctgacctgcgtgttctgggacgtgacgaagggcacgactggggattggagtagtgagggctgtagtactgaagtgagaccagaagggacggtttgctgttgcgatcatctgacattcttcgccctgctgctcagaccaacactcgatcagagtaccgtgcacatcctgactcgaatctcccaagcaggctgtggggtatccatgatcttccttgcatttacaatcatcctctatgcatttttgcgattgtctcgggagaggtttaaatccgaggatgcccccaaaattcacgttgcactcggtggttcgttatttctgttaaacttagcattcttggtcaacgtcgggtctggctccaaaggctcagatgctgcctgctgggctagaggagctgtcttccattattttctgctttgtgcctttacatggatgggactggaggcctttcacctgtatctacttgcagtcagggtgttcaacacctattttggtcattatttcctgaagctgtcgcttgtcggatggggattacctgccctcatggtcattgggaccggttcggcaaacagctatggtctctacacgatcagggatcgcgaaaatcgcacttccctggagttgtgctggtttagagaaggcaccaccatgtatgccctatacatcacagtccatggttatttccttatcactttcctattcggaatggtggttctcgcgctggttgtatggaaaattttcactttgagccgggctaccgctgtgaaggaaagaggcaaaaatcgaaagaaggtgttaacgttactaggtctcagcagcctggtgggtgtcacgtggggacttgcaatctttacgccccttggattatcaactgtctacattttcgcattgttcaatagcctacagggcgtgttcatttgctgctggtttaccatactgtacctcccaagccagagtactaccgtgtcgtcatccaccgcccgtctggatcaggcccactcagcctcacaggagtag

SEQ ID NO: 247447 - DNA, 1650 bp, Artificial Sequence
  derived and/or modified sequence
atggccacacccaggggattaggggctctgcttttgctactgctgctaccgaccagcggccaggaaaaaccaacagagggtccacgcaacacttgcctgggatcaaacaatatgtacgacatattcaaccttaacgacaaagcactgtgctttaccaagtgtcgtcagtcgggctctgacagttgtaacgtggagaatttgcaacggtactggttgaactatgaggcacacctaatgaaggagggtttaacccagaaagttaataccccctttctcaaggccttggtgcaaaacctcagtacaaacacagcagaggacttctatttctccctcgaacctagccaagtgcccaggcaggttatgaaagacgaggacaaacctcccgacagagtacgcctgcctaaatccctcttccgcagcctgccagggaaccggagcgtggtgaggctggctgtgactatccttgacattggacccggaacactctttaaaggcccacggttggggctgggggacggctcgggcgtgctcaacaacaggctggtgggcctgagtgtgggccagatgcatgtgactaagctggcagaaccgctggagatcgtgttctcacatcagcgccctcccccaaatatgaccttaacctgcgtattctgggatgttaccaaagggaccacaggcgactggtcatcagaaggatgtagcacagaggtaaggcctgagggcaccgtgtgctgttgtgaccacttaacattctttgccttattgttgcgtcctacactggatcagagcacggtgcacatactgacccggattagtcaagcagggtgtggagtctctatgatatttctggcattcaccataatcctgtacgctttccttcgcctgtcccgtgagagatttaagagcgaggacgccccaaagattcacgtcgccttgggtggatcactgtttctgctgaatttggcctttttagtaaatgttggctccggcagtaagggcagcgacgcggcatgctgggctaggggcgctgttttccactattttctactctgtgcgtttacatggatgggcctcgaagcattccacttatacctgctcgccgtaagggtgtttaacacttactttgggcattacttcctcaaactgagtttggtggggtgggggctacccgctctcatggtcattggcactggcagtgcgaattcatacggcttatacaccatcagagacagggagaatcgcaccagtctggaactttgctggttcagggaaggcaccacaatgtacgccctgtacatcacggttcacgggtacttcctgatcactttcctatttggcatggtggtgctagcgttggtggtgtggaaaatttttacactcagccgcgcaactgctgtaaaggaaagaggtaagaatcgtaagaaagtattgactttgctcggcctgtctagtctggtcggcgtaacatggggcctggcaatctttacaccactgggcctttctaccgtgtatatatttgcactgttcaatagcctccagggtgtattcatctgctgttggttcaccattctctatctgccatctcaaagcactaccgtctcttcatccactgccagactcgaccaggcccactctgccagtcaggaatag

SEQ ID NO: 247448 - protein, 325 aa, Artificial Sequence
  derived and/or modified sequence
MLCPWRTANLGLLLILTIFLVAASSSLCMDEKQITQNYSKVLAEVNTSWPVKMATNAVLCCPPIALRNLIIITWEIILRGQPSCTKAYKKETNETKETNCTDERITWVSRPDQNSDLQIRTVAITHDGYYRCIMVTPDGNFHRGYHLQVLVTPEVTLFQNRNRTAVCKAVAGKPAAHISWIPEGDCATKQEYWSNGTVTVKSTCHWEVHNVSTVTCHVSHLTGNKSLYIELLPVPGAKKSAKLYIPYIILTIIILTIVGFIWLLKVNGCRKYKLNKTESTPVVEEDEMQPYASYTEKNNPLYDTTNKVKASEALQSEVDTDLHTL

SEQ ID NO: 247449 - DNA, 978 bp, Artificial Sequence
  derived and/or modified sequence
atgctgtgtccctggcgcactgctaacttaggtctgcttctcattctgactatcttcctggttgcagcgagctctagtctctgcatggacgagaagcagatcactcagaattacagcaaggtattggctgaggtaaatacatcctggccagtgaagatggccactaacgcagtactgtgctgcccaccaattgctctgaggaatctgatcattataacgtgggaaatcatattgagaggtcagccatcatgtactaaagcctataagaaggaaactaacgagacgaaggaaaccaactgtacagatgagcgtatcacttgggtgtcacggcctgaccagaactctgatcttcagattagaaccgtggctatcacacacgacggatattatagatgcataatggttacccccgatgggaactttcataggggctaccatcttcaggtcttggtgacacccgaagtgacgctctttcagaaccgtaatagaactgccgtatgcaaggctgtggcaggcaagcctgctgcccacattagctggatacctgaaggcgattgtgcaacaaaacaggagtactggtccaacggtactgttacagtaaagagcacctgtcactgggaggtgcacaatgtctctacagttacatgtcacgtatcccatctgacgggaaacaaatcactgtacattgaacttctgccagtgcctggtgccaagaagtcagccaaactatatattccctatatcattctcaccattattatccttaccatcgtagggttcatctggttgttaaaggtgaatggatgccgtaagtataaactaaataaaaccgagtctacccccgttgtggaagaggacgagatgcaaccctacgcatcatacactgagaaaaacaatcccctgtatgacactaccaataaagtaaaggcgtccgaggctctgcaatccgaagttgacaccgatctccacactctgtag

SEQ ID NO: 247450 - DNA, 978 bp, Artificial Sequence
  derived and/or modified sequence
atgctgtgcccctggaggacagccaacctgggcctgctgctgatcctgaccatcttcctggtggccgccagcagcagcctgtgcatggatgagaagcagatcacccagaactacagcaaggtgctggccgaggtgaacacctcctggcctgtgaagatggccaccaatgctgtgctgtgctgcccccccatcgccctgaggaacctgatcatcatcacctgggagatcatcctgcggggccagcccagctgcaccaaggcctacaagaaggagaccaatgagaccaaggagaccaactgcacagatgagcgcatcacctgggtgtccaggccagaccagaacagcgacctgcagatcagaacagtggccatcacccatgatggctactaccgctgcatcatggtgaccccagatggcaacttccaccggggctaccacctgcaggtgctggtgaccccagaggtgaccctcttccagaacagaaacagaacagctgtgtgcaaggctgtggccggcaagccagctgcccacatctcctggatccctgagggggactgtgccaccaagcaggagtactggagcaatggaacagtgacagtgaagagcacctgccactgggaggtgcacaacgtgtccacagtgacctgccacgtgagccacctgaccggcaacaagagcctgtacatcgagctgctgcctgtgcctggggccaagaagagcgccaagctgtacatcccctacatcatcctgaccatcatcatcctgaccatcgtgggcttcatctggctgctgaaggtgaatggctgcaggaagtacaagctgaacaagacagagagcacccctgtggtggaggaggatgagatgcagccctatgccagctacacagagaagaacaaccccctgtatgacaccaccaacaaggtgaaggccagcgaggccctgcagagcgaggtggacacagacctgcacaccctgtag

SEQ ID NO: 247451 - DNA, 978 bp, Artificial Sequence
  derived and/or modified sequence
atgctgtgcccctggcggaccgccaacctgggcctgctgctgatcctaaccattttcttagtggcagcttccagctctctttgtatggatgaaaagcaaattacccagaattactcaaaggtgcttgcagaagtcaacacaagctggccagtgaagatggctacgaatgccgttctctgctgcccccctattgccctccggaatctgatcataattacgtgggaaatcattctcagaggtcagccatcttgtaccaaggcatataaaaaagaaactaacgaaaccaaagaaaccaactgtactgatgagagaattacatgggttagccgaccggaccagaatagtgatctccagatcaggactgtcgctattacacatgatggctattatcgctgcattatggttacgcccgacggaaatttccacagggggtaccatctgcaggttctagtcacccctgaggtcacactttttcagaacaggaacagaacagccgtctgtaaagccgtagccggcaaaccagctgcccatataagctggattccagagggcgattgtgccaccaagcaggagtactggtctaatggcactgttacagtgaagtctacctgccattgggaagtgcataacgtgagtaccgtgacatgtcatgtctcacatcttacaggtaataaatcgctgtacattgagctgttacccgttccaggcgcaaaaaagagcgccaagctttatatcccatatatcatcttaaccattattatcctcacgatcgtaggattcatctggctgttgaaagtgaatggctgcagaaaatacaagctgaacaagactgaatctactccggtagtcgaggaagatgaaatgcagccctatgcctcttataccgagaaaaacaatccactctacgacactaccaataaagtgaaggccagcgaagccctccagtctgaagtggatactgaccttcatacattatag

SEQ ID NO: 247452 - DNA, 978 bp, Artificial Sequence
  derived and/or modified sequence
atgttatgcccttggcgaacggcaaatttaggcctgcttctcattttgaccatttttctcgtggccgctagctctagcctgtgtatggatgaaaagcaaattacgcagaactattcgaaggtgctggccgaggtaaatacctcttggccagtgaaaatggctactaacgccgtgctgtgctgcccacccatcgctttaagaaatctgataataatcacctgggaaattattctccgtggccagcccagttgcacaaaggcatacaagaaagagaccaacgagaccaaagagaccaattgtacagatgagcggatcacatgggtgtcaaggcccgaccagaacagtgacctccagatcagaacggttgccatcacacatgacggatactaccgttgcattatggtaacccccgacggcaactttcatcgaggctaccacctacaagtcctagtcacacctgaggtaactttattccaaaacaggaataggacggcagtttgtaaggccgtcgccggaaagccagccgcacacatcagttggattccagagggcgattgtgccactaagcaggaatactggtccaacggcaccgttactgtaaaatccacttgtcattgggaggtgcacaacgtttctaccgtgacgtgtcatgtcagccaccttaccggcaataagtctctctatatcgaactgttgcccgtcccaggggctaaaaagtccgcgaagctgtacatcccgtatatcatacttactattatcatcctaacaatcgtcggtttcatctggcttctgaaagtgaatggctgccgcaagtataaattgaacaagacagagtctacacctgtggttgaggaggacgagatgcagccatacgccagctatacagaaaagaataatcctctttatgacaccacgaacaaggtcaaggcatcagaagctctgcaaagtgaagtggacacagacctccacaccctttag

SEQ ID NO: 247453 - DNA, 3679 bp, Artificial Sequence
  derived and/or modified sequence
attgctgtgtcaagttccagagaaaagcttctgttcgtccaagttactaaccaggctaaaccacatagacgtgaaggaaggggctagaaggaagggagtgccccactgttgatggggtaagaggatcctgtactgagaagttgaccagagagggtctcaccatgcgcacagttccttctgtacctgtgtggaggaaaagtactgagtgaagggcagaaaaagagaaaacagaaatgctctgcccttggagaactgctaacctagggctactgttgattttgactatcttcttagtggccgcttcaagcagtttatgtatggatgaaaaacagattacacagaactactcgaaagtactcgcagaagttaacacttcatggcctgtaaagatggctacaaatgctgtgctttgttgccctcctatcgcattaagaaatttgatcataataacatgggaaataatcctgagaggccagccttcctgcacaaaagcctacaagaaagaaacaaatgagaccaaggaaaccaactgtactgatgagagaataacctgggtctccagacctgatcagaattcggaccttcagattcgtaccgtggccatcactcatgacgggtattacagatgcataatggtaacacctgatgggaatttccatcgtggatatcacctccaagtgttagttacacctgaagtgaccctgtttcaaaacaggaatagaactgcagtatgcaaggcagttgcagggaagccagctgcgcatatctcctggatcccagagggcgattgtgccactaagcaagaatactggagcaatggcacagtgactgttaagagtacatgccactgggaggtccacaatgtgtctaccgtgacctgccacgtctcccatttgactggcaacaagagtctgtacatagagctacttcctgttccaggtgccaaaaaatcagcaaaattatatattccatatatcatccttactattattattttgaccatcgtgggattcatttggttgttgaaagtcaatggctgcagaaaatataaattgaataaaacagaatctactccagttgttgaggaggatgaaatgcagccctatgccagctacacagagaagaacaatcctctctatgatactacaaacaaggtgaaggcatctgaggcattacaaagtgaagttgacacagacctccatactttataagttgttggactctagtaccaagaaacaacaacaaacgagatacattataattactgtctgattttcttacagttctagaatgaagacttatattgaaattaggttttccaaggttcttagaagacattttaatggattctcattcatacccttgtataattggaatttttgattcttagctgctaccagctagttctctgaagaactgatgttattacaaagaaaatacatgcccatgaccaaatattcaaattgtgcaggacagtaaataatgaaaaccaaatttcctcaagaaataactgaagaaggagcaagtgtgaacagtttcttgtgtatcctttcagaatattttaatgtacatatgacatgtgtatatgcctatggtatatgtgtcaatttatgtgtccccttacatatacatgcacatatctttgtcaaggcaccagtgggaacaatacactgcattactgttctatacatatgaaaacctaataatataagtcttagagatcattttatatcatgacaagtagagctacctcattctttttaatggttatataaaattccattgtatagttatatcattatttaattaaaaacaaccctaatgatggatatttagattcttttaagttttgtttatttcttttaagttttgtttgtggtataaacaataccacatagaatgtttcttgtgcatatatctctttgtttttgagtatatctgtaggataactttcttgagtggaattgtcaggtcaaagggtttgtgcattttactattgatatatatgttaaattgtgtcaaatatatatgtcaaattccctccaacattgtttaaatgtgcctttccctaaatttctattttaataactgtactattcctgcttctacagttgccactttctctttttaatcaaccagattaaatatgatgtgagattataataagaattatactatttaataaaaatggatttatatttttggtcatgtttgtaagagagtgaatgcacgtgtgagaacattagcttcttctgaactcattatatctccacagaggtgttgatacttgatgcctaacagttttgcagatgtgctacattggaattgtgtatttttatggtgtacattctattgtgatatatttattgaataattaatgtctattgaccatataagtggcgaaaaatgcaccatagaggacatggggtatttatttacaaactatgagctacataataagcaagtggccatgggatggcatgaccctcccctccatatttttgtggagcaaaatattggcaatgtttatgtaaatcattgttaatatcatgaaattatttttaattaaaaacataagtctatttgctccatagcagaaaaaacatgagaagttttttcatcatgatagaaattgaaacaaaatatattcattcttcaatcataccatctgagatttttaagacagctattttgtcttataagtatatttttctccctctagacatttcagttactatggattttgtcctcaaagggacttttagtctattttggatgtaaagctaatctaatgacacttggcacatgatattttgatcaagccattttgacttgaccaaaaagcagtgtccattaggtttctgcatataaatattaccaagcaatgttcacaatagacatcattacactgtccttgaaatttattaattcttcatccaaccctggttgagctgaggctcatagttaggttcaagactatctgtttaaatattactgaaaaacaaagtaagacagtactatgcttacctcttaacttgataatgtcaaaacaggcatgttaaatgacatcatagaaaagacttcaagataatttatagaagttaaattatattgtacagaaaataattgtatgaaaatctctactatggggctggaacatggttgaacattagaatgatataaaaaattatatatattctccaaatccacgctagacctgtcaaattagagaatctagagattagacctggcgtgtcagcaaggtcatccaggaagcagaggctgagacggagttaggtgtgattacttacatagtcgattacattttacaaataacattttatatgtctcatttactgtgctttctccccatcccattttgtatcttttcctttgctttgctagatttgtcaattttctctctctttctctgtctctctctctttcaatatctctaataatttgaaagtaattcatcataactaaatatctattggggttatgcttcacttacaaacttctgaaaacggctttactgagatataattgatatatttaagtgtacagtttgttaaattttgcacatatttaaaatgtggactttggtaaatgttgacatagttttacatctgtgaaaccatcagcataatcaagataataaacttgtccatcacccccc

SEQ ID NO: 247454 - DNA, 978 bp, Artificial Sequence
  derived and/or modified sequence
atgctgtgcccctggagaaccgccaacctgggcctgctgctgatcctgaccatcttcctggtggccgccagcagcagcctgtgcatggacgagaagcagatcacccagaactacagcaaggtgctggccgaggtgaacaccagctggcccgtgaagatggccaccaacgccgtgctgtgctgcccccccatcgccctgagaaacctgatcatcatcacctgggagatcatcctgagaggccagcccagctgcaccaaggcctacaagaaggagaccaacgagaccaaggagaccaactgcaccgacgagagaatcacctgggtgagcagacccgaccagaacagcgacctgcagatcagaaccgtggccatcacccacgacggctactacagatgcatcatggtgacccccgacggcaacttccacagaggctaccacctgcaggtgctggtgacccccgaggtgaccctgttccagaacagaaacagaaccgccgtgtgcaaggccgtggccggcaagcccgccgcccacatcagctggatccccgagggcgactgcgccaccaagcaggagtactggagcaacggcaccgtgaccgtgaagagcacctgccactgggaggtgcacaacgtgagcaccgtgacctgccacgtgagccacctgaccggcaacaagagcctgtacatcgagctgctgcccgtgcccggcgccaagaagagcgccaagctgtacatcccctacatcatcctgaccatcatcatcctgaccatcgtgggcttcatctggctgctgaaggtgaacggctgcagaaagtacaagctgaacaagaccgagagcacccccgtggtggaggaggacgagatgcagccctacgccagctacaccgagaagaacaaccccctgtacgacaccaccaacaaggtgaaggccagcgaggccctgcagagcgaggtggacaccgacctgcacaccctgtag

SEQ ID NO: 247455 - protein, 426 aa, Artificial Sequence
  derived and/or modified sequence
MERPIKDSMFSLALKCLISLSTIILLGLIIAYHTREVQLFVIDNGADDWRIAMTYERILYISLEMLVCAIHPIPGEYKFFWTARLAFSYTPSRAEADVDIILSIPMFLRLYLIARVMLLHSKLFTDASSRSIGALNKINFNTRFVMKTLMTICPGTVLLVFSISLWIIAAWTVRVCERYHDQQDVTSNFLGAMWLISITFLSIGYGDMVPHTYCGKGVCLLTGIMGAGCTALVVAVVARKLELTKAEKHVHNFMMDTQLTKRIKNAAANVLRETWLIYKHTKLLKKIDHAKVRKHQRKFLQAIHQLRSVKMEQRKLSDQANTLVDLSKMQNVMYDLITELNDRSEDLEKQIGSLESKLEHLTASFNSLPLLIADTLRQQQQQLLSAIIEARGVSVAVGTTHTPISDSPIGVSSTSFPTPYTSSSSC

SEQ ID NO: 247456 - DNA, 1257 bp, Artificial Sequence
  derived and/or modified sequence
atgttctcactggctttgaagtgtctcatttctctgagcacaataattctgctcggactgattattgcttaccacactagagaagtacagctgttcgtcattgataatggcgcggacgattggcggattgctatgacgtacgagagaattctttatatctccctggagatgctcgtgtgtgccatacacccgatcccgggggagtacaagtttttttggaccgcccgacttgccttcagctatactccatcccgggcagaggcagatgtggatattatcctcagtatccctatgtttctgcggctctacctcatcgcccgagtcatgctgctgcatagcaagctctttaccgatgcttcatccaggtctataggcgcccttaataagataaatttcaacacaagattcgttatgaagaccctcatgactatatgtcctggcacagtgcttttggtcttctcgatctccctttggattattgctgcatggaccgtgcgggtctgcgagcgatatcacgatcaacaggatgtgacctccaactttctgggtgccatgtggcttatatcaatcacctttctgtcgattggctacggagacatggtgcctcacacatattgtggcaagggcgtatgtttgctgaccggcataatgggcgccggctgtacagcactggtcgtggctgtggtggcaaggaaactcgagctgacgaaagcagagaaacacgttcacaactttatgatggacacacaactgacaaagaggataaagaatgcagctgcgaatgttctgagggagacttggcttatctataaacacacaaagctgttaaagaaaatagatcacgccaaagttcgaaaacaccagaggaagtttctgcaagccattcaccagctgcggtccgtaaaaatggagcagcgcaagttaagtgatcaggccaacactctagtggaccttagcaaaatgcagaatgtcatgtatgatctcattacagagctgaatgatagatctgaagacctggaaaaacagatcggctctctggagtctaagctcgagcaccttacggcctcttttaacagtctgccattgctgattgctgatactctgagacagcagcagcagcagctcttgagcgcgatcatagaagcccggggagtcagtgttgctgtcggtacaactcatactccaataagcgacagccccattggggtctcttccacctctttcccgacaccatatacaagttcttcatcctgttag

SEQ ID NO: 247457 - DNA, 1281 bp, Artificial Sequence
  derived and/or modified sequence
atggagcgcccaatcaaggacagcatgttctccctcgccctaaaatgtctaatttcgctttcaacaattatacttctgggtttaatcatcgcgtaccataccagagaagtccaactgtttgtgattgacaacggcgctgacgactggcggatcgcaatgacatacgagaggatcctgtatatctcattagagatgctcgtttgcgccatacatcctatcccgggcgaatacaaatttttctggacagctcggctggctttcagctatacacccagcagggcagaggccgatgttgatataatcttatccatcccaatgtttcttcgactgtacctcattgccagagtaatgttgttgcactcaaagctgttcaccgatgcatcaagtcgatcgattggtgccctcaataagatcaatttcaacacgcgtttcgttatgaaaaccctcatgaccatttgcccgggcacagttctcttggtgtttagtatatcattgtggatcattgctgcctggaccgtaagggtttgcgagagatatcatgatcaacaggacgttacaagcaacttcttgggagctatgtggctaatctcaatcactttcctgtccatcggctacggtgacatggtcccccatacatactgcgggaaaggcgtctgtttgctgaccgggatcatgggggccggttgtaccgccctggtagtggctgttgttgcacgcaaactggagctgaccaaagccgagaagcacgtgcataactttatgatggacacccagctaacaaaacgaatcaagaatgcagcagcgaacgttttaagagaaacctggctgatttacaagcacaccaagctcctgaaaaaaattgatcatgcgaaggtccgaaaacatcaacggaagtttctgcaagcgatacaccaacttagaagcgtgaaaatggaacagcggaagctgtcggaccaggccaacaccctggtcgacctttccaaaatgcagaatgtcatgtacgacctgattacagagcttaacgatcggagcgaagacctggaaaagcagattggatccctggagagtaaactggagcacttgaccgcctcattcaatagtttgccactgctgattgcggatacactcaggcagcagcagcagcagttgcttagcgccatcattgaggctcgcggggtgagcgtggcagttggaacaacacatactccgatctctgattcacccattggggtgtctagcaccagctttcctactccctacacctcctctagctcttgttag

SEQ ID NO: 247458 - DNA, 1257 bp, Artificial Sequence
  derived and/or modified sequence
atgttcagcctggccctgaagtgcctgatcagcctgagcaccatcatcctgctgggcctcatcatcgcctaccacacccgggaggtgcagctgtttgtgattgacaacggggctgatgactggagaattgccatgacctatgagcgcatcctgtacatcagcctggagatgctggtgtgtgccatccaccccatccctggagagtacaagttcttctggacagcccggctggccttctcctacacccccagcagagctgaggctgatgtggacatcatcctgagcatccccatgttcctgcggctgtacctgattgcccgggtgatgctgctgcacagcaagctgttcacagatgccagcagccgcagcatcggggccctgaacaagatcaacttcaacaccaggtttgtgatgaagaccctgatgaccatctgccccggcaccgtgctgctggtgttcagcatcagcctgtggatcatcgccgcctggacagtgcgggtgtgtgagcgctaccatgaccagcaggatgtgaccagcaacttcctgggcgccatgtggctgatcagcatcaccttcctgagcatcggctatggagacatggtgccccacacctactgtgggaagggcgtgtgcctgctgaccggcatcatgggcgccggctgcacagccctggtggtggccgtggtggccaggaagctggagctgaccaaggccgagaagcacgtgcacaacttcatgatggacacccagctgaccaagaggatcaagaatgctgctgccaacgtgctgcgggagacctggctgatctacaagcacaccaagctgctgaagaagattgaccacgccaaggtgaggaagcaccagaggaagttcctgcaggccatccaccagctgcggtctgtgaagatggagcagaggaagctgagtgaccaggccaacaccctggtggacctgagcaagatgcagaatgtgatgtatgacctgatcacagagctgaatgacagaagtgaggacctggagaagcagatcggcagcctggagagcaagctggagcacctgacagccagcttcaacagcctgcccctgctgattgctgacaccctgcggcagcagcagcagcagctgctgagcgccatcatcgaggcccggggcgtgtctgtggccgtgggcaccacccacacccccatcagtgacagccccatcggcgtgagcagcaccagcttccccaccccctacaccagcagcagcagctgctag

SEQ ID NO: 247459 - DNA, 1281 bp, Artificial Sequence
  derived and/or modified sequence
atggagcggcccatcaaggacagcatgttcagcctggccctgaagtgcctgatcagcctgagcaccatcatcctgctgggcctcatcatcgcctaccacacccgggaggtgcagctgtttgtgattgacaacggggctgatgactggagaattgccatgacctatgagcgcatcctgtacatcagcctggagatgctggtgtgtgccatccaccccatccctggagagtacaagttcttctggacagcccggctggccttctcctacacccccagcagagctgaggctgatgtggacatcatcctgagcatccccatgttcctgcggctgtacctgattgcccgggtgatgctgctgcacagcaagctgttcacagatgccagcagccgcagcatcggggccctgaacaagatcaacttcaacaccaggtttgtgatgaagaccctgatgaccatctgccccggcaccgtgctgctggtgttcagcatcagcctgtggatcatcgccgcctggacagtgcgggtgtgtgagcgctaccatgaccagcaggatgtgaccagcaacttcctgggcgccatgtggctgatcagcatcaccttcctgagcatcggctatggagacatggtgccccacacctactgtgggaagggcgtgtgcctgctgaccggcatcatgggcgccggctgcacagccctggtggtggccgtggtggccaggaagctggagctgaccaaggccgagaagcacgtgcacaacttcatgatggacacccagctgaccaagaggatcaagaatgctgctgccaacgtgctgcgggagacctggctgatctacaagcacaccaagctgctgaagaagattgaccacgccaaggtgaggaagcaccagaggaagttcctgcaggccatccaccagctgcggtctgtgaagatggagcagaggaagctgagtgaccaggccaacaccctggtggacctgagcaagatgcagaatgtgatgtatgacctgatcacagagctgaatgacagaagtgaggacctggagaagcagatcggcagcctggagagcaagctggagcacctgacagccagcttcaacagcctgcccctgctgattgctgacaccctgcggcagcagcagcagcagctgctgagcgccatcatcgaggcccggggcgtgtctgtggccgtgggcaccacccacacccccatcagtgacagccccatcggcgtgagcagcaccagcttccccaccccctacaccagcagcagcagctgctag

SEQ ID NO: 247460 - DNA, 1257 bp, Artificial Sequence
  derived and/or modified sequence
atgttcagcctggccctgaagtgcctgatcagcctgagcaccatcattcttctcggactcattatagcctaccatacccgagaagtacagctgtttgttatagataatggcgctgacgactggcgcatagccatgacctatgagagaatcctatatataagtctggaaatgctggtgtgtgcaattcaccctatccctggcgagtataaatttttctggactgctcggctcgcgtttagctacaccccctccagagctgaggcggacgtcgacatcattctcagtattccaatgttccttcggctatacctgattgcaagagtcatgctcctgcacagcaaactgttcacagatgcttcatctaggtcaatcggtgctctgaataaaatcaacttcaacacccgctttgttatgaaaacattgatgaccatatgtccaggaaccgttctgcttgtcttctcgatttctctctggattattgctgcgtggaccgtgagagtctgcgagagatatcacgatcagcaggacgtgacatctaactttttaggggctatgtggctgatttccattaccttcctctctatcggctatggtgacatggtgcctcacacctattgtggtaaaggcgtctgtctgctgaccggtattatgggagctggatgtacggccttggtggttgccgtcgttgctcgcaagttggagctcacaaaggcagagaaacatgtgcacaacttcatgatggatacccagctcacaaaacgcataaagaatgctgccgccaatgtgctccgcgagacctggttgatttataagcatacaaagctgctcaagaagatcgaccacgctaaggtgagaaagcatcagaggaagttcctccaggcaatccaccagctccgtagcgtgaagatggagcagaggaagctgtctgaccaggcaaacaccttggttgatctttccaagatgcagaacgtgatgtacgaccttatcaccgagttgaacgaccggtccgaggaccttgaaaaacagattggcagcctcgagtcgaagctggaacacctgacagctagctttaacagcctgccccttcttattgcagacacccttagacagcagcagcagcagctgttatctgccatcattgaagctcggggggtttctgtggctgtgggaactactcacacgccaatctccgattcccctatcggggttagctccacatcatttcccacaccttacaccagttcctctagttgttag

SEQ ID NO: 247461 - DNA, 1281 bp, Artificial Sequence
  derived and/or modified sequence
atggagcggcccatcaaggacagcatgttcagcctggccctgaagtgtttgattagcctgagtacgataattctgctaggccttattatagcgtatcacacacgagaagtgcagctctttgtcatcgacaacggggcagacgattggagaatcgccatgacttacgagcggatattatacatcagcctagagatgctggtctgcgcaatacaccccatcccaggcgaatacaaattcttctggacggctcgcctggccttttcctacacccccagccgcgcagaggctgatgttgatattattttgtcaattcctatgttcttgaggctctacctgatcgctagagtgatgttactgcattcaaagctctttactgatgcctctagtcgctccatcggcgcattgaacaagatcaattttaacacccgtttcgtgatgaaaacactgatgaccatctgccctggtaccgtactattagttttctccatttctctgtggatcattgctgcctggacagtgagggtgtgcgaacggtaccatgaccagcaggatgttactagtaattttttgggggccatgtggttgataagtattaccttcttgtccatagggtacggggatatggtgcctcacacttattgcggcaagggagtgtgtctgctgactggaataatgggcgctggatgcaccgccctggtcgtggccgtggtggctcgaaaacttgaactcactaaggccgagaagcacgttcataatttcatgatggacacccagctcacaaaacgtattaaaaatgccgcggctaatgtcttaagggagacttggctcatctacaaacatactaaactcctgaagaaaattgatcacgctaaagtaagaaagcaccagcgcaaattcttgcaggctattcatcagttgaggagtgtgaagatggaacagcggaaactgagtgatcaagcgaacacactcgtggacctgtccaagatgcagaacgtaatgtatgatctaattacagaactaaacgacaggtcagaagatcttgaaaagcaaatcgggagcctggagtctaaactggaacatctgactgcctcttttaactcattgccacttctcatagctgatacactccggcagcaacagcagcagctgttgtctgccattatcgaggcacgaggtgtcagcgtggctgtcggaaccacacacactccaatatcagactcgcccataggagttagttcaacgtcttttccgacaccctatacatcgtcatcaagctgttag

SEQ ID NO: 247462 - DNA, 1658 bp, Artificial Sequence
  derived and/or modified sequence
gaggactcagaataaacctgctgctgcttcgtaaacatctcctgataaaaatggctacaggtgttacctgggcagagcagctgggcgccgccttggaatcagctgggggagcacctctccttgggacgggatgacagggcttcccaggcggtccccacaagcccgcgccccagctcagccccagttctcccctcccacctcaactcctccttgggataaataaagatgagtgtgtgtgtgagtgcgcgcccggatggagaacagcaggcactggctttagcggggagctggccccactgctccagcctctcagtccagccccaagacggaggagggggtttccctcccagagggagtggagatggaggaaggactccatgttttcgttggccctgaaatgccttatcagtctgtccaccatcatccttttgggcttgatcatcgcctaccacacacgtgaagtccagctcttcgtgatcgacaatggcgcggatgactggcggatagccatgacctacgagcgcatcctgtacatcagcctggagatgctggtgtgcgccatccaccccattcctggcgagtacaagttcttctggacggcacgcctggccttctcctacacaccctcccgggcggaggccgatgtggacatcatcctgtctatccccatgttcctgcgcctgtacctgatcgcccgagtcatgctgctgcacagcaagctcttcaccgatgcctcgtcccgcagcatcggggccctcaacaagatcaacttcaacacccgctttgtcatgaagacgctcatgaccatctgccctggcactgtgctgctcgtgttcagcatctctctgtggatcattgctgcctggaccgtccgtgtctgtgaaaggtaccatgaccagcaggacgtaactagtaactttctgggtgccatgtggctcatctccatcacattcctttccattggttatggggacatggtgccccacacatactgtgggaaaggtgtctgtctcctcactggcatcatgggtgcaggctgcactgcccttgtggtggccgtggtggcccgaaagctggaactcaccaaagcggagaagcacgttcataacttcatgatggacactcagctcaccaagcggatcaagaatgctgcagccaatgtccttcgggaaacatggttaatctataaacacacaaagctgctaaagaagattgaccatgccaaagtgaggaaacaccagaggaagttcctccaagctatccaccagttgaggagcgtcaagatggaacagaggaagctgagtgaccaagccaacactctggtggacctttccaagatgcagaatgtcatgtatgacttaatcacagaactcaatgaccggagcgaagacctggagaagcagattggcagcctggagtcgaagctggagcatctcaccgccagcttcaactccctgccgctgctcatcgccgacaccctgcgccagcagcagcagcagctcctgtctgccatcatcgaggcccggggtgtcagcgtggcagtgggcaccacccacaccccaatctccgatagccccattggggtcagctccacctccttcccgaccccgtacacaagttcaagcagttgctaaataaatctccccactccagaagca

SEQ ID NO: 247463 - DNA, 1962 bp, Artificial Sequence
  derived and/or modified sequence
caggaaagtcagcttaaaggacactccttgcagggactgagctggcacctactccttagagcttgctgataccaggcctgccacgcgacatctgcaaggacagttgtttggtgttttgcttcaggttatagatggagagacctataaaggactccatgttttcgttggccctgaaatgccttatcagtctgtccaccatcatccttttgggcttgatcatcgcctaccacacacgtgaagtccagctcttcgtgatcgacaatggcgcggatgactggcggatagccatgacctacgagcgcatcctgtacatcagcctggagatgctggtgtgcgccatccaccccattcctggcgagtacaagttcttctggacggcacgcctggccttctcctacacaccctcccgggcggaggccgatgtggacatcatcctgtctatccccatgttcctgcgcctgtacctgatcgcccgagtcatgctgctgcacagcaagctcttcaccgatgcctcgtcccgcagcatcggggccctcaacaagatcaacttcaacacccgctttgtcatgaagacgctcatgaccatctgccctggcactgtgctgctcgtgttcagcatctctctgtggatcattgctgcctggaccgtccgtgtctgtgaaaggtaccatgaccagcaggacgtaactagtaactttctgggtgccatgtggctcatctccatcacattcctttccattggttatggggacatggtgccccacacatactgtgggaaaggtgtctgtctcctcactggcatcatgggtgcaggctgcactgcccttgtggtggccgtggtggcccgaaagctggaactcaccaaagcggagaagcacgttcataacttcatgatggacactcagctcaccaagcggatcaagaatgctgcagccaatgtccttcgggaaacatggttaatctataaacacacaaagctgctaaagaagattgaccatgccaaagtgaggaaacaccagaggaagttcctccaagctatccaccagttgaggagcgtcaagatggaacagaggaagctgagtgaccaagccaacactctggtggacctttccaagatgcagaatgtcatgtatgacttaatcacagaactcaatgaccggagcgaagacctggagaagcagattggcagcctggagtcgaagctggagcatctcaccgccagcttcaactccctgccgctgctcatcgccgacaccctgcgccagcagcagcagcagctcctgtctgccatcatcgaggcccggggtgtcagcgtggcagtgggcaccacccacaccccaatctccgatagccccattggggtcagctccacctccttcccgaccccgtacacaagttcaagcagttgctaaataaatctccccactccagaagcattacccataggtcttaagatgcaaatcaactctctcctggtcgctttgccatcaagaaacattcagaccagggaacggaaagaagagagaccgagctaattaactaactcatgttcattcagcgtgcttggtccgacatgccttgaaaccagaaatctaatctctgtttaggtgcctctacttgggagcgggaagaggagatgacaggaagcgacgcctctggcagggcccttgctgcagagttggtggagaacagaaatccacgctcaatctcaggtcttcacgcggggggtgggggtcagatgcactgaagtagccaacagcgaagccagtccagaagaggggtccgctgggagggagggttgtgtcaggcttgggggatgggctcttcgccatgggggtctttgaacacacctctctcctttccttttgtctacggaagcctctgggtgacaaaagtaaaagagagctgcccacaacttgccaaaacagatatactcgaatcagactgaaaaaaaaaaaaaaa

SEQ ID NO: 247464 - DNA, 1257 bp, Artificial Sequence
  derived and/or modified sequence
atgttctccctggccttgaaatgtctcatcagtcttagtaccattatactactggggcttatcattgcttaccacactcgggaggtgcagctgttcgtcatagataacggagccgacgactggcggatcgccatgacatatgagagaatcctatacatcagtctcgaaatgcttgtgtgtgctattcatccaatccctggggagtacaaattcttctggacagctagacttgcattttcctatactccttcaagagccgaggctgatgttgacatcatcctttcaatcccaatgtttcttagactgtacctgatcgctcgcgttatgctacttcattctaagcttttcacagatgcatcttcgcggtcaataggggcacttaataagatcaactttaatacaagatttgttatgaagacactgatgaccatctgccccggaactgtgctgctggtgttctccattagcctgtggattatcgccgcatggacagtacgggtatgtgagaggtaccatgatcagcaggacgttacaagcaatttcttaggcgctatgtggctaataagcataacctttctttctattgggtacggcgacatggtgcctcatacctactgcggtaaaggggtctgtctgctcactgggatcatgggtgcaggttgcaccgcactagtcgtggctgtggtggcgaggaagcttgaactgactaaagcggaaaaacacgtgcataattttatgatggatacccagcttaccaaaagaatcaaaaatgccgctgcaaatgtgctgcgcgaaacctggctcatctataagcacacaaagctgctgaaaaagatagatcatgctaaagtgcgcaagcaccagcgtaaatttttacaagcaattcatcagctaaggagcgttaagatggagcagaggaagctgagtgatcaagcaaacacactggtcgacctgtctaaaatgcagaacgtgatgtatgacctgatcacagagctgaatgatcgctcagaggacctcgagaagcagatagggtcgctcgagtctaagttggagcatctgaccgcctcttttaactccctgccactcctcattgctgacaccctccgtcagcaacagcagcagttgctttctgccattatcgaggccagaggcgttagcgtggccgtgggcaccacccacacccccattagtgattccccgatcggggtctctagcacctcttttcctaccccttatacatcttcttctagctgttag

SEQ ID NO: 247465 - DNA, 1281 bp, Artificial Sequence
  derived and/or modified sequence
atggagaggccaattaaggacagtatgttttcgctggctctgaaatgtttgatcagcttatccacaatcatcttgttgggtcttatcatcgcatatcacacacgggaggtgcaattatttgttatcgataacggcgctgacgattggagaattgctatgacgtacgagagaatcctttacatctcactggagatgctagtttgcgctattcaccctatccctggcgaatataagttcttttggacggcccgactggctttctcctacacaccgagcagagccgaggctgatgttgacatcatactctccattcctatgttcttgaggctgtacttgattgccagggtcatgttgctacattcgaagcttttcacagatgcatcgtcccgatccatcggagccctcaataagatcaactttaatactcggtttgtaatgaaaacgttgatgacgatttgtcccggaaccgtgctcttggttttcagtataagcctgtggattatagctgcatggaccgttcgcgtctgcgaacggtatcatgatcagcaggatgtcacctccaacttcctcggcgctatgtggctgatttccattacctttctctctatcggctacggtgatatggtgccacacacctactgcggaaagggcgtctgcctgctcacaggtatcatgggggcaggctgcaccgctctcgtggttgccgtcgtggccaggaagctcgaactgaccaaggctgaaaagcacgtgcataactttatgatggacactcagctcacgaagcgaatcaagaacgccgcagccaatgtgcttcgggagacttggttaatctacaagcataccaagcttctgaagaaaatcgaccacgccaaggtccgcaagcaccagaggaagtttcttcaggccatccaccagctccgatctgtcaaaatggagcagcggaagctgtcagaccaagccaataccctggtagatctgagtaagatgcagaatgtgatgtacgatctcataaccgagctaaacgacagatctgaagatctggagaagcagattgggagtctcgaatcaaagttagagcacctgacagcatctttcaacagtctaccactcttgatcgctgatactctgcggcaacagcagcagcagctgctgagtgcgatcatcgaagccaggggcgtgagcgtcgctgtggggaccacccacactcccatttctgattcacccatcggggtgagtagcacatcgtttccaaccccctatacgagtagttcatcttgttag

SEQ ID NO: 247466 - DNA, 1257 bp, Artificial Sequence
  derived and/or modified sequence
atgttcagcctggccctgaagtgcctgatcagcctgagcaccatcatcctgctgggcctgatcatcgcctaccacaccagagaggtgcagctgttcgtgatcgacaacggcgccgacgactggagaatcgccatgacctacgagagaatcctgtacatcagcctggagatgctggtgtgcgccatccaccccatccccggcgagtacaagttcttctggaccgccagactggccttcagctacacccccagcagagccgaggccgacgtggacatcatcctgagcatccccatgttcctgagactgtacctgatcgccagagtgatgctgctgcacagcaagctgttcaccgacgccagcagcagaagcatcggcgccctgaacaagatcaacttcaacaccagattcgtgatgaagaccctgatgaccatctgccccggcaccgtgctgctggtgttcagcatcagcctgtggatcatcgccgcctggaccgtgagagtgtgcgagagataccacgaccagcaggacgtgaccagcaacttcctgggcgccatgtggctgatcagcatcaccttcctgagcatcggctacggcgacatggtgccccacacctactgcggcaagggcgtgtgcctgctgaccggcatcatgggcgccggctgcaccgccctggtggtggccgtggtggccagaaagctggagctgaccaaggccgagaagcacgtgcacaacttcatgatggacacccagctgaccaagagaatcaagaacgccgccgccaacgtgctgagagagacctggctgatctacaagcacaccaagctgctgaagaagatcgaccacgccaaggtgagaaagcaccagagaaagttcctgcaggccatccaccagctgagaagcgtgaagatggagcagagaaagctgagcgaccaggccaacaccctggtggacctgagcaagatgcagaacgtgatgtacgacctgatcaccgagctgaacgacagaagcgaggacctggagaagcagatcggcagcctggagagcaagctggagcacctgaccgccagcttcaacagcctgcccctgctgatcgccgacaccctgagacagcagcagcagcagctgctgagcgccatcatcgaggccagaggcgtgagcgtggccgtgggcaccacccacacccccatcagcgacagccccatcggcgtgagcagcaccagcttccccaccccctacaccagcagcagcagctgctag

SEQ ID NO: 247467 - DNA, 1281 bp, Artificial Sequence
  derived and/or modified sequence
atggagagacccatcaaggacagcatgttcagcctggccctgaagtgcctgatcagcctgagcaccatcatcctgctgggcctgatcatcgcctaccacaccagagaggtgcagctgttcgtgatcgacaacggcgccgacgactggagaatcgccatgacctacgagagaatcctgtacatcagcctggagatgctggtgtgcgccatccaccccatccccggcgagtacaagttcttctggaccgccagactggccttcagctacacccccagcagagccgaggccgacgtggacatcatcctgagcatccccatgttcctgagactgtacctgatcgccagagtgatgctgctgcacagcaagctgttcaccgacgccagcagcagaagcatcggcgccctgaacaagatcaacttcaacaccagattcgtgatgaagaccctgatgaccatctgccccggcaccgtgctgctggtgttcagcatcagcctgtggatcatcgccgcctggaccgtgagagtgtgcgagagataccacgaccagcaggacgtgaccagcaacttcctgggcgccatgtggctgatcagcatcaccttcctgagcatcggctacggcgacatggtgccccacacctactgcggcaagggcgtgtgcctgctgaccggcatcatgggcgccggctgcaccgccctggtggtggccgtggtggccagaaagctggagctgaccaaggccgagaagcacgtgcacaacttcatgatggacacccagctgaccaagagaatcaagaacgccgccgccaacgtgctgagagagacctggctgatctacaagcacaccaagctgctgaagaagatcgaccacgccaaggtgagaaagcaccagagaaagttcctgcaggccatccaccagctgagaagcgtgaagatggagcagagaaagctgagcgaccaggccaacaccctggtggacctgagcaagatgcagaacgtgatgtacgacctgatcaccgagctgaacgacagaagcgaggacctggagaagcagatcggcagcctggagagcaagctggagcacctgaccgccagcttcaacagcctgcccctgctgatcgccgacaccctgagacagcagcagcagcagctgctgagcgccatcatcgaggccagaggcgtgagcgtggccgtgggcaccacccacacccccatcagcgacagccccatcggcgtgagcagcaccagcttccccaccccctacaccagcagcagcagctgctag

SEQ ID NO: 247468 - protein, 478 aa, Artificial Sequence
  derived and/or modified sequence
MATITCTRFTEEYQLFEELGKGAFSVVRRCVKVLAGQEYAAKIINTKKLSARDHQKLEREARICRLLKHPNIVRLHDSISEEGHHYLIFDLVTGGELFEDIVAREYYSEADASHCIQQILEAVLHCHQMGVVHRDLKPENLLLASKLKGAAVKLADFGLAIEVEGEQQAWFGFAGTPGYLSPEVLRKDPYGKPVDLWACGVILYILLVGYPPFWDEDQHRLYQQIKAGAYDFPSPEWDTVTPEAKDLINKMLTINPSKRITAAEALKHPWISHRSTVASCMHRQETVDCLKKFNARRKLKGAILTTMLATRNFSGGKSGGNKKSDGVKESSESTNTTIEDEDTKVRKQEIIKVTEQLIEAISNGDFESYTKMCDPGMTAFEPEALGNLVEGLDFHRFYFENLWSRNSKPVHTTILNPHIHLMGDESACIAYIRITQYLDAGGIPRTAQSEETRVWHRRDGKWQIVHFHRSGAPSVLPH

SEQ ID NO: 247469 - DNA, 1437 bp, Artificial Sequence
  derived and/or modified sequence
atggccaccattacgtgcacaagattcacagaggaataccagctctttgaagagctgggcaaaggagccttcagcgtcgtgcgaagatgcgtgaaggtcctcgcgggccaggagtacgccgccaagattattaatactaagaagctgtcagctagagatcatcagaagctggagagagaggcacgcatctgcagattgctgaaacaccccaacattgttcggctccacgatagtatatccgaggaaggtcatcactacttgatcttcgaccttgttacaggaggagaactcttcgaggatatagtggccagagagtactatagtgaagccgatgcctcacattgcattcagcagatcctcgaggctgtgctgcactgtcatcagatgggcgtagttcatcgggacctgaaaccggagaacctcttgctggctagcaagctgaagggggctgctgtgaaactggctgatttcggcctggcgattgaagtcgagggcgaacagcaagcttggtttggcttcgccggaactcctggatacttaagtcctgaggttctccgaaaagatccttatggcaagccggtggacctgtgggcatgtggcgtgatcttatatatacttcttgttggctaccctccgttttgggacgaggaccaacaccgtttataccaacagatcaaagccggggcatacgactttccatcccctgaatgggatacagtgacccctgaagcgaaggatctaattaataaaatgttgacaattaacccttccaagagaatcaccgcagctgaagcacttaaacacccttggatctcccaccgctccaccgtggcctcttgtatgcacaggcaggagaccgtcgattgtctgaagaagtttaacgcccgccgaaagctgaaaggtgcaatactcacaacaatgctcgccacccgtaatttcagcggaggcaagagcggggggaataagaaatcggacggcgtaaaggagtcctcggagtccactaacaccaccatcgaagatgaggacacaaaggtgcgcaagcaggagatcatcaaggtgaccgagcaactgattgaggcaatttctaatggagacttcgaatcctataccaagatgtgcgaccccggcatgaccgcgttcgagcccgaagccctgggcaacctggtagagggcttagactttcacagattctactttgagaacctttggtctaggaattccaaaccagttcacaccacgattctcaatccacacatccacctcatgggtgatgagagcgcgtgtatcgcctacatacgcatcacccagtatctcgatgctggcgggatacctcgcacggcccagagcgaagagacacgtgtgtggcacagacgggatggcaaatggcagatcgtccacttccaccgctccggggccccttctgttctgccccattag

SEQ ID NO: 247470 - DNA, 276 bp, Artificial Sequence
  derived and/or modified sequence
atggccacaatcacctgtacaaggttcaccgaggagtatcagctgtttgaggaactgggtaagggggcattctcggtcgtcaggagatgtgtgaaggtgctcgccggacaggaatacgcagccaagattatcaataccaagaaactctctgcgcgagatcaccagaaactcgagcgggaagctaggatctgccggctcttaaaacaccctaacatagttcgactccacgacagcatttcagaggagggacaccactaccttatttttgacctgtag

SEQ ID NO: 247471 - DNA, 1437 bp, Artificial Sequence
  derived and/or modified sequence
atggccaccatcacctgcacccgcttcacagaggagtaccagctgtttgaggagctgggcaaaggagccttctctgtggtgcggcgctgtgtgaaggtgctggccggccaggagtatgctgccaagatcatcaacaccaagaagctgagcgcccgggaccaccagaagctggagcgggaggcccgcatctgccgcctgctgaagcaccccaacatcgtgcggctgcatgacagcatcagcgaggagggccaccactacctgatctttgacctggtgactggaggagagctgtttgaagatattgtggcccgggagtactacagcgaggctgatgccagccactgcatccagcagatcctggaggccgtgctgcactgccaccagatgggcgtggtgcaccgggacctgaagccagagaacctgctgctggccagcaagctgaagggagctgctgtgaagctggccgactttggcctggccatcgaggtggagggggagcagcaggcctggtttggatttgctggcaccccaggctacctgagccctgaggtgctgaggaaggacccctacggcaagcctgtggacctgtgggcctgtggggtcatcctgtacatcctgctggtgggctacccacccttctgggatgaggaccagcaccggctgtaccagcagatcaaggccggggcctatgacttccccagccctgagtgggacacagtgaccccagaggccaaggacctgatcaacaagatgctgaccatcaaccccagcaagaggatcacagctgctgaggccctgaagcacccctggatcagccacaggagcacagtggccagctgcatgcaccggcaggagaccgtggactgcctgaagaagttcaatgcccggaggaagctgaagggggccatcctgaccaccatgctggccaccaggaacttcagcggcggcaagagcggcggcaacaagaagagtgatggagtgaaggagagcagcgagagcaccaacaccaccattgaagatgaggacaccaaggtgaggaagcaggagatcatcaaggtgacagagcagctgattgaggccatcagcaatggagactttgagagctacaccaagatgtgtgaccccggcatgacagcctttgagcctgaggccctgggcaacctggtggagggcctggacttccaccgcttctactttgagaacctgtggagcaggaacagcaagcctgtgcacaccaccatcctgaacccccacatccacctgatgggagatgagagcgcctgcatcgcctacatccgcatcacccagtacctggatgctgggggcatccccaggacagcccagagcgaggagaccagggtgtggcacagaagagatggcaagtggcagatcgtgcacttccacaggtctggggcccccagcgtgctgccccactag

SEQ ID NO: 247472 - DNA, 276 bp, Artificial Sequence
  derived and/or modified sequence
atggccaccatcacctgcacccgcttcacagaggagtaccagctgtttgaggagctgggcaaaggagccttctctgtggtgcggcgctgtgtgaaggtgctggccggccaggagtatgctgccaagatcatcaacaccaagaagctgagcgcccgggaccaccagaagctggagcgggaggcccgcatctgccgcctgctgaagcaccccaacatcgtgcggctgcatgacagcatcagcgaggagggccaccactacctgatctttgacctgtag

SEQ ID NO: 247473 - DNA, 1437 bp, Artificial Sequence
  derived and/or modified sequence
atggccaccatcacctgcacccggttcaccgaggagtaccagctgtttgaggaattagggaagggcgcattcagcgttgtacgaaggtgtgtgaaagtgctagcaggacaggagtatgccgccaagatcattaataccaagaaactttccgccagagatcaccaaaaattggaaagggaggcccgcatttgccgcctgctaaagcatcctaacatcgtgcgactccatgacagcatatctgaagaaggccatcactatctgatttttgatttggtgaccggcggcgagcttttcgaagacattgtcgctcgcgagtattattcagaggccgatgcaagtcattgcatccagcaaattctggaagccgtgctgcactgtcaccagatgggcgtggtccaccgggatctcaagcctgaaaatttgctcttggcttcgaagctaaagggagcggccgtgaagttggctgattttgggcttgccatcgaggtggaaggggagcagcaggcctggttcggtttcgctggaaccccaggctatctgtcacccgaagttctgcgtaaagatccatatgggaagccagtcgacctctgggcttgcggagttattctctacatcctcctggtgggctacccaccattctgggacgaggaccaacatcgtctgtatcaacagattaaagcaggtgcgtacgactttccgtcacctgaatgggacacagtcactcctgaagcaaaagacctgatcaataagatgctcaccattaacccttcaaaacggattactgctgcagaagccctcaagcacccctggattagtcatagatcgaccgtggcctcctgcatgcatagacaggagacagtggattgcctcaaaaagttcaacgctagacggaagctgaagggcgcaatcctcacaaccatgctggccactcgtaacttttccggcggcaaaagcggcggaaacaagaagtcagacggtgtgaaagagtcatctgagagtaccaacactacaatcgaagatgaagacactaaagtccggaaacaagaaatcattaaagttacagaacagctcattgaggccatttccaatggggatttcgaaagctataccaaaatgtgtgaccccgggatgacagccttcgagcctgaagcactggggaacttggtcgagggcctggacttccacagattctacttcgagaacttgtggtctaggaactctaagcccgtgcataccactatcctaaatcctcatattcatctgatgggggacgaatcagcctgtatcgcttatattagaattacccagtacctagatgccggtgggatcccaaggacagcccaaagcgaagagacacgggtgtggcacagaagggatggaaaatggcagattgtacacttccatcggagtggagcccccagtgtactgccccactag

SEQ ID NO: 247474 - DNA, 276 bp, Artificial Sequence
  derived and/or modified sequence
atggccaccatcacctgcacccggttcaccgaggagtaccagctgtttgaggaactggggaaaggggcattctctgtagtcaggcgatgcgtaaaggtgctcgcgggccaggaatacgccgccaaaatcatcaacaccaaaaagcttagcgccagggaccatcagaagcttgagcgtgaagccaggatttgcaggttactaaaacaccctaatatcgtgcggttacatgattccattagcgaagaggggcatcattatttaatcttcgacctttag

SEQ ID NO: 247475 - DNA, 1437 bp, Artificial Sequence
  derived and/or modified sequence
atggcaaccatcacatgcactcgctttacggaggaataccagctgtttgaagagctggggaagggggcattttccgttgtcagacgctgtgtgaaagtgctcgccggacaggagtacgccgcaaaaatcataaataccaaaaaacttagcgccagagatcatcagaaattggagcgcgaggcccgaatatgccgactcctcaaacacccaaacattgtgcggcttcacgattcgatttccgaggagggccaccactacttgatcttcgacctggtcactggaggagagttgttcgaagacatcgtagcacgggagtattactcggaggctgacgcctctcattgtattcaacagatactcgaggccgtactgcattgccatcaaatgggtgtggtgcaccgcgatttgaaaccagaaaacctgttgctggcaagtaagctgaagggagctgctgtgaaactcgccgattttgggttggccatagaagtagagggggagcagcaggcttggtttggcttcgccggtaccccgggatacctcagtccggaggtcttacgaaaggatccatacggaaaacccgtcgatttgtgggcttgcggtgtgatactctatatattgctcgtgggctatcctccattctgggatgaggaccagcatcgcctgtatcagcagatcaaggcaggcgcttatgatttcccctcccctgagtgggatactgtgacgccggaagccaaagatctcatcaacaagatgttgaccataaaccctagtaagcgaataactgcggcagaggccctgaaacatccttggattagtcataggagtacagtggcctcctgtatgcaccgccaagagacggttgactgcctcaagaaattcaatgcaaggaggaaactcaagggggctatcttaaccacaatgctcgctacccggaactttagcggtggtaagtcgggtggtaacaagaagtcagacggtgttaaagagtcatcagaatcaaccaacacgactatagaggacgaggatacaaaagttaggaagcaggaaataatcaaggtaacagagcagctcatcgaggctatttctaatggagattttgaatcctacacgaagatgtgcgatccaggcatgacagcattcgaacccgaggccctcggtaatctggttgaaggactggacttccatcgattttatttcgaaaacttgtggagcaggaatagcaagcccgtccacactaccatcttaaaccctcacatacacctgatgggcgacgagtccgcttgcattgcttatattaggatcacccagtatctcgacgcagggggaattccaaggacggcccagtctgaagaaaccagggtgtggcaccggcgagatgggaaatggcaaatcgtccactttcaccgctccggcgctcctagcgtgctgccacactag

SEQ ID NO: 247476 - DNA, 276 bp, Artificial Sequence
  derived and/or modified sequence
atggcaaccattacttgtacacgattcaccgaagaataccagctctttgaggagttaggaaaaggcgcattttccgtggtgcgtcggtgcgtcaaagtactggctggacaggagtacgccgctaagataattaacacaaaaaagctgagtgccagggaccaccagaagctggagcgcgaagcaagaatttgccgcttgctcaagcaccctaacatcgttagactccatgactccatctcagaagagggacatcactacctaattttcgacctgtag

SEQ ID NO: 247477 - DNA, 5322 bp, Artificial Sequence
  derived and/or modified sequence
tttccctgtaaaccttagaacccagctgttgccagggcaacggggcaatacctgtctctctagagatgaagttgccagggtaactgcatcctgtcattcgttcctggggaccatccggaatgcggcacccactggctgttaccatggcaactgcctttttgccccacttaatcccatcccgtctgctacaagggccccacagttggaggtgggggaggtgggaagagaaaagatcacttgtggacaaagtttgctctattccacctcctccaggccctccttgggtccatcaccccaggggtgctgggtccatcccacccccaggcccacacaggcttgcagtattgtgtgcggtatggtcagggcgtccgagagcaggtttcgcagtggaaggcaggcaggtgttggggaggcagttaccggggcaacgggaacagggcgttttggaggtggttgccatggggacctggatgctgacgaaggctcgcgaggctgtgagcagccacagtgccctgctcagaagccccgggctcgtcagtcaaaccggttctctgtttgcactcggcagcacgggcaggcaagtggtccctaggttcgggagcagagcagcagcgcctcagtcctggtcccccagtcccaagcctcacctgcctgcccagcgccaggatggccaccatcacctgcacccgcttcacggaagagtaccagctcttcgaggaattgggcaagggagccttctcggtggtgcgaaggtgtgtgaaggtgctggctggccaggagtatgctgccaagatcatcaacacaaagaagctgtcagccagagaccatcagaagctggagcgtgaagcccgcatctgccgcctgctgaagcaccccaacatcgtccgactacatgacagcatctcagaggagggacaccactacctgatcttcgacctggtcactggtggggaactgtttgaagatatcgtggcccgggagtattacagtgaggcggatgccagtcactgtatccagcagatcctggaggctgtgctgcactgccaccagatgggggtggtgcaccgggacctgaagcctgagaatctgttgctggcctccaagctcaagggtgccgcagtgaagctggcagactttggcctggccatagaggtggagggggagcagcaggcatggtttgggtttgcagggactcctggatatctctccccagaagtgctgcggaaggacccgtacgggaagcctgtggacctgtgggcttgtggggtcatcctgtacatcctgctggttgggtaccccccgttctgggatgaggaccagcaccgcctgtaccagcagatcaaagccggcgcctatgatttcccatcgccggaatgggacactgtcaccccggaagccaaggatctgatcaataagatgctgaccattaacccatccaaacgcatcacagctgccgaagcccttaagcacccctggatctcgcaccgctccaccgtggcatcctgcatgcacagacaggagaccgtggactgcctgaagaagttcaatgccaggaggaaactgaagggagccattctcaccacgatgctggccaccaggaacttctccggagggaagagtgggggaaacaagaagagcgatggtgtgaaggaatcctcagagagcaccaacaccaccatcgaggatgaagacaccaaagtgcggaaacaggaaattataaaagtgacagagcagctgattgaagccataagcaatggagattttgagtcctacacgaagatgtgcgaccctggcatgacagccttcgaacctgaggccctggggaacctggttgagggcctggacttccatcgattctattttgaaaacctgtggtcccggaacagcaagcccgtgcacaccaccatcctgaatccccacatccacctgatgggcgacgagtcagcctgcatcgcctacatccgcatcacgcagtacctggacgctggcggcatcccacgcaccgcccagtcggaggagacccgtgtctggcaccgccgggatggcaaatggcagatcgtccacttccacagatctggggcgccctccgtcctgccccactgagggaccaggctggggtcgctgcgttgctgtgccgcagagatccactctgtccgtggagtggagctgctggttctcccaggtggattttgctggaattctcccatgtcatcaccccaccaccgtcacttctgtacctgcatcaagaaaacctgcttgttcacaaaagtcatcgcaacttcagagcgaacggccacatctccccacctctcacccccaccctctcccctgccaggctggggcttcctcaggcatgggtgtccacagcactggccccctctccccagcctcagctgctgtccgcctgatctgtcttgggctgtaggctagaatgcccgggctggtgcccaccaggggctggggagaaggaggggtggcatgatgaggaaggcagcatccgtccgtccctctcccagacctctcctcttccagtgtccccggggaagggcagatgacactcccttccccctaagccaaccgcactgaaggagtggggagaagagcatacgccaggagcctcctgcctcaaagtgctcccctaagtcttcttcctcctgtgctgacctcagggtggtctgacccttccctcggtgtgggggatgtggccctctcaggtgcccctacttgctttctgcttccttctggtgaagtccacctccaacattaacctgcccaccccacccccgtcatccctggagaattccagctttgtcgtatctcagagagggaatctaattgtttttggggggcaaaagaaagcaacgtttaggtatcacttctacttggaccgcatgcctttttatagccaaatttctgtgtatttcgtaaatggatttcgcgttaatggatatttatgtaataactagacttctcagattattgtgagaagggtcaggttggaaggggtgtaggaagaggggtgaggggtagtttttttctgttctagtttttttttttttttttgtcatctctgaggtggaccttgtcacctgtggttattggggccaaggtggactcagctccggggagaagggcctctctgccatttcggtcccaaggtgagctgacacaggcgttccttttgggactgtggaagcatcagatgccagcactgactcaggaacagcaagtcagggcagagaggaggagggaggctgtcaggatggaaatacctggacttttctttgcttccctcgcaaactggggtcttctctaccgaacttcccaggatttcatctcaccatatctgtgtgccgcccccagcaccccccacccacctctggggggcccgtgagcgtgtgtcttcattgcctctctccccttggcgtctgatgaccacagcaaagcactgggaatttctactcttcatgcctcatcctgcagcctcgggttcgcattctctctttcttttcctctttccctctttccctgggattgactctgagtggaataccttggcacatccactaggatctactgtctgcactgttttctttgcatgactttatacgcagtaagtatgttgaaaacaaacaaaaagaagaaaacactcaacaaaaccaatctacatgttttggactaaaaaaaaaaatagaggttgtattctcagtgtccgactcggaattatgttgctgcctctctgtgcttttggcctctgtgtggccgtgttttgccagcatgagatactgtcccctctggaggattttaggggaggaagagccacgtccccagggattggaggaggctccggtaccctcgaccctcctgggtgttggttggagcagaactggtgaggatgtttgatccgagattttctgagctctccccaatcaccagctgtctgctgggttcttttctcaagtcctgctgcccaggcccaggtgagacaggcaacgccaggtctgcaggccaggagagatgctgcccaggcctcctggtttccaagctggtccatcactggcctctgtccttggcagagaccttgctgcccaggcccaggggcaggctcttggcctgccccaggcccagagggcttcccagtaaggcccagtgatcccattatcccaggggcaaaaccacctgtccccttttgagctgccagttccctacagccatccccagtcaagggtgagggtgtggccttcaccaggggctgctgtaattaccgagcaaggtctgagctcttcttcagcctcagttccctcattggttaaaagggttctttgttcccatccagccgatgaaggagcaaacgtctggctatgtgaagcctaatttacctgcaggaactggcagggatagtcactggctggactcctgtttacttctagacctggtcaggctccatcccctcccccacctgcccctgattcccctcgtcggtgcctgtcaactgcttttcagcagtggactgcaggggaaagagcagtgatttggggtgagtaggcttcaattcccagctctgaccagacttgctgtgtgaccttgggcaagttcctttccctctttggagcttggtttccctgccagaggaaactgagctggaggagcctgaggtcctgcctttcattggctgacacacctcctgtccactgtgtcactctccaagtgccagagaagtggaggcagatcgctaccccaggctgagatggcccccactgtgaaggccacgcctgtgggtgggcagccacctggtgccaccacagggcaccagggatgatcctgatgtggcaggcaggggagactcacagaaaaatctgcccagagcctaccctcaccagacaaactctgtgctcctccaaaacatcctttagatgcaaaataataataataataataataaataaataaataaaaatccaaacccaagtcaaaaccttggctccagcatgaaaacacgtttacaggaaagtgttctcctgggtttgtgcccaccatggtgcgaatcctgacccaaggcctcctgtctcccttcaaagggagacccttttgggggatgagtttgccagactccccgtgctggtttctttgttactatttgtttggggttttgttttagttctttttttttttcttttcttttttaaaaatatgtggctgtgaacttgaatgaacactgctcaaactttctgctattggggggggcgggtgggatgggaagaaggggcgtttgttttattcttggtgttttcagtgcaataaatagctacaaacttctgtgca

SEQ ID NO: 247478 - DNA, 540 bp, Artificial Sequence
  derived and/or modified sequence
aaaagatcacttgtggacaaagtttgctctattccacctcctccaggccctccttgggtccatcaccccaggggtgctgggtccatcccacccccaggcccacacaggcttgcagtattgtgtgcggtatggtcagggcgtccgagagcaggtttcgcagtggaaggcagcacgggcaggcaagtggtccctaggttcgggagcagagcagcagcgcctcagtcctggtcccccagtcccaagcctcacctgcctgcccagcgccaggatggccaccatcacctgcacccgcttcacggaagagtaccagctcttcgaggaattgggcaagggagccttctcggtggtgcgaaggtgtgtgaaggtgctggctggccaggagtatgctgccaagatcatcaacacaaagaagctgtcagccagagaccatcagaagctggagcgtgaagcccgcatctgccgcctgctgaagcaccccaacatcgtccgactacatgacagcatctcagaggagggacaccactacctgatcttcgacct

SEQ ID NO: 247479 - DNA, 1437 bp, Artificial Sequence
  derived and/or modified sequence
atggccaccatcacctgcaccagattcaccgaggagtaccagctgttcgaggagctgggcaagggcgccttcagcgtggtgagaagatgcgtgaaggtgctggccggccaggagtacgccgccaagatcatcaacaccaagaagctgagcgccagagaccaccagaagctggagagagaggccagaatctgcagactgctgaagcaccccaacatcgtgagactgcacgacagcatcagcgaggagggccaccactacctgatcttcgacctggtgaccggcggcgagctgttcgaggacatcgtggccagagagtactacagcgaggccgacgccagccactgcatccagcagatcctggaggccgtgctgcactgccaccagatgggcgtggtgcacagagacctgaagcccgagaacctgctgctggccagcaagctgaagggcgccgccgtgaagctggccgacttcggcctggccatcgaggtggagggcgagcagcaggcctggttcggcttcgccggcacccccggctacctgagccccgaggtgctgagaaaggacccctacggcaagcccgtggacctgtgggcctgcggcgtgatcctgtacatcctgctggtgggctacccccccttctgggacgaggaccagcacagactgtaccagcagatcaaggccggcgcctacgacttccccagccccgagtgggacaccgtgacccccgaggccaaggacctgatcaacaagatgctgaccatcaaccccagcaagagaatcaccgccgccgaggccctgaagcacccctggatcagccacagaagcaccgtggccagctgcatgcacagacaggagaccgtggactgcctgaagaagttcaacgccagaagaaagctgaagggcgccatcctgaccaccatgctggccaccagaaacttcagcggcggcaagagcggcggcaacaagaagagcgacggcgtgaaggagagcagcgagagcaccaacaccaccatcgaggacgaggacaccaaggtgagaaagcaggagatcatcaaggtgaccgagcagctgatcgaggccatcagcaacggcgacttcgagagctacaccaagatgtgcgaccccggcatgaccgccttcgagcccgaggccctgggcaacctggtggagggcctggacttccacagattctacttcgagaacctgtggagcagaaacagcaagcccgtgcacaccaccatcctgaacccccacatccacctgatgggcgacgagagcgcctgcatcgcctacatcagaatcacccagtacctggacgccggcggcatccccagaaccgcccagagcgaggagaccagagtgtggcacagaagagacggcaagtggcagatcgtgcacttccacagaagcggcgcccccagcgtgctgccccactag

SEQ ID NO: 247480 - DNA, 276 bp, Artificial Sequence
  derived and/or modified sequence
atggccaccatcacctgcaccagattcaccgaggagtaccagctgttcgaggagctgggcaagggcgccttcagcgtggtgagaagatgcgtgaaggtgctggccggccaggagtacgccgccaagatcatcaacaccaagaagctgagcgccagagaccaccagaagctggagagagaggccagaatctgcagactgctgaagcaccccaacatcgtgagactgcacgacagcatcagcgaggagggccaccactacctgatcttcgacctgtag

SEQ ID NO: 247481 - protein, 198 aa, Artificial Sequence
  derived and/or modified sequence
MALPVTALLLPLALLLHAARPSQFRVSPLDRTWNLGETVELKCQVLLSNPTSGCSWLFQPRGAAASPTFLLYLSQNKPKAAEGLDTQRFSGKRLGDTFVLTLSDFRRENEGYYFCSALSNSIMYFSHFVPVFLPAKPTTTPAPRPPTPAPTIASQPLSLRPEACRPAAGGAGNRRRVCKCPRPVVKSGDKPSLSARYV

SEQ ID NO: 247482 - DNA, 597 bp, Artificial Sequence
  derived and/or modified sequence
atggctttgccagttacagccctgttgctgcctctggcactactgctccatgccgcgagaccatcccaattccgggttagtccccttgaccggacctggaatctcggtgagaccgtggagctgaaatgtcaggtactgctgagcaacccaaccagtggctgttcatggctattccagccccgcggggccgcagcctctccgacttttctgctatacctttcccagaataaacccaaagccgccgaaggcctcgacacacagcgttttagtggcaaacgtctgggcgacacattcgttttgacactgtccgatttccgaagagaaaatgagggatattacttctgcagcgcactcagtaactccatcatgtacttctcacacttcgtgcctgtgttcctcccggctaagcctaccacaacacctgcccctcgccccccgacaccggcccccacaatcgcttcccaacctctgtccctccggcctgaggcttgcaggcccgctgccggcggcgcaggtaacaggaggcgcgtgtgcaagtgtccgaggcccgtggtcaaatccggagacaaaccaagtctgtctgctcggtacgtctag

SEQ ID NO: 247483 - DNA, 597 bp, Artificial Sequence
  derived and/or modified sequence
atggccctgcctgtcaccgcactcctgctgccattggccctactgctccatgcagcccggccctcacagtttcgcgtgagccccctggaccggacgtggaatctaggcgagactgtggagctgaagtgtcaggtgctgttgtccaatcccacaagcgggtgctcgtggctcttccagccgcgtggagccgccgcttccccaactttcctgctgtacctgtcgcagaataaacctaaggccgcagaggggctggatactcaaaggttctccgggaaacggctcggcgatacattcgtactgaccctgagtgattttcgccgcgagaacgagggatattacttctgtagcgccctttccaactcaattatgtacttctcccattttgttccggtgtttctccccgcaaaacccactactacacccgcccccagaccccctacccccgccccaactattgcttctcagcctctgagtctgcgaccagaagcttgtaggccagcggctggcggcgccgggaacagaaggagggtgtgtaaatgccctagaccggtagtcaagtctggagacaaaccctccctcagcgccaggtacgtttag

SEQ ID NO: 247484 - DNA, 597 bp, Artificial Sequence
  derived and/or modified sequence
atggccctgcctgtgacagccctgctgctgcccctggccctgctgctgcacgccgcccggcccagccagttccgggtgagccccctggacaggacctggaacctgggggagaccgtggagctgaagtgccaggtgctgctgagcaaccccaccagcggctgctcctggctgttccagcccagaggagctgctgccagccccaccttcctgctgtacctgagccagaacaagcccaaggctgctgagggcctggacacccagcgcttcagcggcaagaggctgggggacacctttgtgctgaccctgagtgacttccggcgggagaatgaaggctactacttctgcagcgccctgagcaacagcatcatgtacttcagccactttgtgcctgtgttcctgcctgccaagcccaccaccaccccagcccccaggcctcccaccccagcccccaccatcgccagccagcccctgagcctgcggcctgaggcctgcaggcctgctgctgggggcgccggcaacagaagaagagtgtgcaagtgccccaggcctgtggtgaagagcggggacaagcccagcctgagcgcccgctacgtgtag

SEQ ID NO: 247485 - DNA, 597 bp, Artificial Sequence
  derived and/or modified sequence
atggccctgcccgtgaccgccctgctgctgcccctggccctgctgctccacgccgcccgaccaagccagtttcgggttagcccgctggaccgaacctggaatttgggagagacagtggaactaaaatgccaggtcctgctttctaaccccacaagcggttgttcttggctttttcagcctaggggtgcggctgcatcgccaacatttctgctttacttaagtcagaataaaccaaaggctgccgaagggctagacacacagcggttctcaggaaaaaggttaggtgacacttttgttctcacacttagcgacttcaggcgggagaatgaaggctattatttttgttccgccctgagcaacagcattatgtactttagccatttcgtccccgtctttctccccgccaagcccaccaccactccagctcccaggcctccaaccccagccccaacaatcgcttcccagcctctttcattacgcccggaagcttgcagacccgccgccggcggcgccggcaacagaagacgggtttgcaaatgtccaaggcctgtcgtgaaaagcggcgataaaccaagcctgagtgcccgctatgtgtag

SEQ ID NO: 247486 - DNA, 597 bp, Artificial Sequence
  derived and/or modified sequence
atggccctgcccgtgaccgccctgctgctgcccctggccctgctgctgcacgccgcccgccccagccaatttcgagtctcaccactcgaccggacgtggaacctcggagaaactgttgaactgaagtgtcaggtgctactgtctaaccctaccagcggctgttcttggctgttccagcccagaggagcagcagcctcccctacgtttctgctgtacttatcccaaaacaagccaaaagcagcagagggcctggacacccaacgctttagcggcaaacggctgggagacacgttcgttcttactctgagcgatttccgcagggagaatgaaggttactacttttgttcggccctctccaatagcattatgtatttcagtcatttcgtgcccgtatttttacccgctaagccaacaacaacacccgctcctcgccctcctacaccggctccaacaatcgctagccagccgctgagtctccggcctgaggcatgccggcccgctgccggcggagcagggaacaggcggagggtgtgcaagtgcccacggcctgtggtcaagtcgggagacaagcccagtctttctgcgagatatgtatag

SEQ ID NO: 247487 - DNA, 597 bp, Artificial Sequence
  derived and/or modified sequence
atggcgctcccagtgaccgccttgctgctgcctctcgctctgctgctgcacgcggcacggccttcccagtttagggtgtccccgctcgaccgcacgtggaacctcggagagacggttgagctgaaatgtcaggtcctgcttagtaatcctacctctggctgttcctggctgttccagcctcgcggagccgcagcttcgccaactttccttctgtatctcagtcagaacaagcctaaagccgcagagggtctcgatacacagcgatttagcggtaaacgcttgggagatacctttgtcctgacccttagcgactttcgacgagaaaacgaggggtattacttttgcagcgccctgagcaattctataatgtatttctcacactttgttcctgtgttcctccctgcgaaaccgactacaacccccgctcccagaccacctaccccagctccgactatcgcttcccagccgctgagcctgaggccagaggcctgtcgaccggctgccggtggggctggaaacagacgcagggtgtgtaaatgccctcgacccgtagtcaagtctggcgataaaccatcactatccgcccgttacgtttag

SEQ ID NO: 247488 - DNA, 597 bp, Artificial Sequence
  derived and/or modified sequence
atggctctgcccgtgaccgcgcttctgctgcccctagcattattgctccacgctgcacgtccatcccaatttcgtgtcagcccgcttgacaggacatggaatcttggcgaaacagtggagctcaagtgtcaagttctcctgagtaacccaacgtctggctgtagttggttattccagcccaggggcgctgctgcctcgcctactttcctgctctatcttagtcagaacaagccaaaggctgccgaagggctcgatacccagcgcttctctggaaaacgactgggtgacacatttgtccttactctttcggactttcgtcgggaaaacgagggctattacttctgctctgcactctcaaacagtatcatgtacttcagtcacttcgtccccgtgtttctgccagctaagcctactaccacccctgcaccgaggccacctacaccagctccaacgatcgctagtcagcccctatccctccgccctgaggcttgccgcccagccgctggaggagctggcaatcggcgtcgtgtttgcaaatgccctcggcctgtcgttaagtccggggacaagccaagcctgagcgctcgttacgtttag

SEQ ID NO: 247489 - DNA, 1977 bp, Artificial Sequence
  derived and/or modified sequence
ccccaccggctcccgcgcgcctcccctcgcgcccgagcttcgagccaagcagcgtcctggggagcgcgtcatggccttaccagtgaccgccttgctcctgccgctggccttgctgctccacgccgccaggccgagccagttccgggtgtcgccgctggatcggacctggaacctgggcgagacagtggagctgaagtgccaggtgctgctgtccaacccgacgtcgggctgctcgtggctcttccagccgcgcggcgccgccgccagtcccaccttcctcctatacctctcccaaaacaagcccaaggcggccgaggggctggacacccagcggttctcgggcaagaggttgggggacaccttcgtcctcaccctgagcgacttccgccgagagaacgagggctactatttctgctcggccctgagcaactccatcatgtacttcagccacttcgtgccggtcttcctgccagcgaagcccaccacgacgccagcgccgcgaccaccaacaccggcgcccaccatcgcgtcgcagcccctgtccctgcgcccagaggcgtgccggccagcggcggggggcgcagggaaccgaagacgtgtttgcaaatgtccccggcctgtggtcaaatcgggagacaagcccagcctttcggcgagatacgtctaaccctgtgcaacagccactacattacttcaaactgagatccttccttttgagggagcaagtccttccctttcattttttccagtcttcctccctgtgtattcattctcatgattattattttagtgggggcggggtgggaaagattactttttctttatgtgtttgacgggaaacaaaactaggtaaaatctacagtacaccacaagggtcacaatactgttgtgcgcacatcgcggtagggcgtggaaaggggcaggccagagctacccgcagagttctcagaatcatgctgagagagctggaggcacccatgccatctcaacctcttccccgcccgttttacaaagggggaggctaaagcccagagacagcttgatcaaaggcacacagcaagtcagggttggagcagtagctggagggaccttgtctcccagctcagggctctttcctccacaccattcaggtctttctttccgaggcccctgtctcagggtgaggtgcttgagtctccaacggcaagggaacaagtacttcttgatacctgggatactgtgcccagagcctcgaggaggtaatgaattaaagaagagaactgcctttggcagagttctataatgtaaacaatatcagactttttttttttataatcaagcctaaaattgtatagacctaaaataaaatgaagtggtgagcttaaccctggaaaatgaatccctctatctctaaagaaaatctctgtgaaacccctatgtggaggcggaattgctctcccagcccttgcattgcagaggggcccatgaaagaggacaggctacccctttacaaatagaatttgagcatcagtgaggttaaactaaggccctcttgaatctctgaatttgagatacaaacatgttcctgggatcactgatgactttttatactttgtaaagacaattgttggagagcccctcacacagccctggcctctgctcaactagcagatacagggatgaggcagacctgactctcttaaggaggctgagagcccaaactgctgtcccaaacatgcacttccttgcttaaggtatggtacaagcaatgcctgcccattggagagaaaaaacttaagtagataaggaaataagaaccactcataattcttcaccttaggaataatctcctgttaatatggtgtacattcttcctgattattttctacacatacatgtaaaatatgtctttcttttttaaatagggttgtactatgctgttatgagtggctttaatgaataaacatttgtagcatcctctttaatgggtaaacagca

SEQ ID NO: 247490 - DNA, 2942 bp, Artificial Sequence
  derived and/or modified sequence
ctctgtaaaataaatgcgctgggccggatcttttctgagttctcttctcccctacgaattctagatccctcctctgtcctccctgcgccagggaccttcgggcgacccttccctgtacccccaccccaccctctctggaccccgtttctgcctcagtacggcgcgctgagctctgccccctgcccaggccctgaccccctcaggagccgcggtttcctggggtaacagtgggaaacgtgtcggccgtctccgctcaggcgcttgctgtgtacagaaaggctgattcaggcacaccggctctcgtcgccttggtggccctccccagccctcctccgcgcctgctccgggtggcgctccgctgggctcctcgtgcgcctgtccgcgaccgcacccacctcatcctggcacccccatcgtggcatcacgtgttccctcatctgtcctcatggctggcgtgcccctctgcggtgagacctgcagaacaggaattggtgccgggtcagcagccggcgatgaagccggacgaagcctgcaaaccccacccatacgccagcttcacatagctcctatccattgcacagcagcgtggggaagcaccgttctctaccctccaaacaaaagcatgaaccaggtgcagtggctcacgtctgtaatcccagcattttggaggccaaggtggatggatggattccttgagtccaggagttcaagaccagcctgggcaacatggtgaacccccatctctacaaaaatttagccagttttcagctgcccccagttgcctggccaggctgcctcgacggccctattcacgggccccagcctcctcgccgggctggaaggcgacaaccgcgaaaaggagggtgactctcctcggcgggggcttcgggtgacatcacatcctccaaatgcgaaatcaggctccgggccggccgaagggcgcaactttcccccctcggcgccccaccggctcccgcgcgcctcccctcgcgcccgagcttcgagccaagcagcgtcctggggagcgcgtcatggccttaccagtgaccgccttgctcctgccgctggccttgctgctccacgccgccaggccgagccagttccgggtgtcgccgctggatcggacctggaacctgggcgagacagtggagctgaagtgccaggtgctgctgtccaacccgacgtcgggctgctcgtggctcttccagccgcgcggcgccgccgccagtcccaccttcctcctatacctctcccaaaacaagcccaaggcggccgaggggctggacacccagcggttctcgggcaagaggttgggggacaccttcgtcctcaccctgagcgacttccgccgagagaacgagggctactatttctgctcggccctgagcaactccatcatgtacttcagccacttcgtgccggtcttcctgccagcgaagcccaccacgacgccagcgccgcgaccaccaacaccggcgcccaccatcgcgtcgcagcccctgtccctgcgcccagaggcgtgccggccagcggcggggggcgcagggaaccgaagacgtgtttgcaaatgtccccggcctgtggtcaaatcgggagacaagcccagcctttcggcgagatacgtctaaccctgtgcaacagccactacattacttcaaactgagatccttccttttgagggagcaagtccttccctttcattttttccagtcttcctccctgtgtattcattctcatgattattattttagtgggggcggggtgggaaagattactttttctttatgtgtttgacgggaaacaaaactaggtaaaatctacagtacaccacaagggtcacaatactgttgtgcgcacatcgcggtagggcgtggaaaggggcaggccagagctacccgcagagttctcagaatcatgctgagagagctggaggcacccatgccatctcaacctcttccccgcccgttttacaaagggggaggctaaagcccagagacagcttgatcaaaggcacacagcaagtcagggttggagcagtagctggagggaccttgtctcccagctcagggctctttcctccacaccattcaggtctttctttccgaggcccctgtctcagggtgaggtgcttgagtctccaacggcaagggaacaagtacttcttgatacctgggatactgtgcccagagcctcgaggaggtaatgaattaaagaagagaactgcctttggcagagttctataatgtaaacaatatcagactttttttttttataatcaagcctaaaattgtatagacctaaaataaaatgaagtggtgagcttaaccctggaaaatgaatccctctatctctaaagaaaatctctgtgaaacccctatgtggaggcggaattgctctcccagcccttgcattgcagaggggcccatgaaagaggacaggctacccctttacaaatagaatttgagcatcagtgaggttaaactaaggccctcttgaatctctgaatttgagatacaaacatgttcctgggatcactgatgactttttatactttgtaaagacaattgttggagagcccctcacacagccctggcctctgctcaactagcagatacagggatgaggcagacctgactctcttaaggaggctgagagcccaaactgctgtcccaaacatgcacttccttgcttaaggtatggtacaagcaatgcctgcccattggagagaaaaaacttaagtagataaggaaataagaaccactcataattcttcaccttaggaataatctcctgttaatatggtgtacattcttcctgattattttctacacatacatgtaaaatatgtctttcttttttaaatagggttgtactatgctgttatgagtggctttaatgaataaacatttgtagcatcctctttaatgggtaaacagcatccg

SEQ ID NO: 247491 - DNA, 597 bp, Artificial Sequence
  derived and/or modified sequence
atggccctgcccgtgaccgccctgctgctgcccctggccctgctgctgcacgccgccagacccagccagttcagagtgagccccctggacagaacctggaacctgggcgagaccgtggagctgaagtgccaggtgctgctgagcaaccccaccagcggctgcagctggctgttccagcccagaggcgccgccgccagccccaccttcctgctgtacctgagccagaacaagcccaaggccgccgagggcctggacacccagagattcagcggcaagagactgggcgacaccttcgtgctgaccctgagcgacttcagaagagagaacgagggctactacttctgcagcgccctgagcaacagcatcatgtacttcagccacttcgtgcccgtgttcctgcccgccaagcccaccaccacccccgcccccagaccccccacccccgcccccaccatcgccagccagcccctgagcctgagacccgaggcctgcagacccgccgccggcggcgccggcaacagaagaagagtgtgcaagtgccccagacccgtggtgaagagcggcgacaagcccagcctgagcgccagatacgtgtag

SEQ ID NO: 247492 - protein, 277 aa, Artificial Sequence
  derived and/or modified sequence
MQPFSIPVQITLQGSRRRQGRTAFPASGKKRETDYSDGDPLDVHKRLPSSAGEDRAVMLGFAMMGFSVLMFFLLGTTILKPFMLSIQREESTCTAIHTDIMDDWLDCAFTCGVHCHGQGKYPCLQVFVNLSHPGQKALLHYNEEAVQINPKCFYTPKCHQDRNDLLNSALDIKEFFDHKNGTPFSCFYSPASQSEDVILIKKYDQMAIFHCLFWPSLTLLGGALIVGMVRLTQHLSLLCEKYSTVVRDEVGGKVPYIEQHQFKLCIMRRSKGRAEKS

SEQ ID NO: 247493 - DNA, 834 bp, Artificial Sequence
  derived and/or modified sequence
atgcaacctttttctattcctgtccaaattacgcttcagggatccagacggcgtcagggcagaacagcttttccagcctccggcaagaaacgggagaccgactattcagacggagacccactggatgtgcataagcggcttccctcctctgccggcgaagatcgagccgtcatgctgggctttgccatgatgggattctctgtgctgatgttcttcctgcttggaactactatcctgaaacctttcatgctctccatccagagagaagagagtacatgtaccgccattcacacggatattatggatgactggctggattgcgcgttcacgtgcggcgttcactgccacggccagggcaagtacccatgtctgcaggtttttgtgaacctgtcccacccgggccaaaaggctctcctccactacaatgaggaagccgttcagatcaatcccaagtgcttttatactcctaagtgtcaccaggatcgaaatgacctgttgaacagcgcgcttgatatcaaggaattctttgaccataaaaacgggactccctttagttgcttttactctccagcttctcagtccgaagatgtgattctcattaagaagtacgatcagatggccattttccactgcctattttggccttcattaaccttgctgggcggtgccctgatcgttggcatggtgaggttgactcagcatctctcgcttctgtgcgagaaatatagcaccgttgtcagagacgaggtcggaggaaaggtgccatatattgagcaacatcaatttaaactttgtatcatgcgccgaagcaagggcagggccgaaaaatcctag

SEQ ID NO: 247494 - DNA, 834 bp, Artificial Sequence
  derived and/or modified sequence
atgcagcccttcagcatccctgtgcagatcaccctgcagggcagcagaagacggcagggccgcacagccttccctgccagcggcaagaagcgggagacagactacagtgatggagaccccctggatgtgcacaagaggctgcccagcagcgctggagaagatagagctgtgatgctgggctttgccatgatgggcttctctgtgctgatgttcttcctgctgggcaccaccatcctgaagcccttcatgctgagcatccagcgggaggagagcacctgcacagccatccacacagacatcatggatgactggctggactgtgccttcacctgtggggtgcactgccacggccagggcaagtacccctgcctgcaggtgtttgtgaacctgagccaccctggccagaaggccctgctgcactacaatgaggaggccgtgcagatcaaccccaagtgcttctacacccccaagtgccaccaggacagaaatgacctgctgaacagcgccctggacatcaaggagttctttgaccacaagaatggcacccccttcagctgcttctacagccctgccagccagagtgaagatgtgatcctgatcaagaagtatgaccagatggccatcttccactgcctcttctggcccagcctgaccctgctgggcggggccctgattgtgggcatggtgcggctgacccagcacctgagcctgctgtgtgagaagtacagcacagtggtgagagatgaggtgggcggcaaggtgccctacatcgagcagcaccagttcaagctgtgcatcatgaggaggagcaagggccgggcagagaagagctag

SEQ ID NO: 247495 - DNA, 834 bp, Artificial Sequence
  derived and/or modified sequence
atgcagcccttcagcatccccgtgcagatcaccctgcagggcagcagacggagacaagggagaaccgcgtttccagccagtgggaaaaaacgggaaactgactatagtgatggcgacccactggacgtgcacaagagactcccctcctcagcaggagaggacagggccgtcatgctgggctttgcaatgatggggttctcagtcctgatgttttttttattagggaccactatattaaagccgtttatgttgagcatccagcgggaagagtcaacttgcaccgctatccacaccgacatcatggatgattggctggactgcgccttcacatgtggagtccattgtcatggccaggggaaatatccgtgcctgcaggtttttgtgaacctcagtcaccccggtcagaaagctctgctgcactataatgaagaggccgtccaaattaaccccaagtgtttctacactcccaagtgccaccaggacagaaatgatttgttgaattccgcgcttgatatcaaagagtttttcgaccacaagaacggcactcccttttcctgtttttacagccctgccagccaatccgaagatgtgatccttattaaaaagtatgaccaaatggcaattttccactgcttgttttggccatccctgactctccttgggggggccctaatcgttgggatggtgcgactcactcagcacctgtctctgctgtgcgagaagtattctacagttgtgcgcgatgaggtgggcgggaaggtgccttacattgaacaacatcagtttaaactgtgcatcatgaggagatccaaggggagagctgaaaagtcatag

SEQ ID NO: 247496 - DNA, 1228 bp, Artificial Sequence
  derived and/or modified sequence
gcagcaaaccacgcaggtccttcttgatcatctagaactgaccgctccgccttgccaggagtctgcagaaccacgtggctagcctgcctgaagttctcacctctccaggaaggcggggggcttctaatggctgcagctgcgctgggggctgggggctcccgctgggactccacttccgtggatgtctaagcttcacctttcttgcgcccgcaggggcatgactcaggtgaaagggagccattttctcagacccctggcctcatgcagcccttcagcatccccgtgcaaatcacacttcagggcagccggaggcgccaggggaggacagcctttcctgcctcagggaagaagagagagacagactacagtgatggagacccactagatgtgcacaagaggctgccatccagtgctggagaggaccgagccgtgatgctggggtttgccatgatgggcttctcagtcctaatgttcttcttgctcggaacaaccattctaaagccttttatgctcagcattcagagagaagaatcgacctgcactgccatccacacagatatcatggacgactggctggactgtgccttcacctgtggtgtgcactgccacggtcaggggaagtacccgtgtcttcaggtgtttgtgaacctcagccatccaggtcagaaagctctcctacattataatgaagaggctgtccagataaatcccaagtgcttttacacacctaagtgccaccaagatagaaatgatttgctcaacagtgctctggacataaaagaattcttcgatcacaaaaatggaacccccttttcatgcttctacagtccagccagccaatctgaagatgtcattcttataaaaaagtatgaccaaatggctatcttccactgtttattttggccttcactgactctgctaggtggtgccctgattgttggcatggtgagattaacacaacacctgtccttactgtgtgaaaaatatagcactgtagtcagagatgaggtaggtggaaaagtaccttatatagaacagcatcagttcaaactgtgcattatgaggaggagcaaaggaagagcagagaaatcttaagacggtggccaaattaaagtgctggccttcagatgtctgtgatttctgcaactgaggacctaattatgcctgtctgcaaactaataatgtaaaaggtaataattaaagtatcatattttcatgtgggaaaaaa

SEQ ID NO: 247497 - DNA, 834 bp, Artificial Sequence
  derived and/or modified sequence
atgcagcccttctctatccctgttcagatcaccctccaggggagccgtcgtagacaggggcgtaccgcgttcccagcgagtggcaaaaaacgcgagaccgattattctgacggcgacccactggacgtccataaacgactgccatcgtcagccggagaggatagagctgtgatgttagggttcgccatgatgggcttcagcgtgctgatgttctttctgctgggaaccaccattctgaaaccgttcatgctttctatccagcgcgaggaaagcacctgcacagccattcataccgacatcatggacgactggctggactgcgcgttcacctgtggggttcactgtcacggccaggggaaatacccttgcttgcaagttttcgtcaacctctcccaccccggacaaaaagccctgctccattataacgaggaagctgtgcagataaatcctaagtgcttttatacccccaagtgccaccaggatcgcaatgacctactcaactcggcccttgatattaaagagttcttcgatcataagaacgggactccattttcgtgcttctacagccccgcaagccagtccgaggatgtaatactcatcaaaaaatatgatcaaatggctatattccattgtctcttctggccttccctgacccttctgggcggagcactgatcgtcggaatggtgcgcctgactcagcatttatccctgttatgcgagaagtactccacggtggtgagggatgaggttgggggaaaggtgccttatatagagcagcaccagttcaaactgtgcatcatgcgcagaagcaagggacgagcagagaaatcatag

SEQ ID NO: 247498 - DNA, 834 bp, Artificial Sequence
  derived and/or modified sequence
atgcagcccttcagcatccccgtgcagatcaccctgcagggcagcagaagaagacagggcagaaccgccttccccgccagcggcaagaagagagagaccgactacagcgacggcgaccccctggacgtgcacaagagactgcccagcagcgccggcgaggacagagccgtgatgctgggcttcgccatgatgggcttcagcgtgctgatgttcttcctgctgggcaccaccatcctgaagcccttcatgctgagcatccagagagaggagagcacctgcaccgccatccacaccgacatcatggacgactggctggactgcgccttcacctgcggcgtgcactgccacggccagggcaagtacccctgcctgcaggtgttcgtgaacctgagccaccccggccagaaggccctgctgcactacaacgaggaggccgtgcagatcaaccccaagtgcttctacacccccaagtgccaccaggacagaaacgacctgctgaacagcgccctggacatcaaggagttcttcgaccacaagaacggcacccccttcagctgcttctacagccccgccagccagagcgaggacgtgatcctgatcaagaagtacgaccagatggccatcttccactgcctgttctggcccagcctgaccctgctgggcggcgccctgatcgtgggcatggtgagactgacccagcacctgagcctgctgtgcgagaagtacagcaccgtggtgagagacgaggtgggcggcaaggtgccctacatcgagcagcaccagttcaagctgtgcatcatgagaagaagcaagggcagagccgagaagagctag

SEQ ID NO: 247499 - protein, 257 aa, Artificial Sequence
  derived and/or modified sequence
MTAFPASGKKRETDYSDGDPLDVHKRLPSSAGEDRAVMLGFAMMGFSVLMFFLLGTTILKPFMLSIQREESTCTAIHTDIMDDWLDCAFTCGVHCHGQGKYPCLQVFVNLSHPGQKALLHYNEEAVQINPKCFYTPKCHQDRNDLLNSALDIKEFFDHKNGTPFSCFYSPASQSEDVILIKKYDQMAIFHCLFWPSLTLLGGALIVGMVRLTQHLSLLCEKYSTVVRDEVGGKVPYIEQHQFKLCIMRRSKGRAEKS

SEQ ID NO: 247500 - DNA, 774 bp, Artificial Sequence
  derived and/or modified sequence
atgaccgcctttcctgccagcggaaaaaagcgggagactgattattccgacggagacccactggacgttcataagaggcttccttctagcgccggcgaggatcgggctgtgatgctgggattcgctatgatgggattctctgtgcttatgttttttctgctgggcacaacaattttgaagcccttcatgctctccattcagagggaggagtccacatgcactgcgattcacaccgatattatggatgactggctggattgtgcgtttacatgtggggtccactgtcatggccaaggaaaatacccatgtctccaggtttttgtgaaccttagccaccctggccaaaaggcactgctccactacaatgaggaagctgtccaaatcaatcctaagtgtttttacacaccaaagtgtcaccaggataggaacgatctgctcaacagtgccctggacatcaaagagttttttgaccacaagaatggcaccccatttagctgtttttattcgccagcctcccaatcagaagatgttattttgattaagaaatatgaccagatggccatctttcactgtctcttctggccctcgctgaccctactgggaggcgcgctgatcgtggggatggtccgcctgacacagcacctctctttactgtgtgagaagtattccactgtagtcagagatgaagtaggcgggaaggtgccttacattgaacagcatcagttcaagctatgcattatgcgccgaagcaaaggccgggccgagaaatcctag

SEQ ID NO: 247501 - DNA, 774 bp, Artificial Sequence
  derived and/or modified sequence
atgaccgcctttcccgctagcgggaagaagagagagactgattattccgacggggatccacttgatgttcacaagagactaccctccagtgccggagaggaccgggcagtcatgctcggatttgccatgatggggttctctgtgttaatgttttttttgctgggcaccaccatcctgaaaccttttatgctcagtatccagcgagaggaaagtacgtgtaccgctattcacactgacatcatggatgactggctagattgcgcctttacatgcggcgttcactgtcatgggcagggcaagtacccctgtcttcaggtttttgtgaacttgtcccatcctgggcagaaagcgttactccattataacgaagaggccgtccagatcaatcccaaatgcttctacacacctaagtgtcaccaagacaggaatgatctcctgaatagcgcactagatatcaaggaatttttcgatcacaaaaacgggaccccatttagctgcttttacagcccagcctcacagtccgaggatgttatcctcatcaaaaaatatgaccagatggccattttccactgcctattctggccatcccttactttactgggaggcgcactcatcgtggggatggtgcgtctgacacagcatctttctctgctgtgcgaaaaatatagtaccgttgtgcgcgacgaggttggcgggaaagtaccttatattgagcagcatcagttcaagctgtgtatcatgaggagatcgaaaggcagggccgaaaagtcatag

SEQ ID NO: 247502 - DNA, 774 bp, Artificial Sequence
  derived and/or modified sequence
atgacagccttccctgccagcggcaagaagcgggagacagactacagtgatggagaccccctggatgtgcacaagaggctgcccagcagcgctggagaagatagagctgtgatgctgggctttgccatgatgggcttctctgtgctgatgttcttcctgctgggcaccaccatcctgaagcccttcatgctgagcatccagcgggaggagagcacctgcacagccatccacacagacatcatggatgactggctggactgtgccttcacctgtggggtgcactgccacggccagggcaagtacccctgcctgcaggtgtttgtgaacctgagccaccctggccagaaggccctgctgcactacaatgaggaggccgtgcagatcaaccccaagtgcttctacacccccaagtgccaccaggacagaaatgacctgctgaacagcgccctggacatcaaggagttctttgaccacaagaatggcacccccttcagctgcttctacagccctgccagccagagtgaagatgtgatcctgatcaagaagtatgaccagatggccatcttccactgcctcttctggcccagcctgaccctgctgggcggggccctgattgtgggcatggtgcggctgacccagcacctgagcctgctgtgtgagaagtacagcacagtggtgagagatgaggtgggcggcaaggtgccctacatcgagcagcaccagttcaagctgtgcatcatgaggaggagcaagggccgggcagagaagagctag

SEQ ID NO: 247503 - DNA, 774 bp, Artificial Sequence
  derived and/or modified sequence
atgaccgccttccccgccagcggcaagaagcgggagaccgactactcggatggtgatcccctcgatgtgcacaagagattgccctcctctgccggagaggacagagcggttatgctgggatttgccatgatgggtttctctgtgttaatgtttttcctgctgggaactactatcctgaaaccctttatgctgtccattcagcgcgaagagagcacttgtacggccattcacaccgacataatggacgattggctggactgtgcatttacctgtggcgtgcattgccatgggcagggtaaatatccctgcttgcaggtgtttgttaatctaagccatccaggtcagaaagcattgctccattataatgaagaggccgtgcaaattaatcctaagtgcttttacacccccaagtgccaccaggataggaacgacctgcttaactctgcccttgatatcaaagagttttttgatcacaagaatggcacgccatttagctgtttctatagcccggccagccagagtgaggatgtaatactgataaaaaagtatgaccagatggctatcttccattgcctgttctggccctcgctgaccctgcttggcggcgcattgattgtggggatggttcgactgacccaacacttgtctttgctgtgcgagaaatacagcacggtggttcgggacgaggttggcgggaaggttccatatatcgaacagcatcagtttaaactctgcatcatgaggcgcagcaaaggacgagccgagaaaagctag

SEQ ID NO: 247504 - DNA, 774 bp, Artificial Sequence
  derived and/or modified sequence
atgaccgccttccccgccagcggcaagaagcgggagaccgactactccgatggggacccactggacgtccataaacgactgccctctagcgcaggggaggatcgtgcagtgatgctgggctttgctatgatgggcttctcagttctcatgttttttctgctgggtacgactatcctgaaaccattcatgctgtcgattcaaagggaagagtctacttgtaccgctatccacaccgacataatggatgactggctcgactgcgcctttacctgtggtgtccattgccacggccaaggaaaatatccgtgcctacaggtcttcgtgaatctctcacaccccggccaaaaagccctccttcactataacgaggaggctgtccagataaacccaaaatgcttctacaccccaaaatgccaccaggaccgaaatgatctattaaatagcgctttggacatcaaagagtttttcgaccataagaacggcactccatttagctgcttctattccccggcatcccagtcggaggacgtgatactcatcaaaaaatatgatcaaatggctatctttcattgcctgttttggccctctctgactctgctgggtggggctcttatcgtgggaatggtgcggctgacccagcacctctcactcttgtgcgaaaaatattccacagtggttcgcgatgaagtaggtgggaaggtgccttacattgagcagcaccagttcaagctgtgcataatgcgacgatctaagggacgggctgaaaagagctag

SEQ ID NO: 247505 - DNA, 2055 bp, Artificial Sequence
  derived and/or modified sequence
gttcctggttctccagcaggaactgagagcaagggtcaggaggcgacaggtccaagtacagtagacactcaaagtgaaccctcagatatgaaagagccagatgaagaaaagaatgaccaacagggagaggcattggactcattgcagaagagaaagaacaagaaaaagaaaaagaagaggaaaaaatccccagtacccatagaaacccttaaagatgtttaaaaagagttaacttatcagaacacagatttaagtgaaattaaggaagaagagcaggtaaagtctactgacagaaagtcagcagtggaagcccaaaacgaggtgactgaaaatccaaaacagaaaattgcagcagaaagcagtgaaaatgttgattgtccagagaatcctaaaatgaagttggatggaaaacttgaccaagaaggcaatgatgtaaaaacagcagctgaggaggtactagctggtagagacacattagattttgaggatgtcacagttcaatcatcaggcccgagggctggtggtgaagaattagatgaaggtgttgcaaaagataatgctaaaatagctggtgccacttaaagcaatcctgaagaaccagagagcgaagatgcagatcactgcaccgtacccaaaaatgaaagtccctcacaggacattagtgatgcctgtgaagcagaaagtacagagaggtgtgggatgtcagaacatccaagtcagaccatcaggaaagctttagacagcaatagcctaaaaaaccatgacttgttggcaccaggaggagagccgggggacttcaatccagaaagcagagaagataccagaggagggaacgagaagggcaaaagcaaagaagaccgtaccatgtcctaagctgaggcaggcggcaggcgtggtgcacaggaagtctgagtgtgaggggctcttttctctccactgccaatgacagcctttcctgcctcagggaagaagagagagacagactacagtgatggagacccactagatgtgcacaagaggctgccatccagtgctggagaggaccgagccgtgatgctggggtttgccatgatgggcttctcagtcctaatgttcttcttgctcggaacaaccattctaaagccttttatgctcagcattcagagagaagaatcgacctgcactgccatccacacagatatcatggacgactggctggactgtgccttcacctgtggtgtgcactgccacggtcaggggaagtacccgtgtcttcaggtgtttgtgaacctcagccatccaggtcagaaagctctcctacattataatgaagaggctgtccagataaatcccaagtgcttttacacacctaagtgccaccaagatagaaatgatttgctcaacagtgctctggacataaaagaattcttcgatcacaaaaatggaacccccttttcatgcttctacagtccagccagccaatctgaagatgtcattcttataaaaaagtatgaccaaatggctatcttccactgtttattttggccttcactgactctgctaggtggtgccctgattgttggcatggtgagattaacacaacacctgtccttactgtgtgaaaaatatagcactgtagtcagagatgaggtaggtggaaaagtaccttatatagaacagcatcagttcaaactgtgcattatgaggaggagcaaaggaagagcagagaaatcttaagacggtggccaaattaaagtgctggccttcagatgtctgtgatttctgcaactgaggacctaattatgcctgtctgcaaactaataatgtaaaagcgtgatgttacagactgcagagttaaagaaaagcagacattgacagtttctgatgagcataaacagtaagtgcagtcacaggccaaacttcttgctaggaacagcaagactgggaagaggtcttaaatttagtgatactgttattattctatattctcaatatagtaacacatgcatcttgctgtgtcaaatgctttctgggccatcattaaaaggacattaaaaacgtttttcttctaatgaa

SEQ ID NO: 247506 - DNA, 1159 bp, Artificial Sequence
  derived and/or modified sequence
tacagagaggtgtgggatgtcagaacatccaagtcagaccatcaggaaagctttagacagcaatagcctaaaaaaccatgacttgttggcaccaggaggagagccgggggacttcaatccagaaagcagagaagataccagaggagggaacgagaagggcaaaagcaaagaagaccgtaccatgtcctaagctgaggcaggcggcaggcgtggtgcacaggaagtctgagtgtgaggggctcttttctctccactgccaatgacagcctttcctgcctcagggaagaagagagagacagactacagtgatggagacccactagatgtgcacaagaggctgccatccagtgctggagaggaccgagccgtgatgctggggtttgccatgatgggcttctcagtcctaatgttcttcttgctcggaacaaccattctaaagccttttatgctcagcattcagagagaagaatcgacctgcactgccatccacacagatatcatggacgactggctggactgtgccttcacctgtggtgtgcactgccacggtcaggggaagtacccgtgtcttcaggtgtttgtgaacctcagccatccaggtcagaaagctctcctacattataatgaagaggctgtccagataaatcccaagtgcttttacacacctaagtgccaccaagatagaaatgatttgctcaacagtgctctggacataaaagaattcttcgatcacaaaaatggaacccccttttcatgcttctacagtccagccagccaatctgaagatgtcattcttataaaaaagtatgaccaaatggctatcttccactgtttattttggccttcactgactctgctaggtggtgccctgattgttggcatggtgagattaacacaacacctgtccttactgtgtgaaaaatatagcactgtagtcagagatgaggtaggtggaaaagtaccttatatagaacagcatcagttcaaactgtgcattatgaggaggagcaaaggaagagcagagaaatcttaagacggtggccaaattaaagtgctggccttcagatgtctgtgatttctgcaactgaggacctaattatgcctgtctgcaaactaataatgtaaaaggtaataattaaagtatcatattttcatgtgg

SEQ ID NO: 247507 - DNA, 774 bp, Artificial Sequence
  derived and/or modified sequence
atgacagcatttccagcctctggaaagaaaagagagactgactactcagacggggaccctctggatgtacacaagcggttacccagcagtgctggggaagaccgggctgtcatgttgggctttgcaatgatgggcttttcagtcctgatgtttttcttactcgggaccactattctgaaaccatttatgctttccattcagagagaggagagcacatgcaccgccatccacacggacattatggacgactggctggattgtgcattcacatgtggcgtgcattgtcacggacagggtaagtacccatgcctccaggtcttcgttaatttgagccatcccggtcaaaaggcacttctccattataacgaggaggcggtgcaaattaacccaaagtgtttttacaccccaaagtgtcatcaggaccggaacgacttgctcaattccgccctggatattaaagaattttttgatcacaaaaacgggactccatttagctgtttctactcaccagcatctcagtccgaagatgtgatcctgattaaaaagtacgaccaaatggccatattccattgcttgttctggccctcgttgactctcttaggcggagccctgatagtgggtatggtacgcctgacccagcacctgtcactgctttgtgaaaagtatagcactgtagtgcgcgacgaagtggggggaaaagtcccgtacatagagcagcaccagttcaagctctgtattatgcgccgtagtaagggaagagccgagaagtcttag

SEQ ID NO: 247508 - DNA, 774 bp, Artificial Sequence
  derived and/or modified sequence
atgactgcttttcctgcctctggcaagaagcgagagactgactacagcgacggcgatcctctggatgttcacaagagacttccttcctccgcaggagaggatcgggcagtcatgctggggttcgccatgatgggattctcggtgcttatgttcttcctgctggggaccacaatcctgaaaccctttatgttgagtattcagcgcgaggaatcaacctgcaccgccatccacactgatataatggacgactggctggactgcgcctttacgtgtggcgttcattgtcacggtcaggggaagtacccctgtttgcaggtttttgtgaatctatcacacccaggccagaaggcccttctccattataatgaggaggccgtgcagattaatcctaagtgtttctatacccctaagtgtcatcaagatcgcaacgatctactgaattcagcattggacattaaagagttcttcgatcataagaacgggacgcctttctcctgcttctacagtcctgcaagtcagagcgaggacgtgatactcattaagaaatatgatcagatggcaatcttccactgcctgttttggcccagtcttacattgctgggcggagccctcatcgtagggatggttcgattgacacagcatctttctctcttgtgcgaaaagtacagtaccgttgtgagagatgaagtcggcggaaaagttccctacattgaacaacaccaattcaaactgtgtatcatgcgcaggtcaaagggacgcgctgaaaagtcttag

SEQ ID NO: 247509 - DNA, 774 bp, Artificial Sequence
  derived and/or modified sequence
atgaccgccttccccgccagcggcaagaagagagagaccgactacagcgacggcgaccccctggacgtgcacaagagactgcccagcagcgccggcgaggacagagccgtgatgctgggcttcgccatgatgggcttcagcgtgctgatgttcttcctgctgggcaccaccatcctgaagcccttcatgctgagcatccagagagaggagagcacctgcaccgccatccacaccgacatcatggacgactggctggactgcgccttcacctgcggcgtgcactgccacggccagggcaagtacccctgcctgcaggtgttcgtgaacctgagccaccccggccagaaggccctgctgcactacaacgaggaggccgtgcagatcaaccccaagtgcttctacacccccaagtgccaccaggacagaaacgacctgctgaacagcgccctggacatcaaggagttcttcgaccacaagaacggcacccccttcagctgcttctacagccccgccagccagagcgaggacgtgatcctgatcaagaagtacgaccagatggccatcttccactgcctgttctggcccagcctgaccctgctgggcggcgccctgatcgtgggcatggtgagactgacccagcacctgagcctgctgtgcgagaagtacagcaccgtggtgagagacgaggtgggcggcaaggtgccctacatcgagcagcaccagttcaagctgtgcatcatgagaagaagcaagggcagagccgagaagagctag

SEQ ID NO: 247510 - protein, 275 aa, Artificial Sequence
  derived and/or modified sequence
MFPLLYELTAVSPSPFPQRTAFPASGKKRETDYSDGDPLDVHKRLPSSAGEDRAVMLGFAMMGFSVLMFFLLGTTILKPFMLSIQREESTCTAIHTDIMDDWLDCAFTCGVHCHGQGKYPCLQVFVNLSHPGQKALLHYNEEAVQINPKCFYTPKCHQDRNDLLNSALDIKEFFDHKNGTPFSCFYSPASQSEDVILIKKYDQMAIFHCLFWPSLTLLGGALIVGMVRLTQHLSLLCEKYSTVVRDEVGGKVPYIEQHQFKLCIMRRSKGRAEKS

SEQ ID NO: 247511 - DNA, 828 bp, Artificial Sequence
  derived and/or modified sequence
atgtttcccctgttatacgagctgaccgccgtatctcctagcccctttcctcagagaacagccttccctgcctcaggtaaaaagcgagaaacggactactcagacggggatcccctggatgtccacaaacgattgccctcctccgccggggaggacagagcagtgatgctggggttcgccatgatgggatttagtgtgctcatgttctttcttctgggcacaaccatacttaaaccttttatgctatcgatccagagggaagagtccacatgtaccgccatccacacggacattatggacgactggcttgattgcgctttcacttgtggggtgcactgtcacggtcaaggaaagtacccttgccttcaagtgttcgtgaatctgagtcacccagggcaaaaggccctgttacactataacgaggaagccgtgcagatcaaccctaaatgcttctacacacccaagtgccaccaagacagaaatgatcttctgaattcggcccttgatatcaaagaattcttcgatcacaagaacggtacccccttttcttgtttttacagtcccgccagccaatctgaagacgtgatcctgattaagaaatacgaccagatggctatcttccattgcctcttttggccgtcattgaccttactgggaggtgctctcattgtcgggatggtgcgactaacccagcacctctccttactctgcgaaaaatattccaccgtagtccgtgatgaagtgggcggaaaggttccgtatattgagcagcaccagtttaagttgtgcattatgagacgtagtaagggtagggccgaaaaaagttag

SEQ ID NO: 247512 - DNA, 828 bp, Artificial Sequence
  derived and/or modified sequence
atgttccccctgctgtatgagctgacagctgtgagccccagccccttcccccagaggacagccttccctgccagcggcaagaagcgggagacagactacagtgatggagaccccctggatgtgcacaagaggctgcccagcagcgctggagaagatagagctgtgatgctgggctttgccatgatgggcttctctgtgctgatgttcttcctgctgggcaccaccatcctgaagcccttcatgctgagcatccagcgggaggagagcacctgcacagccatccacacagacatcatggatgactggctggactgtgccttcacctgtggggtgcactgccacggccagggcaagtacccctgcctgcaggtgtttgtgaacctgagccaccctggccagaaggccctgctgcactacaatgaggaggccgtgcagatcaaccccaagtgcttctacacccccaagtgccaccaggacagaaatgacctgctgaacagcgccctggacatcaaggagttctttgaccacaagaatggcacccccttcagctgcttctacagccctgccagccagagtgaagatgtgatcctgatcaagaagtatgaccagatggccatcttccactgcctcttctggcccagcctgaccctgctgggcggggccctgattgtgggcatggtgcggctgacccagcacctgagcctgctgtgtgagaagtacagcacagtggtgagagatgaggtgggcggcaaggtgccctacatcgagcagcaccagttcaagctgtgcatcatgaggaggagcaagggccgggcagagaagagctag

SEQ ID NO: 247513 - DNA, 828 bp, Artificial Sequence
  derived and/or modified sequence
atgttccccctgctgtacgagctgaccgccgtgagccccagccccttcccacagagaacggctttccccgccagcgggaagaagcgcgaaaccgattacagcgatggggaccctctcgatgtgcacaaaaggctgcctagcagtgcgggcgaggatagggcagttatgctgggctttgccatgatggggtttagtgttcttatgtttttcctcctggggactaccatactcaagccatttatgctgtcgatccaaagggaggaaagcacctgcactgcgatccacacagatattatggatgattggctggactgcgcttttacctgtggcgtacactgccatggacagggcaagtatccatgtctgcaagtttttgtgaacctgtcccaccccggacagaaagccctgttacactataacgaggaagctgtccagatcaatccaaaatgtttctacacccccaaatgtcatcaggatcgaaacgatctgttgaactccgccctggacattaaggagttctttgaccacaagaacgggacacctttctcatgtttttattcacccgcatcgcaatcagaagatgtgatcctcatcaaaaagtatgatcagatggctatttttcattgcctgttctggccatccctaactcttctcggaggcgcactgatcgtcggaatggtgcggcttacccagcatttgtctttgttgtgtgaaaaatactcgaccgtggtgcgcgacgaggtaggcggtaaggtgccatatattgaacaacatcagtttaagctatgcatcatgagaaggagcaagggcagggccgaaaaatcatag

SEQ ID NO: 247514 - DNA, 1608 bp, Artificial Sequence
  derived and/or modified sequence
gttcaccagacaccctgccctgcgagaatgtatctcatcctttgctggagcaggtttgcaggcacagtggagagaggagagaagaaatgaagggacacttatgcagaaccatgagtggccagagaggaggagaaggagggtgagaggagcaaagaagccatgacaacttcataattctgagtggactgggcagtggccagaaattctggtggtggatatgctgcctttccaacaggtgaatatgaaagaataagtcaaaccctgttcaggacgctgttaattccaaatgtgaactttttgagtcattctttccatgtggaattcaaaggagaatgtaaacaaattttcaggagggacgtgcaatatccctgaaagataacaaagttcgtaacacttatttacatacaacattctctagttattgattaaacagatctctacagacttgcatgaggcaacatttcttaggcttgtttgctacaatatctttaaaaatacttgattacacatcactttagcttatttagatggacttttcaccaagctctgaactgggatttcattttgttgcattcatcctgctcacgagacacaggtaggcagcaaatgagattatccctccagtccccatggattggaaatgttcccccttctttatgagctcactgcagtatctccttctccctttccccaaaggacagcctttcctgcctcagggaagaagagagagacagactacagtgatggagacccactagatgtgcacaagaggctgccatccagtgctggagaggaccgagccgtgatgctggggtttgccatgatgggcttctcagtcctaatgttcttcttgctcggaacaaccattctaaagccttttatgctcagcattcagagagaagaatcgacctgcactgccatccacacagatatcatggacgactggctggactgtgccttcacctgtggtgtgcactgccacggtcaggggaagtacccgtgtcttcaggtgtttgtgaacctcagccatccaggtcagaaagctctcctacattataatgaagaggctgtccagataaatcccaagtgcttttacacacctaagtgccaccaagatagaaatgatttgctcaacagtgctctggacataaaagaattcttcgatcacaaaaatggaacccccttttcatgcttctacagtccagccagccaatctgaagatgtcattcttataaaaaagtatgaccaaatggctatcttccactgtttattttggccttcactgactctgctaggtggtgccctgattgttggcatggtgagattaacacaacacctgtccttactgtgtgaaaaatatagcactgtagtcagagatgaggtaggtggaaaagtaccttatatagaacagcatcagttcaaactgtgcattatgaggaggagcaaaggaagagcagagaaatcttaagacggtggccaaattaaagtgctggccttcagatgtctgtgatttctgcaactgaggacctaattatgcctgtctgcaaactaataatgtaaaaggtaataattaaagtatcatattttcatgtgggaaaaaatttaaaa

SEQ ID NO: 247515 - DNA, 828 bp, Artificial Sequence
  derived and/or modified sequence
atgttcccactcctatatgagcttactgccgtcagtccctcgccattccctcagcgcaccgcatttcccgcttccggcaaaaagagagagactgactactctgatggtgaccccctggacgtccacaagcgcttaccctcttccgctggcgaggatcgggcagtaatgctcgggttcgctatgatgggattctccgtcctaatgtttttcctccttggaaccactatactgaagccattcatgctctccatccagcgcgaagagtccacctgtacagccatccatactgatatcatggacgattggttggactgcgcttttacttgcggcgtacactgccatgggcaagggaagtacccttgcctgcaggtgttcgtgaacctttcacaccccggtcagaaagccttgctgcactacaacgaggaggctgtgcaaatcaatcccaagtgtttctatactcccaaatgtcatcaggacagaaacgaccttctgaacagcgcgcttgatatcaaagagttctttgatcacaagaacgggactccattctcctgcttctacagcccagcctcccaatccgaggatgtgatcttgatcaaaaagtatgatcaaatggccattttccactgcctgttctggccctcgcttacactcctcggtggggcactgattgttggaatggtccggctgactcagcacttgtctcttctttgtgaaaaatatagcactgtggttagagatgaggtgggaggcaaggtcccctacatcgagcaacatcagttcaaattatgcattatgaggagatcaaaggggagggcggagaagagctag

SEQ ID NO: 247516 - DNA, 828 bp, Artificial Sequence
  derived and/or modified sequence
atgttccccctgctgtacgagctgaccgccgtgagccccagccccttcccccagagaaccgccttccccgccagcggcaagaagagagagaccgactacagcgacggcgaccccctggacgtgcacaagagactgcccagcagcgccggcgaggacagagccgtgatgctgggcttcgccatgatgggcttcagcgtgctgatgttcttcctgctgggcaccaccatcctgaagcccttcatgctgagcatccagagagaggagagcacctgcaccgccatccacaccgacatcatggacgactggctggactgcgccttcacctgcggcgtgcactgccacggccagggcaagtacccctgcctgcaggtgttcgtgaacctgagccaccccggccagaaggccctgctgcactacaacgaggaggccgtgcagatcaaccccaagtgcttctacacccccaagtgccaccaggacagaaacgacctgctgaacagcgccctggacatcaaggagttcttcgaccacaagaacggcacccccttcagctgcttctacagccccgccagccagagcgaggacgtgatcctgatcaagaagtacgaccagatggccatcttccactgcctgttctggcccagcctgaccctgctgggcggcgccctgatcgtgggcatggtgagactgacccagcacctgagcctgctgtgcgagaagtacagcaccgtggtgagagacgaggtgggcggcaaggtgccctacatcgagcagcaccagttcaagctgtgcatcatgagaagaagcaagggcagagccgagaagagctag

SEQ ID NO: 247517 - DNA, 1122 bp, Artificial Sequence
  derived and/or modified sequence
atgtataggctcatgtctgccgttacagctagggccgccgcccctggtgggctggcctcatcctgtgggaggcgcggagttcaccagcgagccggtttgccacccttaggacacggttgggtaggcggactaggcctcggactgggtctggccctgggcgtgaagctggccggcggactgagaggggccgcaccagcccagtctcccgcggcaccagatcccgaagccagccccctggcggagcccccccaggagcagtccttagccccgtggtccccacaaactcccgcgccaccgtgtagtaggtgcttcgcaagagcaattgaaagcagtagggatttactccaccggattaaggatgaagtgggcgcacctggtattgtcgtaggcgtgtccgtggatggaaaggaagtgtggagcgaggggctagggtatgccgatgtggagaatcgcgttccatgtaaacctgagacagtgatgagaatcgcctcgatttccaaatctctcactatggtagccctcgctaagttatgggaggctggaaagctagacctggacatccccgtccaacactacgtccccgagttcccggagaaggagtacgaaggagagaaagtctcggtgacgaccagactcctcatcagccatctgagcgggataagacactatgagaaggacatcaaaaaggtcaaggaggaaaaagcgtataaagcattgaagatgatgaaagagaacgtggccttcgagcaggaaaaggaggggaagagcaacgaaaagaacgactttacaaagttcaaaaccgagcaagagaatgaggctaagtgtaggaatagtaagcccggtaagaagaagaatgatttcgagcagggggaactgtatttgagggagaagttcgaaaattctattgaaagtttgcggctgttcaaaaacgacccgctgttcttcaagcctggttcccaattcctgtatagcacctttggctatacactactagctgccatcgtggagcgggcctccggctgcaagtatctcgactacatgcagaagatttttcatgatcttgacatgctgacgaccgtccaagaagaaaacgagcctgtaatttacaatagggcccgctag

SEQ ID NO: 247518 - DNA, 2023 bp, Artificial Sequence
  derived and/or modified sequence
gtgcgtgagtttggtggcggccggctgtgcagagacgccatgtaccggctcatgtcagcagtgactgcccgggctgccgcccccgggggcttggcctcaagctgcggacgacgcggggtccatcagcgcgccgggctgccgcctctcggccacggctgggtcgggggcctcgggctggggctggggctggcgctcggggtgaagctggcaggtgggctgaggggcgcggccccggcgcagtcccccgcggcccccgaccctgaggcgtcgcctctggccgagccgccacaggagcagtccctcgccccgtggtctccgcagaccccggcgccgccctgctccaggtgcttcgccagagccatcgagagcagccgcgacctgctgcacaggatcaaggatgaggtgggcgcaccgggcatagtggttggagtttctgtagatggaaaagaagtctggtcagaaggtttaggttatgctgatgttgagaaccgtgtaccatgtaaaccagagacagttatgcgaattgctagcatcagcaaaagtctcaccatggttgctcttgccaaattgtgggaagcagggaaactggatcttgatattccagtacaacattatgttcccgaattcccagaaaaagaatatgaaggtgaaaaggtttctgtcacaacaagattactgatttcccatttaagtggaattcgtcattatgaaaaggacataaaaaaggtgaaagaagagaaagcttataaagccttgaagatgatgaaagagaatgttgcatttgagcaagaaaaagaaggcaaaagtaatgaaaagaatgattttactaaatttaaaacagagcaggagaatgaagccaaatgccggaattcaaaacctggcaagaaaaagaatgattttgaacaaggcgaattatatttgagagaaaagtttgaaaattcaattgaatccctaagattatttaaaaatgatcctttgttcttcaaacctggtagtcagtttttgtattcaacttttggctataccctactggcagccatagtagagagagcttcaggatgtaaatatttggactatatgcagaaaatattccatgacttggatatgctgacgactgtgcaggaagaaaacgagccagtgatttacaatagagcaaggtaaatgaataccttctgctgtgtctagctatatcgcatcttaacactattttattaattaaaagtcaaattttctttgtttccattccaaaatcaacctgccacattttgggagcttttctacatgtctgttttctcatctgtaaagtgaaggaagtaaaacatgtttataaagtacactaagaccctttgatgaaagatagcaataatattaataattcaaacatgaataactaaaccaaaattgcacccaccatgagcatctgtaatttgctctttaaccattccttttttaggttttaactaatactttgtttacgtgttattagtttttaattgttttcatactgttttgaaataattttatacttatagaaaagttgcaagagtagtacaaaggattcacatatcctctttactcagattcccttaatgttagtttaccgcatttgcattacctttctgtctacatatgtgtttgtttctgaaccatttggaaataagttgtagacgtgatacccctttacctataaatatttacatgtgtattttctaaaaacaaggacattcagggccgggtgcagtggctcacgcctgtaatcccaacactttggaaggccgaggtgggtggatcacctgaggtcaggagttcaagaccagcctggccaatgtggtgaaatcaaccctctctctactaaaaatgcaaaaattagccaggtgtggtggcgggtgcctataatcccagccacgcgggaggctgaggcaggagaatcgcttgaacccaggaggtggagttgcagtaagccaagatcgtgcccctgcacttcaggctgggcgaaagagtgagactccatgtcaaaaaagga

SEQ ID NO: 247519 - DNA, 1122 bp, Artificial Sequence
  derived and/or modified sequence
atgtaccgcctgatgtctgctgtgacagcccgggctgctgcccctgggggcctggccagcagctgtggccggcggggcgtgcaccagagagctggcctgccccccctgggccacggctgggtgggcggcctgggcctgggcctgggcctggccctgggcgtgaagctggccggcggcctgcggggagctgccccagcccagagccctgctgccccagaccctgaggccagccccctggccgagcccccccaggagcagagcctggccccctggagcccccagaccccagccccaccctgcagccgctgctttgcccgggccatcgagagcagccgggacctgctgcaccgcatcaaggatgaggtgggcgcccctggcatcgtggtgggcgtgtctgtggatggcaaggaggtgtggagcgagggcctgggctatgcagatgtggagaacagagtgccctgcaagccagagaccgtgatgagaattgccagcatcagcaagagcctgaccatggtggccctggccaagctgtgggaggccggcaagctggacctggacatccctgtgcagcactacgtgcctgagttccctgagaaggagtatgaaggagagaaggtgtctgtgaccacccggctgctgatcagccacctgagcggcatccgccactatgagaaggacatcaagaaggtgaaggaggagaaggcctacaaggccctgaagatgatgaaggaaaatgtggcctttgagcaggagaaggagggcaagagcaatgagaagaatgacttcaccaagttcaagacagagcaggagaatgaggccaagtgcaggaacagcaagccaggcaagaagaagaatgactttgagcagggcgagctgtacctgcgggagaagtttgaaaattccattgagagcctgcggctcttcaagaatgaccccctcttcttcaagccaggcagccagttcctgtacagcaccttcggctacaccctgctggccgccatcgtggagcgggccagcggctgcaagtacctggactacatgcagaagatcttccatgacctggacatgctgaccaccgtgcaggaggagaatgagcccgtcatctacaacagagccaggtag

SEQ ID NO: 247520 - DNA, 1122 bp, Artificial Sequence
  derived and/or modified sequence
atgtaccggctgatgagcgccgtgaccgcccgggccgccgcccccggaggtctcgccagtagttgtgggcggcgaggggtgcatcaacgggccggactaccaccactgggtcatggatgggttggcggcctggggcttggattgggcctcgctctgggggtaaagctggccggcggtctgagaggtgccgccccagcgcagtcccccgccgccccggatcctgaggccagcccactggccgaacctcctcaagaacaaagtcttgctccgtggagcccccagacgcctgctccaccatgttccaggtgtttcgcaagggctatcgagtccagtagagacttactccatcgcattaaagatgaagttggggcacccggtattgtcgtaggcgtgtcagtcgatggtaaggaagtgtggagcgagggcctgggatatgcagacgttgaaaaccgagtcccatgcaaacctgagactgtcatgcggatcgccagcatcagcaaaagtctcaccatggtggctttagcaaaactatgggaggcagggaagctagatctagatatacctgttcagcattacgttcccgagttcccagaaaaggaatatgagggggaaaaggtgtcggtgaccactaggctactgattagccacctctctggtatcagacattatgaaaaggatatcaagaaggtgaaggaggaaaaagcttataaggctctcaaaatgatgaaagagaatgtggcgttcgagcaggaaaaggagggcaaaagcaacgagaagaacgattttacaaagttcaagactgaacaggagaatgaagcaaaatgccgcaattcaaagcccggaaagaaaaaaaacgactttgaacagggggagctgtatttgagggagaagttcgagaactcaatagaaagcctccgcttgttcaagaatgaccccctcttcttcaagccaggctcccagttcctgtattccacattcggctatactctcctagctgccatcgttgagcgggcctcaggctgcaaatacttggactatatgcagaaaatcttccacgacctcgacatgttgaccaccgtccaggaggagaatgaacctgtgatctataaccgcgcccggtag

SEQ ID NO: 247521 - DNA, 1122 bp, Artificial Sequence
  derived and/or modified sequence
atgtatagattaatgagtgccgtcaccgcgagggcggctgcgcctgggggactcgcaagcagctgtgggagacgcggagtgcaccagcgggcagggcttccaccactgggacacggctgggttgggggactcggtttaggtctgggtttggcactgggggtaaagctagcagggggactcaggggagccgcacccgcacaatccccagccgcaccagatccggaggcctccccactggctgagccaccccaagaacagagtctggcaccttggagcccgcaaactcccgctccaccatgttctcgatgctttgcacgagccatcgaatcgtcccgtgatttgctacatcgcatcaaagatgaggtcggcgcaccgggtatagtggtgggggtctccgtggatggaaaagaagtgtggtcagaggggctgggatacgccgacgtggagaatcgagtaccctgcaagcccgagacagtcatgcgcattgcgagcatttccaagagcctaacgatggttgcccttgccaaactttgggaagcagggaaattagacctagacattccagtgcagcattacgtgcctgagtttcctgaaaaggagtatgagggggaaaaagtgagcgtgaccacgaggttgctgatcagccatctctcgggcatccgccactatgagaaggatattaagaaggtgaaagaggagaaagcttacaaagcactgaaaatgatgaaagagaacgtcgcttttgagcaggagaaagaggggaaatcaaatgaaaagaacgacttcactaaatttaagacagagcaggaaaatgaggcgaaatgtcggaatagcaaaccaggtaaaaaaaagaacgactttgagcagggggagctgtacctacgggaaaaatttgaaaatagcatcgagtccctgaggttgttcaaaaatgaccctctgtttttcaagcccggatctcagttcctctactctacattcggatatacattactagccgcaattgttgaaagagcttctgggtgtaagtacctggattacatgcagaagatcttccacgacctggatatgctgactactgttcaagaagaaaatgagcctgtcatatacaatagagctaggtag

SEQ ID NO: 247522 - DNA, 1122 bp, Artificial Sequence
  derived and/or modified sequence
atgtacagactgatgagcgccgtgaccgccagagccgccgcccccggcggcctggccagcagctgcggcagaagaggcgtgcaccagagagccggcctgccccccctgggccacggctgggtgggcggcctgggcctgggcctgggcctggccctgggcgtgaagctggccggcggcctgagaggcgccgcccccgcccagagccccgccgcccccgaccccgaggccagccccctggccgagcccccccaggagcagagcctggccccctggagcccccagacccccgcccccccctgcagcagatgcttcgccagagccatcgagagcagcagagacctgctgcacagaatcaaggacgaggtgggcgcccccggcatcgtggtgggcgtgagcgtggacggcaaggaggtgtggagcgagggcctgggctacgccgacgtggagaacagagtgccctgcaagcccgagaccgtgatgagaatcgccagcatcagcaagagcctgaccatggtggccctggccaagctgtgggaggccggcaagctggacctggacatccccgtgcagcactacgtgcccgagttccccgagaaggagtacgagggcgagaaggtgagcgtgaccaccagactgctgatcagccacctgagcggcatcagacactacgagaaggacatcaagaaggtgaaggaggagaaggcctacaaggccctgaagatgatgaaggagaacgtggccttcgagcaggagaaggagggcaagagcaacgagaagaacgacttcaccaagttcaagaccgagcaggagaacgaggccaagtgcagaaacagcaagcccggcaagaagaagaacgacttcgagcagggcgagctgtacctgagagagaagttcgagaacagcatcgagagcctgagactgttcaagaacgaccccctgttcttcaagcccggcagccagttcctgtacagcaccttcggctacaccctgctggccgccatcgtggagagagccagcggctgcaagtacctggactacatgcagaagatcttccacgacctggacatgctgaccaccgtgcaggaggagaacgagcccgtgatctacaacagagccagatag

SEQ ID NO: 247523 - protein, 493 aa, Artificial Sequence
  derived and/or modified sequence
MERSPDVSPGPSRSFKEELLCAVCYDPFRDAVTLRCGHNFCRGCVSRCWEVQVSPTCPVCKDRASPADLRTNHTLNNLVEKLLREEAEGARWTSYRFSRVCRLHRGQLSLFCLEDKELLCCSCQADPRHQGHRVQPVKDTAHDFRAKCRNMEHALREKAKAFWAMRRSYEAIAKHNQVEAAWLEGRIRQEFDKLREFLRVEEQAILDAMAEETRQKQLLADEKMKQLTEETEVLAHEIERLQMEMKEDDVSFLMKHKSRKRRLFCTMEPEPVQPGMLIDVCKYLGSLQYRVWKKMLASVESVPFSFDPNTAAGWLSVSDDLTSVTNHGYRVQVENPERFSSAPCLLGSRVFSQGSHAWEVALGGLQSWRVGVVRVRQDSGAEGHSHSCYHDTRSGFWYVCRTQGVEGDHCVTSDPATSPLVLAIPRRLRVELECEEGELSFYDAERHCHLYTFHARFGEVRPYFYLGGARGAGPPEPLRICPLHISVKEELDG

SEQ ID NO: 247524 - protein, 493 aa, Artificial Sequence
  derived and/or modified sequence
MERSPDVSPGPSRSFKEELLCAVCYDPFRDAVTLRCGHNFCRGCVSRCWEVQVSPTCPVCKDRASPADLRTNHTLNNLVEKLLREEAEGARWTSYRFSRVCRLHRGQLSLFCLEDKELLCCSCQADPRHQGHRVQPVKDTAHDFRVRSLIAEERRNFLPTHQWIVTKTRLQTSSPNLQSRRQGQVQEHGACTAGEGQGLLGHAALLDAMAEETRQKQLLADEKMKQLTEETEVLAHEIERLQMEMKEDDVSFLMKHKSRKRRLFCTMEPEPVQPGMLIDVCKYLGSLQYRVWKKMLASVESVPFSFDPNTAAGWLSVSDDLTSVTNHGYRVQVENPERFSSAPCLLGSRVFSQGSHAWEVALGGLQSWRVGVVRVRQDSGAEGHSHSCYHDTRSGFWYVCRTQGVEGDHCVTSDPATSPLVLAIPRRLRVELECEEGELSFYDAERHCHLYTFHARFGEVRPYFYLGGARGAGPPEPLRICPLHISVKEELDG

SEQ ID NO: 247525 - DNA, 4227 bp, Artificial Sequence
  derived and/or modified sequence
ctcgggtcgcgggcgttggcagccgggcgggtgggaggggccggagcaaaagttccgggcgcccgagccggctgctcgtgccatggagcggagtcccgacgtgtcccccgggccttcccgctccttcaaggaggagttgctctgcgccgtctgctacgaccccttccgcgacgcagtcactctgcgctgcggccacaacttctgccgcgggtgcgtgagccgctgctgggaggtgcaggtgtcgcccacctgcccagtgtgcaaagaccgcgcgtcacccgccgacctgcgcaccaaccacaccctcaacaacctggtggagaagctgctgcgcgaggaggccgagggcgcgcgctggaccagctaccgcttctcgcgtgtctgccgcctgcaccgcggacagctcagcctcttctgcctcgaggacaaggagctgctgtgctgctcctgccaggccgacccccgacaccaggggcaccgcgtgcagccggtgaaggacactgcccacgactttcgggccaagtgcaggaacatggagcatgcactgcgggagaaggccaaggccttctgggccatgcggcgctcctatgaggccatcgccaagcacaatcaggtggaggctgcatggctggaaggccggatccggcaggagtttgataagcttcgcgagttcttgagagtggaggagcaggccattctggatgccatggccgaggagacaaggcagaagcaacttctggccgacgagaagatgaagcagctcacagaggagacggaggtgctggcacatgagatcgagcggctgcagatggagatgaaggaggacgacgtttcttttctcatgaaacacaagagccgaaaacgccgactcttctgcaccatggagccagagccagtccagcccggcatgcttatcgatgtctgcaagtacctgggctccctgcagtaccgcgtctggaagaagatgcttgcatctgtggaatctgtacccttcagctttgaccccaacaccgcagctggctggctctccgtgtctgacgacctcaccagcgtcaccaaccatggctaccgcgtgcaggtggagaacccggaacgcttctcctcggcgccctgcctgctgggctcccgtgtcttctcacagggctcgcacgcctgggaggtggcccttggggggctgcagagctggagggtgggcgtggtacgtgtgcgccaggactcgggcgctgagggccactcacacagctgctaccacgacacacgctcgggcttctggtatgtctgccgcacgcagggcgtggagggggaccactgcgtgacctcggacccagccacgtcgcccctggtcctggccatcccacgccgcctgcgtgtggagctggagtgtgaggagggcgagctgtctttctatgacgcggagcgccactgccacctgtacaccttccacgcccgctttggggaggttcgcccctacttctacctggggggtgcacggggcgccgggcctccagagcctttgcgcatctgccccttgcacatcagtgtcaaggaagaactggatggctgagctggcccggggctgccccggtcttgtgccacagcactgttttctttctgccctcttcctaatgcccacactgcttgggcactattgcgcccctgcctccttgccaggctcttcctcctgtcctgcctggtccttttccatgactccaggctgtgcctctctccatgtttggtcccttctgtgcccatggtcaggagctattcgggtggcacctcgctggccaggctctcccgagtcgtggcacctccacaatgtgaattttctgaatccctattccaggatttctgggaataatgtttacttctagaatgggcctgttgtaaaccatctcatcgaggtgtggtaaagccattggatgaggaggggactgccatggaaaggagagtttgttacttacggttctgagaggaggggccacataggaaagccccacggtgggtcagaaggcggaaggagggaggggaacgtgtgggcaagagacttcctctggtttcctcaggaggaaatgggcaaggcagagtaagcaggggagacaggtttaagggtagctggcttgagtaatttcagtggctctcaggataggggctgccctttttgtctgatacctggccccgggatagtcaggacaggtgaatgttggcctggggtgtgacagccctgggagagccatgtgaaggaggcagctggcgccatcgctccggattagttggtttccataggaaaggcatgctttcagccagatgcttgccatctctagggattgggggattggctagcctgggaggatcagtctgtccaggtcagcgaggccccagataccagagcatcaagagtacaggaaatacagttaatgcagggcctctgtgtggctggatcctccgtctccatcagatcagctctgattgatctattcttgcacgatttcctctgaacacagggttccagagtacttaaacacaacattttttaaatcgtgatttcggcctatttccttgccaggcctgtttccccaccaggaaatgagataggaggactggatgaggatgtcctgttatagttgctgtggaggaagttcctctggttaattctcatcagcgtctgcagaaaagaaggaaagagggcacccttttcagttgggaagaaaggagaggggtggcgccatggacgtggccctaaacgctgtgggagagggaagaggaggctgggcctcgctgccctcttgtctctgctgacttcagcctggtcatgcttgctctgccacttgcgatttcatccctaatttcttcctccaccatgcctgcagacttttccctgggcttgttttttctcgcacatctctgaagagtttttaatcttcagctcatcatgtcccaggaagtggcatcataaaaggaaatatttttttttcctaggagcagtgttaaaatctgggtcacattcctgaccaaggacagcatcctgccttctgcccatccccttcagttcacaaaagctgacattttaaacaaatcatgactcacacgtattaattggttataaatatgttgtgtacactggttagataaaacttaaggccacaaggagggcccaggtaggcgatgtcagtgtgtgaaggggctggattgggcgtggtgaggatgttggcaaaccagtgcatgcacctggttggaagatgctcagcctcacaaaagctccaagccctttgggagccaaagtgtctgagagtgtgaccctctcctgtaaagtatttatcccacccattaatataatttctgtataataaacttgacctgaaattatttcattctttatattaaacttttaaaaatgttttttattttcaccttagatatgggaagagttttttttttttttttttttttaacaggataacttgagcaggctaggcctcttaaaaaaaaatttgagctaaaactcatttttcttttggcattttcttttcaatgttcttataagcaaagttcatccatgttgtagcatgtgttcaactttattttttcatcgggtaatattccattgtatggaatggtagtactacattttatttatcatgcatcgattggtggacatttggatcgtttctacttcttgactattatacataatgctgctaggaacttttgtgtatgagtttttgtgtggacatatgttttcatttctctttggtatatgcctgggagcagatttgctggatcatatgaaactctatttaacccttgagggactcccaaactgttttccaatgtggtgacacaattttatatcccatcaacagggcatgagggttctgatgactccacatccctcagtgctttttattatctatcttttaacttagccatcctagtaggggtaatgtggcatctcattgtgattttggtttgcatttccctgatggcgaatgatattgagcatcttttcatgagcttattggccatttgcatatcttcttaggacagctatctttagatcacttgctcattttttaattgggttatttgtctttttattattgagttgtaagagtccttttatagcctggcacaagtccctttaactggtatatgattataaaatttttctccgtgagctgtttcatttccttgatgatgtcctttgaaatactaaagcttttaattttg

SEQ ID NO: 247526 - DNA, 1482 bp, Artificial Sequence
  derived and/or modified sequence
atggagagaagccccgacgtgagccccggccccagcagaagcttcaaggaggagctgctgtgcgccgtgtgctacgaccccttcagagacgccgtgaccctgagatgcggccacaacttctgcagaggctgcgtgagcagatgctgggaggtgcaggtgagccccacctgccccgtgtgcaaggacagagccagccccgccgacctgagaaccaaccacaccctgaacaacctggtggagaagctgctgagagaggaggccgagggcgccagatggaccagctacagattcagcagagtgtgcagactgcacagaggccagctgagcctgttctgcctggaggacaaggagctgctgtgctgcagctgccaggccgaccccagacaccagggccacagagtgcagcccgtgaaggacaccgcccacgacttcagagtgagaagcctgatcgccgaggagagaagaaacttcctgcccacccaccagtggatcgtgaccaagaccagactgcagaccagcagccccaacctgcagagcagaagacagggccaggtgcaggagcacggcgcctgcaccgccggcgagggccagggcctgctgggccacgccgccctgctggacgccatggccgaggagaccagacagaagcagctgctggccgacgagaagatgaagcagctgaccgaggagaccgaggtgctggcccacgagatcgagagactgcagatggagatgaaggaggacgacgtgagcttcctgatgaagcacaagagcagaaagagaagactgttctgcaccatggagcccgagcccgtgcagcccggcatgctgatcgacgtgtgcaagtacctgggcagcctgcagtacagagtgtggaagaagatgctggccagcgtggagagcgtgcccttcagcttcgaccccaacaccgccgccggctggctgagcgtgagcgacgacctgaccagcgtgaccaaccacggctacagagtgcaggtggagaaccccgagagattcagcagcgccccctgcctgctgggcagcagagtgttcagccagggcagccacgcctgggaggtggccctgggcggcctgcagagctggagagtgggcgtggtgagagtgagacaggacagcggcgccgagggccacagccacagctgctaccacgacaccagaagcggcttctggtacgtgtgcagaacccagggcgtggagggcgaccactgcgtgaccagcgaccccgccaccagccccctggtgctggccatccccagaagactgagagtggagctggagtgcgaggagggcgagctgagcttctacgacgccgagagacactgccacctgtacaccttccacgccagattcggcgaggtgagaccctacttctacctgggcggcgccagaggcgccggcccccccgagcccctgagaatctgccccctgcacatcagcgtgaaggaggagctggacggctag

SEQ ID NO: 247527 - DNA, 1482 bp, Artificial Sequence
  derived and/or modified sequence
atggagaggtctcctgatgtgagccccgggcccagcagatccttcaaagaagagctgctctgcgccgtgtgctatgatccctttagagatgccgtgaccttacggtgtggtcacaatttctgtaggggctgcgtctcccgctgttgggaggtgcaggtgtctcccacctgccccgtgtgcaaggatcgagcctcccccgcagatcttcggacgaaccacacgctcaataatctcgtagagaagctgctcagggaggaggcagaaggagctcgctggacatcttaccggttcagtcgcgtctgcaggttgcaccgcgggcagttgagtctgttctgtctggaggacaaagaactgctgtgctgcagctgccaggcagatccacgtcatcagggccacagagtacagccagtcaaagatactgcacatgatttcagggccaagtgcaggaatatggaacatgcattaagggagaaagccaaagcgttctgggcgatgcggaggagctatgaggccattgctaagcacaatcaagtggaggccgcctggttggaggggcggattcgacaagaattcgataagctcagagagtttctgagggtcgaagaacaggcaatactggacgccatggcagaggaaaccagacagaaacaattgctggcggatgagaagatgaagcagctgacggaggaaactgaggtccttgctcacgaaatcgaacgtctgcagatggagatgaaagaagacgatgtttcctttctcatgaagcataagagtcgaaagcgccggctgttttgcaccatggaacctgaaccagtgcagcccgggatgctgatcgatgtttgtaaatatttgggatcgctgcagtaccgagtttggaagaagatgctcgctagcgttgaatcagttcccttttcatttgaccctaacaccgccgctgggtggctgtcagtgtccgatgatctcaccagtgtgacaaaccacggataccgggtccaggtggaaaatccagagagattctcttccgctccatgcctattaggcagtagagtctttagccagggttcccatgcatgggaggtggcattagggggccttcagagctggagagtgggcgtggtgcgggtgagacaggactctggcgccgaggggcattctcattcctgttatcacgataccaggtcagggttctggtacgtctgtcgcactcagggggtcgagggcgatcactgcgtaacaagcgacccggccacctccccactggttctggccatcccaaggcggcttcgcgtcgaactggaatgtgaggagggggagctcagcttctatgatgctgagagacattgccatctgtatacatttcatgccagatttggcgaagtgcggccctacttctatctggggggcgcgagaggcgctggcccaccggagccccttaggatttgccctttacacatctctgtcaaggaggagctcgatggatag

SEQ ID NO: 247528 - DNA, 1482 bp, Artificial Sequence
  derived and/or modified sequence
atggaacgaagccctgatgtttctcctggtccttcccggtcttttaaagaagagctgctgtgtgctgtgtgttatgaccctttccgcgatgctgtgaccctaagatgtgggcacaacttctgtaggggctgcgtcagtaggtgctgggaagttcaggtctcacctacttgtccagtgtgcaaagatcgggcttcccccgccgaccttcggacgaaccatacactgaataatctggtcgagaagttgttacgagaagaggcggagggcgctcggtggaccagctaccgcttcagtcgcgtctgccgcttgcaccggggacagctgagtctgttttgcctcgaggacaaggaactcttatgctgctcttgccaggccgacccaagacatcagggccatagagtccagccagttaaggacaccgcccacgattttagagttcggagcctcatagctgaggaacggcgcaatttcctgccaacacaccagtggatcgttacaaaaacccgcctgcagacatccagccccaatttgcagtccagaagacagggccaggtccaggagcacggcgcatgtaccgctggagaaggccaagggcttctgggccacgcggctctgctggacgccatggcggaggagacccgccaaaagcaactgttggcagatgagaaaatgaaacagctcaccgaggaaaccgaggtgttggcccatgagatcgaacgattgcagatggagatgaaggaagatgacgttagtttcctcatgaaacacaagtctaggaagaggagattattttgcacaatggaaccagagccagtccagcccggcatgctcatcgatgtctgtaaatatctggggtcactgcaatatagggtgtggaagaaaatgctcgctagcgttgaatctgtccctttcagcttcgaccccaatacggctgcgggttggctgagcgtgtctgacgacctcacctccgttaccaaccacggatatagagtacaggtggaaaaccccgagcgttttagctccgcgccctgtttactgggcagtcgggttttttcccagggctcccacgcatgggaagtggcactgggcgggctccaatcctggagagtaggcgtggtgcgagtccgccaggacagtggagcggaagggcattcacacagttgttatcacgacaccagatccggtttctggtatgtgtgcaggacacagggagtggagggagaccattgcgtcacctccgaccccgccaccagtccactggtgctggcaatccccaggaggctgcgcgttgaactggagtgcgaggaaggcgaattgtccttctatgacgccgaacgacattgtcacctctataccttccacgccagatttggggaggttcgaccgtacttctaccttggcggtgctcgcggggcaggccctccggaacctctgcgcatttgcccattgcatatttctgtcaaagaggagttagatggatag

SEQ ID NO: 247529 - DNA, 1482 bp, Artificial Sequence
  derived and/or modified sequence
atggagaggagcccagatgtgtccccaggccccagccgctccttcaaggaggagctgctgtgtgctgtgtgctatgaccccttcagagatgctgtgaccctgcgctgtggccacaacttctgccggggctgtgtgagccgctgctgggaggtgcaggtgagccccacctgccctgtgtgcaaggaccgggccagccctgctgacctgcggaccaaccacaccctgaacaacctggtggagaagctgctgcgggaggaggccgagggcgcccgctggaccagctaccgcttcagccgggtgtgccgcctgcaccggggccagctgagcctcttctgcctggaggacaaggagctgctgtgctgcagctgccaggccgaccccaggcaccagggccaccgggtgcagcctgtgaaggacacagcccatgacttccgggccaagtgcaggaacatggagcacgccctgcgggagaaggccaaggccttctgggccatgaggaggagctatgaggccatcgccaagcacaaccaggtggaggccgcctggctggagggccgcatccggcaggagtttgacaagctgcgggagttcctgcgggtggaggagcaggccatcctggatgccatggccgaggagacccggcagaagcagctgctggctgatgagaagatgaagcagctgacagaggagacagaggtgctggcccacgagattgaaaggctgcagatggagatgaaggaggatgatgtgtccttcctgatgaagcacaagagcaggaagagaagactcttctgcaccatggagcctgagcctgtgcagcccggcatgctgattgatgtgtgcaagtacctgggcagcctgcagtacagagtgtggaagaagatgctggcctctgtggagagcgtgcccttctcctttgaccccaacacagctgctggctggctgtctgtgtctgatgacctgacctctgtgaccaaccacggctacagagtgcaggtggagaaccctgagcgcttcagcagcgccccctgcctgctgggcagcagggtcttcagccagggcagccacgcctgggaggtggccctgggcggcctgcagagctggagggtgggcgtggtgcgggtgcggcaggacagcggggctgagggccacagccacagctgctaccatgacaccaggagcggcttctggtacgtgtgcaggacccagggcgtggagggggaccactgtgtgaccagtgaccctgccaccagccccctggtgctggccatcccccggcggctgcgggtggagctggagtgtgaggagggggagctgtccttctatgatgctgagcggcactgccacctgtacaccttccacgccaggtttggagaggtgcggccctacttctacctgggcggggcccggggggccggccccccagagcccctgcgcatctgccccctgcacatctctgtgaaggaggagctggatggatag

SEQ ID NO: 247530 - DNA, 1482 bp, Artificial Sequence
  derived and/or modified sequence
atggagaggagcccagatgtgtccccaggccccagccgctccttcaaggaggagctgctgtgtgctgtgtgctatgaccccttcagagatgctgtgaccctgcgctgtggccacaacttctgccggggctgtgtgagccgctgctgggaggtgcaggtgagccccacctgccctgtgtgcaaggaccgggccagccctgctgacctgcggaccaaccacaccctgaacaacctggtggagaagctgctgcgggaggaggccgagggcgcccgctggaccagctaccgcttcagccgggtgtgccgcctgcaccggggccagctgagcctcttctgcctggaggacaaggagctgctgtgctgcagctgccaggccgaccccaggcaccagggccaccgggtgcagcctgtgaaggacacagcccatgacttccgggtgcgcagcctgattgctgaggagaggaggaacttcctgcccacccaccagtggatcgtgaccaagacccggctgcagaccagcagccccaacctgcagagccggcggcagggccaggtgcaggagcacggggcctgcacagctggggagggccagggcctgctgggccatgctgccctgctggatgccatggccgaggagacccggcagaagcagctgctggctgatgagaagatgaagcagctgacagaggagacagaggtgctggcccacgagattgaaaggctgcagatggagatgaaggaggatgatgtgtccttcctgatgaagcacaagagcaggaagagaagactcttctgcaccatggagcctgagcctgtgcagcccggcatgctgattgatgtgtgcaagtacctgggcagcctgcagtacagagtgtggaagaagatgctggcctctgtggagagcgtgcccttctcctttgaccccaacacagctgctggctggctgtctgtgtctgatgacctgacctctgtgaccaaccacggctacagagtgcaggtggagaaccctgagcgcttcagcagcgccccctgcctgctgggcagcagggtcttcagccagggcagccacgcctgggaggtggccctgggcggcctgcagagctggagggtgggcgtggtgcgggtgcggcaggacagcggggctgagggccacagccacagctgctaccatgacaccaggagcggcttctggtacgtgtgcaggacccagggcgtggagggggaccactgtgtgaccagtgaccctgccaccagccccctggtgctggccatcccccggcggctgcgggtggagctggagtgtgaggagggggagctgtccttctatgatgctgagcggcactgccacctgtacaccttccacgccaggtttggagaggtgcggccctacttctacctgggcggggcccggggggccggccccccagagcccctgcgcatctgccccctgcacatctctgtgaaggaggagctggatggatag

SEQ ID NO: 247531 - DNA, 3306 bp, Artificial Sequence
  derived and/or modified sequence
gggcgcccgagccggctgctcgtgccatggagcggagtcccgacgtgtcccccgggccttcccgctccttcaaggaggagttgctctgcgccgtctgctacgaccccttccgcgacgcagtcactctgcgctgcggccacaacttctgccgcgggtgcgtgagccgctgctgggaggtgcaggtgtcgcccacctgcccagtgtgcaaagaccgcgcgtcacccgccgacctgcgcaccaaccacaccctcaacaacctggtggagaagctgctgcgcgaggaggccgagggcgcgcgctggaccagctaccgcttctcgcgtgtctgccgcctgcaccgcggacagctcagcctcttctgcctcgaggacaaggagctgctgtgctgctcctgccaggccgacccccgacaccaggggcaccgcgtgcagccggtgaaggacactgcccacgactttcgggtgaggagcctgatagccgaagagagaaggaactttttaccaactcaccagtggatagtgacaaagacaaggctccaaaccagctctcctaaccttcagtccaggaggcaaggccaagtgcaggaacatggagcatgcactgcgggagaaggccaaggccttctgggccatgcggcgctcctagatgccatggccgaggagacaaggcagaagcaacttctggccgacgagaagatgaagcagctcacagaggagacggaggtgctggcacatgagatcgagcggctgcagatggagatgaaggaggacgacgtttcttttctcatgaaacacaagagccgaaaacgccgactcttctgcaccatggagccagagccagtccagcccggcatgcttatcgatgtctgcaagtacctgggctccctgcagtaccgcgtctggaagaagatgcttgcatctgtggaatctgtacccttcagctttgaccccaacaccgcagctggctggctctccgtgtctgacgacctcaccagcgtcaccaaccatggctaccgcgtgcaggtggagaacccggaacgcttctcctcggcgccctgcctgctgggctcccgtgtcttctcacagggctcgcacgcctgggaggtggcccttggggggctgcagagctggagggtgggcgtggtacgtgtgcgccaggactcgggcgctgagggccactcacacagctgctaccacgacacacgctcgggcttctggtatgtctgccgcacgcagggcgtggagggggaccactgcgtgacctcggacccagccacgtcgcccctggtcctggccatcccacgccgcctgcgtgtggagctggagtgtgaggagggcgagctgtctttctatgacgcggagcgccactgccacctgtacaccttccacgcccgctttggggaggttcgcccctacttctacctggggggtgcacggggcgccgggcctccagagcctttgcgcatctgccccttgcacatcagtgtcaaggaagaactggatggctgagctggcccggggctgccccggtcttgtgccacagcactgttttctttctgccctcttcctaatgcccacactgcttgggcactattgcgcccctgcctccttgccaggctcttcctcctgtcctgcctggtccttttccatgactccaggctgtgcctctctccatgtttggtcccttctgtgcccatggtcaggagctattcgggtggcacctcgctggccaggctctcccgagtcgtggcacctccacaatgtgaattttctgaatccctattccaggatttctgggaataatgtttacttctagaatgggcctgttgtaaaccatctcatcgaggtgtggtaaagccattggatgaggaggggactgccatggaaaggagagtttgttacttacggttctgagaggaggggccacataggaaagccccacggtgggtcagaaggcggaaggagggaggggaacgtgtgggcaagagacttcctctggtttcctcaggaggaaatgggcaaggcagagtaagcaggggagacaggtttaagggtagctggcttgagtaatttcagtggctctcaggataggggctgccctttttgtctgatacctggccccgggatagtcaggacaggtgaatgttggcctggggtgtgacagccctgggagagccatgtgaaggaggcagctggcgccatcgctccggattagttggtttccataggaaaggcatgctttcagccagatgcttgccatctctagggattgggggattggctagcctgggaggatcagtctgtccaggtcagcgaggccccagataccagagcatcaagagtacaggaaatacagttaatgcagggcctctgtgtggctggatcctccgtctccatcagatcagctctgattgatctattcttgcacgatttcctctgaacacagggttccagagtacttaaacacaacattttttaaatcgtgatttcggcctatttccttgccaggcctgtttccccaccaggaaatgagataggaggactggatgaggatgtcctgttatagttgctgtggaggaagttcctctggttaattctcatcagcgtctgcagaaaagaaggaaagagggcacccttttcagttgggaagaaaggagaggggtggcgccatggacgtggccctaaacgctgtgggagagggaagaggaggctgggcctcgctgccctcttgtctctgctgacttcagcctggtcatgcttgctctgccacttgcgatttcatccctaatttcttcctccaccatgcctgcagacttttccctgggcttgttttttctcgcacatctctgaagagtttttaatcttcagctcatcatgtcccaggaagtggcatcataaaaggaaatatttttttttcctaggagcagtgttaaaatctgggtcacattcctgaccaaggacagcatcctgccttctgcccatccccttcagttcacaaaagctgacattttaaacaaatcatgactcacacgtattaattggttataaatatgttgtgtacactggttagataaaacttaaggccacaaggagggcccaggtaggcgatgtcagtgtgtgaaggggctggattgggcgtggtgaggatgttggcaaaccagtgcatgcacctggttggaagatgctcagcctcacaaaagctccaagccctttgggagccaaagtgtctgagagtgtgaccctctcctgtaaagtatttatcccacccattaatataatttctgtataataaacttgacctgaaatt

SEQ ID NO: 247532 - DNA, 1482 bp, Artificial Sequence
  derived and/or modified sequence
atggagcggagccccgacgtgagccccggccccagccggagcttcaaggaggagctgctgtgcgcggtttgttacgatccctttagagatgctgtcacattacggtgtggccataacttctgtaggggctgcgtgtcacggtgttgggaggtacaggtttcgccaacatgccctgtgtgcaaagatagggcttccccagcggacctgaggacaaaccacacactcaataacctcgtggaaaaactcctgcgagaagaggcagagggcgccaggtggacctcctataggttcagccgagtgtgccggctgcacagaggccagttgtccctcttctgcttagaggacaaagaattgttgtgctgttcctgccaggctgatccacggcaccagggtcatagagtacagcccgttaaggataccgcacacgattttcgcgcaaaatgccgcaatatggaacacgctctcagagaaaaggcaaaggcgttttgggccatgagaaggtcttatgaggcaatagccaagcacaaccaggtggaagccgcatggctggagggacgcattcgccaggagtttgataaactccgcgagtttctcagggtggaggaacaagccatcctggatgcaatggctgaggaaactcggcagaaacaactgctggcagatgagaaaatgaagcagctcacagaagaaacggaggttctcgcacacgagattgagcggctccagatggaaatgaaggaggacgatgtgagttttctcatgaaacacaagtcccgcaaacgcagactcttctgtactatggagccagagcctgtacagcccggcatgctaattgacgtctgcaagtacttagggtccctacagtacagagtgtggaaaaagatgctggcctcggttgagtctgttcccttttcatttgatcccaacaccgctgcgggatggctttcggtgtccgatgacctgacctcagtgaccaaccatggatatagggtccaggtggaaaatcctgagaggttttctagcgcaccttgcctcctgggttccagagtgtttagccaggggtcacatgcctgggaagtcgcactgggaggactgcagtcctggcgcgttggagtcgtgcgtgtgcggcaggactcaggagcagaaggccactctcacagttgttaccatgatacccgctcgggcttttggtatgtgtgcaggacacagggggtggagggagaccactgcgtaacaagcgaccctgcgactagccctttggttctcgccattccccgacgcttgcgcgtggaacttgaatgtgaagaaggagagctgtccttctacgacgctgagcgacattgccacctgtatacattccacgccagattcggcgaagtgaggccgtatttttacctgggtggggcccggggtgccggtcctcccgagcccctgcgcatttgtccccttcacatcagcgtgaaggaagagctagatggttag

SEQ ID NO: 247533 - DNA, 1482 bp, Artificial Sequence
  derived and/or modified sequence
atggagcggagccccgacgtgagccccggccccagccggagcttcaaggaggaattactgtgtgccgtgtgttatgatcccttcagagacgctgtgacgctgcggtgcggacacaacttttgcagaggctgcgtgagccgttgctgggaggttcaggtcagccccacatgtccagtgtgtaaggaccgagctagccctgccgatctgaggacaaaccacactctcaataatttagtcgaaaagttgttgcgagaggaagcagagggagcaaggtggactagctatcggttttcccgtgtgtgcaggctgcatcgtggtcaattaagcttattttgtctggaggacaaggagcttctgtgctgctcatgccaggccgatccaaggcatcaaggacaccgagtccagcccgtgaaggacacggcgcatgacttccgggttcgcagtctgattgcagaggaacgccgaaattttttacctacccaccagtggatagttacaaaaacccgcctgcagacgtcttcgcccaacctgcagagccggaggcaggggcaggtgcaagagcatggggcttgtaccgccggagaagggcaggggctcctgggtcacgccgccctgctggatgctatggccgaggagacgaggcaaaaacagctgctggcagacgaaaaaatgaagcagctgaccgaggagaccgaggtgttagcccacgagattgaaaggttgcaaatggaaatgaaagaggatgacgtgagttttctgatgaaacacaaatcaagaaaacgccgtctcttctgcaccatggagcctgaaccagtccagcccggaatgcttatcgatgtatgcaagtatctcggatctctgcagtaccgcgtatggaagaagatgcttgcatccgtcgaatctgtgccgttttcttttgatcctaataccgccgccggctggctatcagtatccgatgacctgacaagtgtcaccaatcacggatacagagtacaggtggagaaccctgagagatttagctctgccccttgcctcctcggttctagggtattttcccaaggttcccacgcctgggaggtggccctcggcgggctccagtcatggcgcgtcggggtggttagagtacgacaggactctggggctgagggccactcccactcctgttatcatgacaccagatccggattctggtacgtctgccgaactcagggggtggagggcgaccattgtgtgactagcgaccccgctacttcccctctggtgctcgccatcccacgaagactccgggtggaactcgaatgcgaggagggggagctgtccttctacgacgctgagaggcactgccacctatacacctttcatgcaaggtttggagaggtgcgaccatacttttatctcggcggagctcgaggcgccggcccacccgaacctttaagaatatgtcctctgcacatctctgtaaaagaagagctcgacggatag

SEQ ID NO: 247534 - DNA, 1482 bp, Artificial Sequence
  derived and/or modified sequence
atggagcgaagccctgatgtaagccccggtccctcccggtccttcaaggaagagctgctgtgtgctgtctgctatgatcctttccgtgatgccgtgacactcaggtgtggacataatttctgcaggggttgcgtctctcggtgctgggaagtacaggtctctcccacctgccctgtgtgtaaagatcgagcgtcacccgctgacctaaggacgaatcacacattaaataacctggtggagaaactgcttcgggaggaggcagaaggcgctaggtggacctcataccgtttttctcgggtgtgtcggctgcaccggggacagctgtctttattttgcttagaggataaggagctcctgtgttgcagttgccaggctgacccacggcatcaggggcaccgtgtccaaccagtcaaggataccgcccatgatttcagggctaagtgccgaaacatggagcacgccttgagggaaaaggctaaagccttttgggccatgagaagaagctatgaagccatcgccaagcacaatcaggtggaagcagcgtggctggagggtagaatacgtcaggagttcgataagcttcgtgaattcctcagggtggaagaacaggccatcctggacgcgatggccgaggaaacccgtcaaaaacagttactggccgacgaaaagatgaaacaactgactgaagaaacggaagtgttggcgcacgaaatcgagcgtctgcagatggagatgaaggaggacgatgtttcattcttgatgaaacacaagtcccgcaagcgcaggttgttttgtacgatggaacccgagcccgtccaaccagggatgcttatcgacgtgtgtaagtacttgggcagtctgcagtatcgcgtgtggaagaagatgctggcctctgtcgagtcagtccccttctcttttgaccctaacacggctgctgggtggcttagtgtgtccgatgacttaacctccgtgacaaaccacggatatcgggtgcaggtggagaatccagaacggttcagcagtgctccctgcctcctgggcagtagggtgttttcacaggggtcccatgcatgggaggtggcgttgggcggacttcagagctggagagtgggcgtcgtcagggtcaggcaggatagcggggcagagggccacagccatagttgctatcatgacacccgctctgggttttggtacgtatgccggactcagggcgtcgagggtgatcattgcgtaacaagtgaccctgcaactagcccccttgtgctggccatccctcggcgactcagggtggaactggagtgcgaggagggggagctgtccttctacgacgccgagcgccattgccacctgtacaccttccacgcgcgatttggagaggtcagaccctatttttatctgggcggtgcccgaggagcgggaccgcctgagccactgcgaatctgtcctttgcatatctcagtcaaggaggaactggacggctag

SEQ ID NO: 247535 - DNA, 1482 bp, Artificial Sequence
  derived and/or modified sequence
atggaaaggagcccggacgtgtctcccggtccttcacggagttttaaggaagagctcctatgtgcagtgtgttatgatccctttcgggacgccgtcaccctaaggtgcggtcacaatttttgcagagggtgcgtgagcaggtgttgggaggtccaggtgagccctacttgcccagtctgtaaggaccgcgcatctccagccgacttaaggaccaaccacacactcaacaaccttgtggagaagctattgagggaagaagcagagggagcgcgttggacgagctacaggttctctagggtgtgtaggctccatagaggacaactaagcctgttttgcctggaggataaagaactcctgtgttgtagttgccaggcagacccccgtcaccaaggtcacagggtgcagccagttaaggatactgctcacgattttcgtgttagatcactgatcgccgaagaaaggaggaattttctgcctacacaccagtggattgtgaccaagacccgcttgcaaacaagttccccgaaccttcagtctcgtcggcagggacaggttcaggagcatggtgcttgtaccgctggtgaaggccaggggctgctgggacacgcagctttgctcgatgcaatggctgaagagacacgacaaaagcagctattggctgatgagaaaatgaagcagctgacagaagagacagaagtgctggcacacgagattgagaggctacagatggagatgaaggaagacgatgtgagcttcctgatgaagcataaatcacgcaagcgacgactgttctgtactatggagcccgagccagtccaacctggtatgctcatcgacgtgtgcaaatacctgggctctctacagtatcgggtctggaaaaagatgcttgcctcagtggagtctgtcccgttttctttcgatcccaataccgcagccggttggttgtccgtctccgatgacctgacctccgttactaatcatggttacagggtgcaggtggagaaccctgagagattttcatcggcaccctgcttgctaggctctcgcgtcttctcacagggatcacacgcttgggaagtggccttaggaggtttacagtcctggcgtgttggcgtcgtgagggtcagacaagattcaggggcagaagggcatagtcactcatgttaccatgacactagatcaggattctggtatgtatgcaggacacagggagttgagggtgatcattgcgtgacatcagaccccgctacatccccactagtgctggccattcccagacgtctgcgtgttgagcttgagtgcgaggagggcgaactgtccttctacgacgcggagagacactgtcacttgtatacctttcacgctagattcggcgaagtgcgaccttacttttacttaggaggcgctcggggtgcaggccctccggaacctcttagaatttgccccctccacatcagcgtcaaagaggaactggacggatag

SEQ ID NO: 247536 - DNA, 4229 bp, Artificial Sequence
  derived and/or modified sequence
cactcgggtcgcgggcgttggcagccgggcgggtgggaggggccggagcaaaagttccgggcgcccgagccggctgctcgtgccatggagcggagtcccgacgtgtcccccgggccttcccgctccttcaaggaggagttgctctgcgccgtctgctacgaccccttccgcgacgcagtcactctgcgctgcggccacaacttctgccgcgggtgcgtgagccgctgctgggaggtgcaggtgtcgcccacctgcccagtgtgcaaagaccgcgcgtcacccgccgacctgcgcaccaaccacaccctcaacaacctggtggagaagctgctgcgcgaggaggccgagggcgcgcgctggaccagctaccgcttctcgcgtgtctgccgcctgcaccgcggacagctcagcctcttctgcctcgaggacaaggagctgctgtgctgctcctgccaggccgacccccgacaccaggggcaccgcgtgcagccggtgaaggacactgcccacgactttcgggccaagtgcaggaacatggagcatgcactgcgggagaaggccaaggccttctgggccatgcggcgctcctatgaggccatcgccaagcacaatcaggtggaggctgcatggctggaaggccggatccggcaggagtttgataagcttcgcgagttcttgagagtggaggagcaggccattctggatgccatggccgaggagacaaggcagaagcaacttctggccgacgagaagatgaagcagctcacagaggagacggaggtgctggcacatgagatcgagcggctgcagatggagatgaaggaggacgacgtttcttttctcatgaaacacaagagccgaaaacgccgactcttctgcaccatggagccagagccagtccagcccggcatgcttatcgatgtctgcaagtacctgggctccctgcagtaccgcgtctggaagaagatgcttgcatctgtggaatctgtacccttcagctttgaccccaacaccgcagctggctggctctccgtgtctgacgacctcaccagcgtcaccaaccatggctaccgcgtgcaggtggagaacccggaacgcttctcctcggcgccctgcctgctgggctcccgtgtcttctcacagggctcgcacgcctgggaggtggcccttggggggctgcagagctggagggtgggcgtggtacgtgtgcgccaggactcgggcgctgagggccactcacacagctgctaccacgacacacgctcgggcttctggtatgtctgccgcacgcagggcgtggagggggaccactgcgtgacctcggacccagccacgtcgcccctggtcctggccatcccacgccgcctgcgtgtggagctggagtgtgaggagggcgagctgtctttctatgacgcggagcgccactgccacctgtacaccttccacgcccgctttggggaggttcgcccctacttctacctggggggtgcacggggcgccgggcctccagagcctttgcgcatctgccccttgcacatcagtgtcaaggaagaactggatggctgagctggcccggggctgccccggtcttgtgccacagcactgttttctttctgccctcttcctaatgcccacactgcttgggcactattgcgcccctgcctccttgccaggctcttcctcctgtcctgcctggtccttttccatgactccaggctgtgcctctctccatgtttggtcccttctgtgcccatggtcaggagctattcgggtggcacctcgctggccaggctctcccgagtcgtggcacctccacaatgtgaattttctgaatccctattccaggatttctgggaataatgtttacttctagaatgggcctgttgtaaaccatctcatcgaggtgtggtaaagccattggatgaggaggggactgccatggaaaggagagtttgttacttacggttctgagaggaggggccacataggaaagccccacggtgggtcagaaggcggaaggagggaggggaacgtgtgggcaagagacttcctctggtttcctcaggaggaaatgggcaaggcagagtaagcaggggagacaggtttaagggtagctggcttgagtaatttcagtggctctcaggataggggctgccctttttgtctgatacctggccccgggatagtcaggacaggtgaatgttggcctggggtgtgacagccctgggagagccatgtgaaggaggcagctggcgccatcgctccggattagttggtttccataggaaaggcatgctttcagccagatgcttgccatctctagggattgggggattggctagcctgggaggatcagtctgtccaggtcagcgaggccccagataccagagcatcaagagtacaggaaatacagttaatgcagggcctctgtgtggctggatcctccgtctccatcagatcagctctgattgatctattcttgcacgatttcctctgaacacagggttccagagtacttaaacacaacattttttaaatcgtgatttcggcctatttccttgccaggcctgtttccccaccaggaaatgagataggaggactggatgaggatgtcctgttatagttgctgtggaggaagttcctctggttaattctcatcagcgtctgcagaaaagaaggaaagagggcacccttttcagttgggaagaaaggagaggggtggcgccatggacgtggccctaaacgctgtgggagagggaagaggaggctgggcctcgctgccctcttgtctctgctgacttcagcctggtcatgcttgctctgccacttgcgatttcatccctaatttcttcctccaccatgcctgcagacttttccctgggcttgttttttctcgcacatctctgaagagtttttaatcttcagctcatcatgtcccaggaagtggcatcataaaaggaaatatttttttttcctaggagcagtgttaaaatctgggtcacattcctgaccaaggacagcatcctgccttctgcccatccccttcagttcacaaaagctgacattttaaacaaatcatgactcacacgtattaattggttataaatatgttgtgtacactggttagataaaacttaaggccacaaggagggcccaggtaggcgatgtcagtgtgtgaaggggctggattgggcgtggtgaggatgttggcaaaccagtgcatgcacctggttggaagatgctcagcctcacaaaagctccaagccctttgggagccaaagtgtctgagagtgtgaccctctcctgtaaagtatttatcccacccattaatataatttctgtataataaacttgacctgaaattatttcattctttatattaaacttttaaaaatgttttttattttcaccttagatatgggaagagttttttttttttttttttttttaacaggataacttgagcaggctaggcctcttaaaaaaaaatttgagctaaaactcatttttcttttggcattttcttttcaatgttcttataagcaaagttcatccatgttgtagcatgtgttcaactttattttttcatcgggtaatattccattgtatggaatggtagtactacattttatttatcatgcatcgattggtggacatttggatcgtttctacttcttgactattatacataatgctgctaggaacttttgtgtatgagtttttgtgtggacatatgttttcatttctctttggtatatgcctgggagcagatttgctggatcatatgaaactctatttaacccttgagggactcccaaactgttttccaatgtggtgacacaattttatatcccatcaacagggcatgagggttctgatgactccacatccctcagtgctttttattatctatcttttaacttagccatcctagtaggggtaatgtggcatctcattgtgattttggtttgcatttccctgatggcgaatgatattgagcatcttttcatgagcttattggccatttgcatatcttcttaggacagctatctttagatcacttgctcattttttaattgggttatttgtctttttattattgagttgtaagagtccttttatagcctggcacaagtccctttaactggtatatgattataaaatttttctccgtgagctgtttcatttccttgatgatgtcctttgaaatactaaagcttttaattttg

SEQ ID NO: 247537 - DNA, 1482 bp, Artificial Sequence
  derived and/or modified sequence
atggagagaagccccgacgtgagccccggccccagcagaagcttcaaggaggagctgctgtgcgccgtgtgctacgaccccttcagagacgccgtgaccctgagatgcggccacaacttctgcagaggctgcgtgagcagatgctgggaggtgcaggtgagccccacctgccccgtgtgcaaggacagagccagccccgccgacctgagaaccaaccacaccctgaacaacctggtggagaagctgctgagagaggaggccgagggcgccagatggaccagctacagattcagcagagtgtgcagactgcacagaggccagctgagcctgttctgcctggaggacaaggagctgctgtgctgcagctgccaggccgaccccagacaccagggccacagagtgcagcccgtgaaggacaccgcccacgacttcagagccaagtgcagaaacatggagcacgccctgagagagaaggccaaggccttctgggccatgagaagaagctacgaggccatcgccaagcacaaccaggtggaggccgcctggctggagggcagaatcagacaggagttcgacaagctgagagagttcctgagagtggaggagcaggccatcctggacgccatggccgaggagaccagacagaagcagctgctggccgacgagaagatgaagcagctgaccgaggagaccgaggtgctggcccacgagatcgagagactgcagatggagatgaaggaggacgacgtgagcttcctgatgaagcacaagagcagaaagagaagactgttctgcaccatggagcccgagcccgtgcagcccggcatgctgatcgacgtgtgcaagtacctgggcagcctgcagtacagagtgtggaagaagatgctggccagcgtggagagcgtgcccttcagcttcgaccccaacaccgccgccggctggctgagcgtgagcgacgacctgaccagcgtgaccaaccacggctacagagtgcaggtggagaaccccgagagattcagcagcgccccctgcctgctgggcagcagagtgttcagccagggcagccacgcctgggaggtggccctgggcggcctgcagagctggagagtgggcgtggtgagagtgagacaggacagcggcgccgagggccacagccacagctgctaccacgacaccagaagcggcttctggtacgtgtgcagaacccagggcgtggagggcgaccactgcgtgaccagcgaccccgccaccagccccctggtgctggccatccccagaagactgagagtggagctggagtgcgaggagggcgagctgagcttctacgacgccgagagacactgccacctgtacaccttccacgccagattcggcgaggtgagaccctacttctacctgggcggcgccagaggcgccggcccccccgagcccctgagaatctgccccctgcacatcagcgtgaaggaggagctggacggctag

SEQ ID NO: 247538 - protein, 352 aa, Artificial Sequence
  derived and/or modified sequence
MGKVENSKSAQGLAGLRNLGNTCFMNSILQCLSNTRELRDYCLQRLYMRDLHHGSNAHTALVEEFAKLIQTIWTSSPNDVVSPSEFKTQIQRYAPRFVGYNQQDAQEFLRFLLDGLHNEVNRVTLRPKSNPENLDHLPDDEKGRQMWRKYLEREDSRIGDLFVGQLKSSLTCTDCGYCSTVFDPFWDLSLPIAKRGYPEVTLMDCMRLFTKEDVLDGDEKPTCCRCRGRKRCIKKFSIQRFPKILVLHLKRFSESRIRTSKLTTFVNFPLRDLDLREFASENTNHAVYNLYAVSNHSGTTMGGHYTAYCRSPGTGEWHTFNDSSVTPMSSSQVRTSDAYLLFYELASPPSRM

SEQ ID NO: 247539 - protein, 396 aa, Artificial Sequence
  derived and/or modified sequence
MRTSYTVTLPEDPPAAPFPALAKELRPRSPLSPSLLLSTFVGLLLNKAKNSKSAQGLAGLRNLGNTCFMNSILQCLSNTRELRDYCLQRLYMRDLHHGSNAHTALVEEFAKLIQTIWTSSPNDVVSPSEFKTQIQRYAPRFVGYNQQDAQEFLRFLLDGLHNEVNRVTLRPKSNPENLDHLPDDEKGRQMWRKYLEREDSRIGDLFVGQLKSSLTCTDCGYCSTVFDPFWDLSLPIAKRGYPEVTLMDCMRLFTKEDVLDGDEKPTCCRCRGRKRCIKKFSIQRFPKILVLHLKRFSESRIRTSKLTTFVNFPLRDLDLREFASENTNHAVYNLYAVSNHSGTTMGGHYTAYCRSPGTGEWHTFNDSSVTPMSSSQVRTSDAYLLFYELASPPSRM

SEQ ID NO: 247540 - DNA, 1059 bp, Artificial Sequence
  derived and/or modified sequence
atgggcaaggtggagaacagcaagagcgcccagggcctggccggcctgagaaacctgggcaacacctgcttcatgaacagcatcctgcagtgcctgagcaacaccagagagctgagagactactgcctgcagagactgtacatgagagacctgcaccacggcagcaacgcccacaccgccctggtggaggagttcgccaagctgatccagaccatctggaccagcagccccaacgacgtggtgagccccagcgagttcaagacccagatccagagatacgcccccagattcgtgggctacaaccagcaggacgcccaggagttcctgagattcctgctggacggcctgcacaacgaggtgaacagagtgaccctgagacccaagagcaaccccgagaacctggaccacctgcccgacgacgagaagggcagacagatgtggagaaagtacctggagagagaggacagcagaatcggcgacctgttcgtgggccagctgaagagcagcctgacctgcaccgactgcggctactgcagcaccgtgttcgaccccttctgggacctgagcctgcccatcgccaagagaggctaccccgaggtgaccctgatggactgcatgagactgttcaccaaggaggacgtgctggacggcgacgagaagcccacctgctgcagatgcagaggcagaaagagatgcatcaagaagttcagcatccagagattccccaagatcctggtgctgcacctgaagagattcagcgagagcagaatcagaaccagcaagctgaccaccttcgtgaacttccccctgagagacctggacctgagagagttcgccagcgagaacaccaaccacgccgtgtacaacctgtacgccgtgagcaaccacagcggcaccaccatgggcggccactacaccgcctactgcagaagccccggcaccggcgagtggcacaccttcaacgacagcagcgtgacccccatgagcagcagccaggtgagaaccagcgacgcctacctgctgttctacgagctggccagcccccccagcagaatgtag

SEQ ID NO: 247541 - DNA, 1191 bp, Artificial Sequence
  derived and/or modified sequence
atgagaaccagctacaccgtgaccctgcccgaggacccccccgccgcccccttccccgccctggccaaggagctgagacccagaagccccctgagccccagcctgctgctgagcaccttcgtgggcctgctgctgaacaaggccaagaacagcaagagcgcccagggcctggccggcctgagaaacctgggcaacacctgcttcatgaacagcatcctgcagtgcctgagcaacaccagagagctgagagactactgcctgcagagactgtacatgagagacctgcaccacggcagcaacgcccacaccgccctggtggaggagttcgccaagctgatccagaccatctggaccagcagccccaacgacgtggtgagccccagcgagttcaagacccagatccagagatacgcccccagattcgtgggctacaaccagcaggacgcccaggagttcctgagattcctgctggacggcctgcacaacgaggtgaacagagtgaccctgagacccaagagcaaccccgagaacctggaccacctgcccgacgacgagaagggcagacagatgtggagaaagtacctggagagagaggacagcagaatcggcgacctgttcgtgggccagctgaagagcagcctgacctgcaccgactgcggctactgcagcaccgtgttcgaccccttctgggacctgagcctgcccatcgccaagagaggctaccccgaggtgaccctgatggactgcatgagactgttcaccaaggaggacgtgctggacggcgacgagaagcccacctgctgcagatgcagaggcagaaagagatgcatcaagaagttcagcatccagagattccccaagatcctggtgctgcacctgaagagattcagcgagagcagaatcagaaccagcaagctgaccaccttcgtgaacttccccctgagagacctggacctgagagagttcgccagcgagaacaccaaccacgccgtgtacaacctgtacgccgtgagcaaccacagcggcaccaccatgggcggccactacaccgcctactgcagaagccccggcaccggcgagtggcacaccttcaacgacagcagcgtgacccccatgagcagcagccaggtgagaaccagcgacgcctacctgctgttctacgagctggccagcccccccagcagaatgtag

SEQ ID NO: 247542 - DNA, 1059 bp, Artificial Sequence
  derived and/or modified sequence
atgggcaaagtagagaattcaaagtcggcgcaaggcctcgccggtctcaggaatctcgggaatacctgttttatgaattcaatcctgcagtgcctgtctaacaccagggaactgcgcgactactgcttgcaacgtctgtacatgagagaccttcaccacggatccaacgctcacaccgcacttgtggaagaatttgccaagctcattcaaaccatctggacctcctccccaaacgatgtagtctcgccttctgaatttaaaacgcagatccagcggtacgctcccagatttgtgggctataatcagcaggacgctcaggagttcctgagatttctcctggacggacttcacaacgaagtgaatcgcgtgacactgagaccaaagagcaatccagaaaatttagatcacctacctgacgacgagaagggccggcagatgtggcggaaatacttagagagagaagattcaagaataggggacttgtttgtgggccagctgaagagttcacttacatgcacggactgcggatattgtagcaccgtctttgatcccttttgggaccttagtctgccaattgcaaaacggggataccccgaggtcactctgatggattgtatgcgcctgttcacaaaggaggatgttctggacggtgatgagaaacccacctgctgtcgttgtcgtggaaggaagcggtgtatcaagaaatttagcatccagcgcttccctaagattctggtgctgcatttgaagagatttagcgaaagtcgcattcggactagcaagcttactacatttgttaatttccccttgcgcgacctcgacctgagggagtttgcatctgagaatactaatcacgctgtgtacaacctctacgccgtttcaaaccactccgggaccactatgggcggtcactacaccgcctactgtcgatcccctgggaccggggaatggcacacattcaacgattcttccgtaactcctatgagctcatcacaggtgagaactagcgacgcctaccttctgttctacgaactcgcctcaccaccttctaggatgtag

SEQ ID NO: 247543 - DNA, 1191 bp, Artificial Sequence
  derived and/or modified sequence
atgcgaacttcatataccgttacactgccagaggatcctcccgcagccccctttcctgctttggccaaggagctaagaccccgcagccccctgtctcctagtctgttactcagtacctttgtgggactgctcctgaacaaggccaaaaattccaaaagcgctcagggtttagcgggactgcggaacctcggcaacacttgctttatgaattccattctacaatgcctcagtaatactcgcgagctgagagactattgcctgcaacgcctgtatatgcgtgacctacaccatggatctaatgcccatactgcactagtcgaggaattcgcaaaactgattcaaaccatctggaccagctcacccaatgacgtcgtttccccgtccgaattcaaaactcaaatccagcgatacgcccctaggttcgttgggtacaaccagcaggacgctcaagagtttctgaggttcctgctcgatggacttcataacgaagtgaaccgagtcacactcagaccaaaaagcaatccagagaacctagaccacctgccagacgatgagaaaggtcgccaaatgtggaggaagtacttagagagggaagattcacggatcggcgatctgtttgtaggccaactcaagagcagcctgacatgcacagactgcggttactgctctaccgtcttcgatcctttttgggacctatccctgcccatagccaagcggggttacccagaagtcacgttaatggattgtatgcgactgtttacgaaagaggacgtgttggacggggacgagaaacctacttgttgtcgatgccgcggcaggaagaggtgcatcaaaaagtttagcatccagaggttccccaagattttggtgctgcatctcaagagattctctgaaagccggatcagaacctcgaaactcacaacctttgtgaattttccactccgagacttggacttgcgcgaatttgcttcagagaacaccaatcatgccgtttacaacctctatgctgtgtctaatcactcagggacaacaatgggcgggcactataccgcctattgtcgatctcccgggactggggagtggcacaccttcaatgacagttccgtcactccaatgtcttcatctcaggtaagaacctccgacgcatatctgctgttctatgagctggcatctcccccctcccggatgtag

SEQ ID NO: 247544 - DNA, 1059 bp, Artificial Sequence
  derived and/or modified sequence
atgggcaaggtggagaacagcaagagcgcccagggcctggccggcctgaggaacctgggcaacacctgcttcatgaacagcatcctgcagtgcctgagcaacacccgggagctgcgggactactgcctgcagaggctgtacatgagggacctgcaccacggcagcaatgcccacacagccctggtggaggagtttgccaagctgatccagaccatctggaccagcagccccaatgatgtggtgagccccagcgagttcaagacccagatccagagatatgcccccaggtttgtgggctacaaccagcaggatgcccaggagttcctgcgcttcctgctggatggcctgcacaatgaggtgaacagagtgaccctgcggcccaagagcaaccctgagaacctggaccacctgcctgatgatgagaagggccggcagatgtggaggaagtacctggagcgggaggacagccgcatcggggacctgtttgtgggccagctgaagagcagcctgacctgcacagactgtggctactgcagcacagtgtttgaccccttctgggacctgagcctgcccatcgccaagaggggctacccagaggtgaccctgatggactgcatgaggctcttcaccaaggaggatgtgctggatggagatgagaagcccacctgctgccgctgccggggcaggaagcgctgcatcaagaagttcagcatccagcgcttccccaagatcctggtgctgcacctgaagcgcttcagcgagagccgcatccgcaccagcaagctgaccacctttgtgaacttccccctgcgggacctggacctgcgggagtttgccagcgagaacaccaaccacgctgtgtacaacctgtatgctgtgagcaaccacagcggcaccaccatgggcggccactacacagcctactgccgcagccctggcaccggggagtggcacaccttcaatgacagctctgtgacccccatgagcagcagccaggtgaggaccagtgatgcctacctgctcttctatgagctggccagcccccccagcaggatgtag

SEQ ID NO: 247545 - DNA, 1191 bp, Artificial Sequence
  derived and/or modified sequence
atgaggaccagctacacagtgaccctgcctgaagatcctcctgctgcccccttccctgccctggccaaggagctgcggcccaggagccccctgagccccagcctgctgctgagcacctttgtgggcctgctgctgaacaaggccaagaacagcaagagcgcccagggcctggccggcctgaggaacctgggcaacacctgcttcatgaacagcatcctgcagtgcctgagcaacacccgggagctgcgggactactgcctgcagaggctgtacatgagggacctgcaccacggcagcaatgcccacacagccctggtggaggagtttgccaagctgatccagaccatctggaccagcagccccaatgatgtggtgagccccagcgagttcaagacccagatccagagatatgcccccaggtttgtgggctacaaccagcaggatgcccaggagttcctgcgcttcctgctggatggcctgcacaatgaggtgaacagagtgaccctgcggcccaagagcaaccctgagaacctggaccacctgcctgatgatgagaagggccggcagatgtggaggaagtacctggagcgggaggacagccgcatcggggacctgtttgtgggccagctgaagagcagcctgacctgcacagactgtggctactgcagcacagtgtttgaccccttctgggacctgagcctgcccatcgccaagaggggctacccagaggtgaccctgatggactgcatgaggctcttcaccaaggaggatgtgctggatggagatgagaagcccacctgctgccgctgccggggcaggaagcgctgcatcaagaagttcagcatccagcgcttccccaagatcctggtgctgcacctgaagcgcttcagcgagagccgcatccgcaccagcaagctgaccacctttgtgaacttccccctgcgggacctggacctgcgggagtttgccagcgagaacaccaaccacgctgtgtacaacctgtatgctgtgagcaaccacagcggcaccaccatgggcggccactacacagcctactgccgcagccctggcaccggggagtggcacaccttcaatgacagctctgtgacccccatgagcagcagccaggtgaggaccagtgatgcctacctgctcttctatgagctggccagcccccccagcaggatgtag

SEQ ID NO: 247546 - DNA, 2678 bp, Artificial Sequence
  derived and/or modified sequence
atgggtaaagttgaaaattctaagagtgcccagggtctggctggtcttcgaaaccttgggaacacgtgcttcatgaactcaattctgcagtgcctgagcaacactcgggagttgagagattactgcctccagaggctctacatgcgggacctgcaccacggcagcaatgcacacacagccctcgtggaagagtttgcaaaactaattcagaccatatggacttcatcccccaatgatgtggtgagcccatctgagttcaagacccagatccagagatacgcaccgcgctttgttggctataatcagcaggatgctcaggagttccttcgctttcttctggatgggctccataacgaggtgaaccgagtgacactgagacctaagtccaaccctgagaacctcgatcatcttcctgatgacgagaaaggccgacagatgtggagaaaatatctagaacgggaagacagtaggatcggggatctctttgttgggcagctaaagagctcgctgacgtgtacagattgtggttactgttctacggtcttcgaccccttctgggacctctcactgcccattgctaagcgaggttatcctgaggtgacattaatggactgcatgaggctcttcaccaaagaggatgtgcttgatggagatgaaaagccaacatgctgtcgctgccgaggcagaaaacggtgtataaagaagttctccatccagaggttcccaaagatcttggtgctccatctgaagcggttctcagaatccaggatccgaaccagcaagctcacaacatttgtgaacttccccctaagagacctggacttaagagaatttgcctcagaaaacaccaaccatgctgtttacaacctgtacgctgtgtccaatcactccggaaccaccatgggtggccactatacagcctactgtcgcagtccagggacaggagaatggcacactttcaacgactccagcgtcactcccatgtcctccagccaagtgcgcaccagcgacgcctacctgctcttctacgaactggccagcccgccctcccgaatgtagcgccaggagccacgtcccttctcccttccccgtggtggccccgctccctaaattttttaaaaagacaaaaacaaaacaacaacaacaacacacaaacctgacaagagaaaaacaaacctgaagctgccgagcaggagtggatgcagcctgatcagggtctggagcaaggagccgggctttcctgagctgtggcccggcagggaagatcgcctggacgtggagccagcatcgccccgtgccctcggcgtttgcatttgtaaacttgtggtcttcctatgtgtcagaaacaactgtgtcttgggggggaagaccctcgctgcgccgcttcccgccgcagcgcccgcgcctccgaggggacagcgccctctggagctcgctgggagcatcaccgcctggacgcccgcgccgcggaggagccggcgcccatctccacccgcacggctcgccggtccagagccatgagccaagagccctcttcacgctgctaactccaggggacagacgaagggacatctttggaaaacgctggttttggtttttaaaaagcccaactttttttttttaatttccataactaaagtgttcagactggagtgctctccttcaggcctcttcatagctgggacgttgcactggtccttttattgcttttccaagtacaactttctaatgctagccctccgtggtgctaggtgggcgttggccaggccccaagcacagccacagtagacctgggatctaaaacaagtttctgttttgggggtttgggttttttttttttttttttaatgttttgaatggaatttagttgcctccaagaattgtgccttatagcatttggggaccagggggtaactgcccctcctgaaatatccctcagcctcttcccttttccccagtgctctgttcaaacccgcctgggaaagggatcctgcccttagccctggctcgttgtgcattgcagtgaggcaaagaagaaagcaggtagattccttccgacagggcatcaagttcttcccgcccacgtcctctagcccacccctggtctgctccccagctgtttgaaggatagcacaagcccctcgtccctagagcttctctcccttttatttattctcttaacatccctttccccctggccttcctgcccccgcccccttctcagagcctcctagacaataggccctttggaccgagtttctcagggatgcccaggccacccctcagctcttcttagcgctggtctccagtcctgccctgggagctggagcctgggtatttggggacatcttgcctcagttgtatggttctttcctgtgggctcaattttgccctacatagttggataaaactctgtgctgtcctggagagtaaagctgttcacccacacagctgggcccggcttgtgccccgtggagcctggcacattccaggctcctaggaggaggcatcagagaaagacaccctgagttttactggcctgacacccttctccagagaagacctgtgaacctgagcccaagggcaagtgtacacttgtttactgtgtaagcaagagtagaagaatgtctaatgtacagtggaaccttgtacagaataaataatagctttgagaaatc

SEQ ID NO: 247547 - DNA, 1059 bp, Artificial Sequence
  derived and/or modified sequence
atgggcaaggtggagaacagcaagagcgcccagggcctggccggccttcggaacctgggcaatacctgttttatgaatagcatactccaatgtttgtctaacaccagagaattgagagactactgcctgcagagactgtacatgcgagacctgcatcacggaagcaatgcgcataccgctctggtcgaagaatttgcaaagctcatccaaacaatctggacttcatctcccaatgacgtagtgagcccatcagaatttaagacccagatccagcgttacgcaccccgctttgttggctacaatcagcaggacgctcaggagttcctgaggttcctgctggatggtttgcataatgaggtcaatagggtcaccctcaggcctaagtccaacccagagaatttggaccacctgcctgatgatgagaagggtaggcagatgtggcgtaaatacctcgagagggaagactctcggattggcgacctgtttgtgggacagctcaaatcatcgctaacgtgtacggactgcggctactgttctaccgtgtttgacccattttgggatctgtctttgcccattgccaaaagaggatatcctgaagtgacactgatggattgcatgcggctctttacaaaggaagatgtcctggacggcgatgagaagccaacgtgctgtaggtgtcgcggccggaagcgctgtattaaaaaattttcgattcagcgtttccccaagatccttgtcctgcacctgaagcgtttttctgagtccaggattcggacttctaagcttacaacctttgtgaattttcctctccgagacctggatttgcgggagttcgcttcagaaaacaccaaccatgcggtctataatctctatgccgtatcaaatcactccggcaccaccatgggcggccactataccgcatattgccgcagccccgggaccggggagtggcacacctttaatgattcttcagtgacccctatgagtagcagtcaagttagaacatccgatgcatacctgctgttttacgagcttgcctccccaccttccaggatgtag

SEQ ID NO: 247548 - DNA, 1191 bp, Artificial Sequence
  derived and/or modified sequence
atgcggaccagctacaccgtgaccctgcccgaggacccccccgccgcacccttcccagctctggccaaggagctgaggccgagatcccctctgagcccctcgcttctgctatcaaccttcgtaggactgcttctgaataaagcgaagaacagcaagagtgctcagggcctcgctgggcttcgcaatctgggaaatacttgttttatgaattccatcttgcagtgtctgtccaatacacgggagctgcgagattactgtctccaacggctgtatatgagagatctccatcacggaagcaacgctcacacggcgctcgtggaagagtttgccaaactcatacaaacaatttggaccagctcccctaacgatgtcgtgtccccttctgaattcaaaacacagatccagcggtacgcacctcgcttcgtcgggtacaaccagcaggatgctcaggagtttctacgatttttattggacggcctccacaacgaagtaaaccgggtcactctccgccctaagtccaatcccgagaatttagatcatctgcccgacgatgagaaggggcggcagatgtggcgcaaataccttgaaagggaggactctagaatcggtgatctgtttgtgggacagctgaagagcagtttaacatgcactgactgtggctattgcagcaccgtgtttgatcccttctgggacctgtccctgccaatcgcgaagagaggctaccccgaagtgactctcatggactgcatgaggctgtttactaaagaggacgttttagacggggatgaaaaacccacgtgctgccgatgtcgcggcagaaagcgctgcattaaaaaattctcaatccaacgattccctaaaattctggtccttcacctgaagagattcagcgagagtcggatccgtacctcaaaactaactacgttcgttaacttcccacttagggatctcgacctccgcgagtttgctagcgaaaatactaaccacgcggtctacaacttgtatgctgtgagcaatcattcaggaacaactatgggaggccattacaccgcttattgtcgttcaccaggaacgggcgagtggcacaccttcaacgattcatccgtgacccccatgagttcttctcaggtcagaacctccgatgcttacctattgttctatgagctggcaagtcccccatcaaggatgtag

SEQ ID NO: 247549 - DNA, 1059 bp, Artificial Sequence
  derived and/or modified sequence
atgggcaaggttgagaacagcaaaagtgctcagggactggctggcttacgaaacctaggcaatacgtgttttatgaactccatcttgcagtgcctgtcaaatacgagagagctccgggactactgtctacagcggttgtatatgcgtgacctgcaccatgggtccaacgcccatacagcgttagtggaagagtttgcaaagctgatccagaccatatggacttcctcccccaatgatgtggtttccccttctgaattcaaaactcaaatacaacgctatgccccaaggtttgtgggttacaatcagcaggacgcacaggagtttctccggtttctactggacggcttgcacaacgaagttaatcgggtgaccctgaggcccaagagcaacccggaaaacttggaccatcttccagacgatgaaaagggcagacagatgtggcggaaatacctcgagcgggaagactcgcggatcggagatctgtttgttggccagctgaagtcctcactcacttgcactgactgtggctattgctctaccgtctttgacccattctgggatttgtccctccccatagccaaaaggggctaccccgaagtgacactgatggattgtatgcgtctgtttaccaaagaagacgtcttggacggagacgagaagcctacctgctgccgctgcagggggagaaaacgttgcataaaaaaattctccatccagagatttcccaagattctggttctgcatttgaaaaggttttccgagagtcggattagaaccagcaagctcaccacctttgtaaacttccctctcagagatctcgaccttcgcgaatttgcaagtgagaacaccaaccatgcagtctataacttgtatgctgtgtcaaaccactcaggaaccaccatgggcggtcactataccgcctattgccgtagcccaggcacaggcgagtggcacacttttaacgattcgtcagttacacccatgagctccagccaagtacgaacctcagacgcctatctccttttctacgagcttgccagcccccctagtcgcatgtag

SEQ ID NO: 247550 - DNA, 1191 bp, Artificial Sequence
  derived and/or modified sequence
atgcggacatcttataccgtcacgttgcctgaggacccaccagctgcaccttttcccgcactagccaaggagctgcgtcccagatcgcccttatcacccagtctcctgttatccacatttgttggcctgcttctgaacaaggccaagaactcgaagtccgcccagggactagctggcctcagaaaccttggtaatacttgctttatgaactccatcctccagtgcttaagtaacacaagggagctgagggactattgcctccagcggctgtatatgcgggatctgcatcacggaagtaacgcccatactgctctggtcgaggagttcgctaagctcattcagacaatctggactagctcgccgaacgacgtggtctcaccatctgagttcaaaactcagatccaacggtacgcccctcgcttcgtgggatataaccagcaagacgcacaggaattcctgcgctttctgctggacggcctgcacaacgaagtcaatagagtgaccttgcgcccaaagtctaatccggaaaaccttgaccacctgccagatgacgaaaaggggcgtcagatgtggcgcaagtatctcgagcgggaagattctaggatcggtgatcttttcgtgggccagttaaaatcatctcttacctgcactgactgtggctactgctccacagtattcgacccattctgggacttaagtctccctattgcaaaacgagggtatcccgaagtaacccttatggactgtatgaggctgtttaccaaggaagacgtactggacggcgacgagaaaccaacctgttgtcgttgtaggggcaggaagcgctgcattaagaaattctccatacagcggtttcctaagatacttgtgctgcaccttaaaaggttctctgagtcgaggattagaaccagcaagctgacaacttttgtgaacttcccacttcgggatttagatctccgcgagttcgcctccgagaataccaaccatgctgtgtacaatctgtacgccgtgagtaatcattcagggaccacaatgggcggtcactacactgcatactgtcgatcacctggcaccggggaatggcatactttcaacgactcgtcagtcacgcctatgtcatcttctcaagtgcgcacatctgatgcttacctgctgttctatgagcttgcttcccctccttcacgcatgtag

SEQ ID NO: 247551 - DNA, 1704 bp, Artificial Sequence
  derived and/or modified sequence
gtcggccggagcgcgagagccgggacccgggctgttggcggcgcacgccggggaggttgaggcggaggagcgcgcgttcgggcgccgcggacgctgtcctgtagcggtctcgccggcctcggcgtccggactgtggcaccgcgcggggactccccccgcgcccccgctgccaacgttaagcgagggccaaagcccgccgcccgccccccagcatgcgcacctcgtacaccgtgaccctgcccgaggacccccccgccgccccctttcccgccctcgccaaggagctgcggccgcgctcccctctctccccgtccctgctgctctccaccttcgtggggctcctgctcaacaaagccaagaattctaagagtgcccagggtctggctggtcttcgaaaccttgggaacacgtgcttcatgaactcaattctgcagtgcctgagcaacactcgggagttgagagattactgcctccagaggctctacatgcgggacctgcaccacggcagcaatgcacacacagccctcgtggaagagtttgcaaaactaattcagaccatatggacttcatcccccaatgatgtggtgagcccatctgagttcaagacccagatccagagatacgcaccgcgctttgttggctataatcagcaggatgctcaggagttccttcgctttcttctggatgggctccataacgaggtgaaccgagtgacactgagacctaagtccaaccctgagaacctcgatcatcttcctgatgacgagaaaggccgacagatgtggagaaaatatctagaacgggaagacagtaggatcggggatctctttgttgggcagctaaagagctcgctgacgtgtacagattgtggttactgttctacggtcttcgaccccttctgggacctctcactgcccattgctaagcgaggttatcctgaggtgacattaatggactgcatgaggctcttcaccaaagaggatgtgcttgatggagatgaaaagccaacatgctgtcgctgccgaggcagaaaacggtgtataaagaagttctccatccagaggttcccaaagatcttggtgctccatctgaagcggttctcagaatccaggatccgaaccagcaagctcacaacatttgtgaacttccccctaagagacctggacttaagagaatttgcctcagaaaacaccaaccatgctgtttacaacctgtacgctgtgtccaatcactccggaaccaccatgggtggccactatacagcctactgtcgcagtccagggacaggagaatggcacactttcaacgactccagcgtcactcccatgtcctccagccaagtgcgcaccagcgacgcctacctgctcttctacgaactggccagcccgccctcccgaatgtagcgccaggagccacgtcccttctcccttccccgtggtggccccgctccctaaattttttaaaaagacaaaaacaaaacaacaacaacaacacacaaacctgacaagagaaaaacaaacctgaagctgccgagcaggagtggatgcagcctgatcagggtctggagcaaggagccgggctttcctgagctgtggcccggcagggaagatcgcctggacgtggagccagcatcgccccgtgccctcggcgtttgcatttgtaaacttgtggtcttcctatgtgtcagaaacaactgtgtcttgg

SEQ ID NO: 247552 - protein, 213 aa, Artificial Sequence
  derived and/or modified sequence
MEAIWLYQFRLIVIGDSTVGKSCLIRRFTEGRFAQVSDPTVGVDFFSRLVEIEPGKRIKLQIWDTAGQERFRSITRAYYRNSVGGLLLFDITNRRSFQNVHEWLEETKVHVQPYQIVFVLVGHKCDLDTQRQVTRHEAEKLAAAYGMKYIETSARDAINVEKAFTDLTRDIYELVKRGEITIQEGWEGVKSGFVPNVVHSSEEVVKSERRCLC

SEQ ID NO: 247553 - DNA, 642 bp, Artificial Sequence
  derived and/or modified sequence
atggaggcgatctggctatatcagttcaggttgattgtgatcggagatagcaccgttgggaagagctgcctgatccgacggtttactgaaggccggttcgcccaggtgagtgaccccaccgtgggagtggatttcttctcacgccttgtagaaatcgagccaggcaaaaggattaaactccagatttgggacacagcaggccaggagcgattccggagtatcacgcgtgcgtactacaggaattctgtaggtggactgctgctgttcgacattaccaacaggagatcatttcagaacgtccatgaatggcttgaagaaactaaagtacacgttcaaccttatcagatcgtgttcgtgctcgtcggacacaagtgcgacctggatacgcaaaggcaggtcactagacatgaagcagaaaagttagccgctgcctacggcatgaaatatatcgaaacttcagctagggacgctatcaatgtggagaaggcctttactgatctgacacgcgacatatacgagctcgttaagcgcggagaaatcactattcaggagggttgggagggggtcaaatccggtttcgtccccaacgttgtgcactcctctgaagaggtcgtgaaatccgagagacgctgtctgtgttag

SEQ ID NO: 247554 - DNA, 642 bp, Artificial Sequence
  derived and/or modified sequence
atggaggccatctggctgtaccagttccgcctcatcgtcatcggggacagcacagtgggcaagagctgcctgatccgccgcttcacagagggccgctttgcccaggtgtctgaccccaccgtgggcgtggacttcttcagccggctggtggagattgagcccgggaagaggatcaagctgcagatctgggacacagctggccaggagcgcttccgcagcatcacccgggcctactacagaaacagcgtgggcggcctgctgctgtttgacatcaccaacagaagaagcttccagaatgtgcatgagtggctggaggagaccaaggtgcacgtgcagccctaccagatcgtgtttgtgctggtgggccacaagtgtgacctggacacccagaggcaggtgaccaggcatgaggccgagaagctggccgccgcctacggcatgaagtacatcgagaccagcgccagagatgccatcaacgtggagaaggccttcacagacctgacccgggacatctatgagctggtgaagagaggagagatcaccatccaggagggctgggagggcgtgaagagcggctttgtgcccaacgtggtgcacagcagcgaggaggtggtgaagtcagaaagacgctgcctgtgctag

SEQ ID NO: 247555 - DNA, 642 bp, Artificial Sequence
  derived and/or modified sequence
atggaggccatctggctgtaccagttccggctgatcgtgatcggcgacagcaccgtgggaaagagttgcttgattagaagattcacagaaggtaggtttgctcaagtaagcgacccaacagtgggggtcgattttttctctcgtttagtggagatagagccaggcaagcggattaagcttcagatctgggacaccgccggacaggagaggtttaggtcaataacccgcgcatattatagaaacagcgtcggaggcctgcttctcttcgacattacaaatcgtcggagtttccaaaatgtgcacgagtggttagaggaaaccaaggtgcacgtacagccttaccagattgtcttcgttctggttggccacaagtgcgatctcgacacccagcggcaggttaccaggcacgaagccgagaaacttgccgctgcctacggcatgaaatacattgagacctctgcccgggatgcaatcaatgtggagaaggccttcaccgaccttactcgagatatttatgagcttgtaaagcgaggtgagattaccatacaggagggatgggagggagtcaaatctgggtttgtacccaatgtggtgcactcaagtgaggaggtggtgaagtccgagcgccggtgcctttgctag

SEQ ID NO: 247556 - DNA, 642 bp, Artificial Sequence
  derived and/or modified sequence
atggaagccatctggctgtaccagttcaggctcatcgtgataggagacagcactgtgggcaagtcatgtctgatcagacggttcaccgaaggcagatttgctcaggtgtcagatcccacagtgggtgtcgatttcttcagcaggcttgttgaaatagaacctggcaagcgtataaagctgcagatctgggatacagccggacaggagcggttccgctctattacacgggcttattacagaaactccgtcggaggactccttttgtttgatattaccaatagaagatccttccagaacgtgcatgagtggctcgaggagaccaaggtgcatgtgcagccataccagattgtctttgttctcgtgggccataaatgcgacctcgatacacagcggcaggtgactagacatgaagccgaaaaactagcagccgcttacggcatgaaatacattgaaacctccgctagggatgcgatcaacgtcgaaaaagcattcactgaccttactcgagatatttacgagttggtgaagaggggcgaaatcaccatccaggagggatgggagggagtaaagtctgggttcgtaccaaatgttgttcattcatcagaagaagttgtcaagtccgagcgtcgctgcctgtgctag

SEQ ID NO: 247557 - DNA, 3505 bp, Artificial Sequence
  derived and/or modified sequence
ctcttacagatagtgcggcggcccaggcgtcgcgtctacgcgggggattacagtaacccggttgtcagtgatgagtcagagtgcgtggtgctgatgctgctgccatttcatcacctttgcgagcgcagcatccatccctccgctctcccggcgcctgggcctacccagcttcgggctcccaggccagcgatgcgctcgcggctgagctagatcctgccgagccgcgctctctgaggcgtcggcggggcgccccctcccgccgtccccggtccgggccaaggagacctgcagagccgcggccatggaggccatctggctgtaccagttccggctcattgtcatcggggattccacagtgggcaagtcctgcctgatccgccgcttcaccgagggtcgctttgcccaggtttctgaccccaccgtgggggtggattttttctcccgcttggtggagatcgagccaggaaaacgcatcaagctccagatctgggataccgcgggtcaagagaggttcagatccatcactcgcgcctactacaggaactcagtaggtggtcttctcttatttgacattaccaaccgcaggtccttccagaatgtccatgagtggttagaagagaccaaagtacacgttcagccctaccaaattgtatttgttctggtgggtcacaagtgtgacctggatacacagaggcaagtgactcgccacgaggccgagaaactggctgctgcatacggcatgaagtacattgaaacgtcagcccgagatgccattaatgtggagaaagccttcacagacctgacaagagacatatatgagctggttaaaaggggggagattacaatccaggagggctgggaaggggtgaagagtggatttgtaccaaatgtggttcactcttcagaagaggttgtcaaatcagagaggagatgtttgtgctagtcagttcttttatttccaaaacatgctctcctacttgaactgaaaagtaagagaaataaatagaatctttgtgtaactgatgagaactcaacctccatttggataccaagtgagcctccctctcagggggactctgacagactcgtgtgcgggtggatgggggtgcctgagtgctgtgaccaagggactgaattgctgacatgggccaggccaggcactgttttgtggcccatgctaggcagtggctgctccatgagccctttgtggaccacatgttaaaggcctggggtttaggaagctaagtcccaggaaaacatacctacagacaggacaactgttccttggtatttgagctcacttataggccatgaacataaagaaatacataaaggggaaaaaagtttcacaatggggacaattagcataactaaacaaagattatgagctctacttattccgtgagaataccctgcaccaaaggtgtttgctgggtttggttaaaaggtaccaattagcttttaacagctttctgtaaaatgaggaacacagaccaaaaggtctggtgttcaagtaaaaatgatgtgactatggaaaggaaggcaatcgacacagttattagcacatttcagaaaatgaacacccttgtgatagaattaccagctgtatgaaacaaattgtcccatgcaaattaccctataactaggaaagagacactataacccaaatgccataccccctttttcctttgaccatgcctggggtttcaatgccttggcacctgcaatctggaagtaaacagtctgcttgcttcttcaggcacgtgacagtgacaacacagtgactgcctctgaaaagagccctgaggcaaacactctctcctgctgaacaggaggcactgtaacccttacaaacagcttacagttacttgggctacttatttgatcatcataacaggcctacgaggtttttgccccattttacagaatagtaaactaagagccatgaaaatcacttggccagggtcaaggactcgtgactcctagctcttttcactgcatcatactgctgtcagatgaataaatgattatgaatttgtttacttgggaagagatatgactataaataaatgttctctacatgttaggatatgttttccttattgattacaactcagctataatcctgagggaacatgggaaggaatcaaaggtaaagcccattcaggcattattgacaagagggctttaaacaagtgaataattgcacaactaaaaagacattagaactgtgtgggctataagtgttcttatcactgagacacagtggatttttattgaaaggaaccacgtacagcaatgcggagtgggatagggataaaatacccaccccaaaatgaccttggccacctgtctgccatatacgtacactgagttcctgtctacccaagagagtcagcccttaattctcaggtgaacaaacagctaactgcatcagcaaattggaatggctggcttgaagtttccattattttcttgaagagaggtgatgctttaaattactttttggattgtagccagttcagctaggcaaaagccatacttttcacaattaaaaaaaaaaactattctgactagagtcaggtttctcatatccatcgtgataggaaggcctaagaatggcaaatcgctttgagatataatattgaacttcagtatgaatgtgaccgaatctgaaactttgggaatttgctttagccagaataaagaaaccaaatcatgaaaattatggaagactattctgccacctgtgccccaagttggatgagcaaaccactttggatcagttcacagcattaactacaagtgaactgatcatcttctctatattcatttcacaagagctggcttaggtggggtaattaaattgccaccttcgtggttgtaaaagacaaacaaaacatggcaaatttcattaacacaaaatttcatcaactgctatactgaattatgtttagaagattctgaaagcaagattatccagtgggtaaatgagagtcgactggattctgtcagttcaaaaaaggaaagaaacaaaacttccctacaattttcttcactaaaatttattatatgtacagtattcccactcctggcattttctggcaggtttaaaaatattcagcataaatccagcagaggtggctgagcttaattgcttaaataagttctagaaaatttaaaaatcattttagtagaattcagtaccattgtcactgcaataagtgggttttagaaaataagtgtgaaaagaatcaggtgttaatataatactaaggataaagctttagaagctattttactacataggtaaagaaaagataaactaacttgtaacaaagaccacaactgcatgttggattagattgtctcatatttcagaataaaatgtactgtatacttttcctcactttgttgtgcactgtaatgaaatgtgaaaaatgctttatttagctgtatgtgaatgaaaatatgcttgtatttagtaaaatgattgattatgtga

SEQ ID NO: 247558 - DNA, 642 bp, Artificial Sequence
  derived and/or modified sequence
atggaggccatctggctgtaccagttcagactgatcgtgatcggcgacagcaccgtgggcaagagctgcctgatcagaagattcaccgagggcagattcgcccaggtgagcgaccccaccgtgggcgtggacttcttcagcagactggtggagatcgagcccggcaagagaatcaagctgcagatctgggacaccgccggccaggagagattcagaagcatcaccagagcctactacagaaacagcgtgggcggcctgctgctgttcgacatcaccaacagaagaagcttccagaacgtgcacgagtggctggaggagaccaaggtgcacgtgcagccctaccagatcgtgttcgtgctggtgggccacaagtgcgacctggacacccagagacaggtgaccagacacgaggccgagaagctggccgccgcctacggcatgaagtacatcgagaccagcgccagagacgccatcaacgtggagaaggccttcaccgacctgaccagagacatctacgagctggtgaagagaggcgagatcaccatccaggagggctgggagggcgtgaagagcggcttcgtgcccaacgtggtgcacagcagcgaggaggtggtgaagagcgagagaagatgcctgtgctag

SEQ ID NO: 247559 - protein, 1228 aa, Artificial Sequence
  derived and/or modified sequence
MSRRKQAKPQHLKSDEELLPPDGAPEHAAPGEGAEDADSGPESRSGGEETSVCEKCCAEFFKWADFLEHQRSCTKLPPVLIVHEDAPAPPPEDFPEPSPASSPSERAESEAAEEAGAEGAEGEARPVEKEAEPMDAEPAGDTRAPRPPPAAPAPPTPAYGAPSTNVTLEALLSTKVAVAQFSQGARAAGGSGAGGGVAAAAVPLILEQLMALQQQQIHQLQLIEQIRSQVALMQRPPPRPSLSPAAAPSAPGPAPSQLPGLAALPLSAGAPAAAIAGSGPAAPAAFEGAQPLSRPESGASTPGGPAEPSAPAAPSAAPAPAAPAPAPAPQSAASSQPQSASTPPALAPGSLLGAAPGLPSPLLPQTSASGVIFPNPLVSIAATANALDPLSALMKHRKGKPPNVSVFEPKASAEDPFFKHKCRFCAKVFGSDSALQIHLRSHTGERPFKCNICGNRFSTKGNLKVHFQRHKEKYPHIQMNPYPVPEYLDNVPTCSGIPYGMSLPPEKPVTTWLDSKPVLPTVPTSVGLQLPPTVPGAHGYADSPSATPASRSPQRPSPASSECASLSPGLNHVESGVSATAESPQSLLGGPPLTKAEPVSLPCTNARAGDAPVGAQASAAPTSVDGAPTSLGSPGLPAVSEQFKAQFPFGGLLDSMQTSETSKLQQLVENIDKKMTDPNQCVICHRVLSCQSALKMHYRTHTGERPFKCKICGRAFTTKGNLKTHFGVHRAKPPLRVQHSCPICQKKFTNAVVLQQHIRMHMGGQIPNTPLPEGFQDAMDSELAYDDKNAETLSSYDDDMDENSMEDDAELKDAATDPAKPLLSYAGSCPPSPPSVISSIAALENQMKMIDSVMSCQQLTGLKSVENGSGESDRLSNDSSSAVGDLESRSAGSPALSESSSSQALSPAPSNGESFRSKSPGLGAPEEPQEIPLKTERPDSPAAAPGSGGAPGRAGIKEEAPFSLLFLSRERGPSQSTPSLISSAAPTMIKMEVNGHGKAMALGEGPPLPAGVQVPAGPQTVMGPGLAPMLAPPPRRTPKQHNCQSCGKTFSSASALQIHERTHTGEKPFGCTICGRAFTTKGNLKVHMGTHMWNNAPARRGRRLSVENPMALLGGDALKFSEMFQKDLAARAMNVDPSFWNQYAAAITNGLAMKNNEISVIQNGGIPQLPVSLGGSALPPLGSMASGMDKARTGSSPPIVSLDKASSETAASRPFTRFIEDNKEIGIN

SEQ ID NO: 247560 - protein, 1300 aa, Artificial Sequence
  derived and/or modified sequence
MSRRKQAKPQHLKSDEELLPPDGAPEHAAPGEGAEDADSGPESRSGGEETSVCEKCCAEFFKWADFLEHQRSCTKLPPVLIVHEDAPAPPPEDFPEPSPASSPSERAESEAAEEAGAEGAEGEARPVEKEAEPMDAEPAGDTRAPRPPPAAPAPPTPAYGAPSTNVTLEALLSTKVAVAQFSQGARAAGGSGAGGGVAAAAVPLILEQLMALQQQQIHQLQLIEQIRSQVALMQRPPPRPSLSPAAAPSAPGPAPSQLPGLAALPLSAGAPAAAIAGSGPAAPAAFEGAQPLSRPESGASTPGGPAEPSAPAAPSAAPAPAAPAPAPAPQSAASSQPQSASTPPALAPGSLLGAAPGLPSPLLPQTSASGVIFPNPLVSIAATANALDPLSALMKHRKGKPPNVSVFEPKASAEDPFFKHKCRFCAKVFGSDSALQIHLRSHTGERPFKCNICGNRFSTKGNLKVHFQRHKEKYPHIQMNPYPVPEYLDNVPTCSGIPYGMSLPPEKPVTTWLDSKPVLPTVPTSVGLQLPPTVPGAHGYADSPSATPASRSPQRPSPASSECASLSPGLNHVESGVSATAESPQSLLGGPPLTKAEPVSLPCTNARAGDAPVGAQASAAPTSVDGAPTSLGSPGLPAVSEQFKAQFPFGGLLDSMQTSETSKLQQLVENIDKKMTDPNQCVICHRVLSCQSALKMHYRTHTGERPFKCKICGRAFTTKGNLKTHFGVHRAKPPLRVQHSCPICQKKFTNAVVLQQHIRMHMGGQIPNTPLPEGFQDAMDSELAYDDKNAETLSSYDDDMDENSMEDDAELKDAATDPAKPLLSYAGSCPPSPPSVISSIAALENQMKMIDSVMSCQQLTGLKSVENGSGESDRLSNDSSSAVGDLESRSAGSPALSESSSSQALSPAPSNGESFRSKSPGLGAPEEPQEIPLKTERPDSPAAAPGSGGAPGRAGIKEEAPFSLLFLSRERGKCPSTVCGVCGKPFACKSALEIHYRSHTKERPFVCALCRRGCSTMGNLKQHLLTHRLKELPSQLFDPNFALGPSQSTPSLISSAAPTMIKMEVNGHGKAMALGEGPPLPAGVQVPAGPQTVMGPGLAPMLAPPPRRTPKQHNCQSCGKTFSSASALQIHERTHTGEKPFGCTICGRAFTTKGNLKVHMGTHMWNNAPARRGRRLSVENPMALLGGDALKFSEMFQKDLAARAMNVDPSFWNQYAAAITNGLAMKNNEISVIQNGGIPQLPVSLGGSALPPLGSMASGMDKARTGSSPPIVSLDKASSETAASRPFTRFIEDNKEIGIN

SEQ ID NO: 247561 - protein, 960 aa, Artificial Sequence
  derived and/or modified sequence
MSRRKQAKPQHLKSDEELLPPDGAPEHAAPGEGAEDADSGPESRSGGEETSVCEKCCAEFFKWADFLEHQRSCTKLPPVLIVHEDAPPGLPSPLLPQTSASGVIFPNPLVSIAATANALDPLSALMKHRKGKPPNVSVFEPKASAEDPFFKHKCRFCAKVFGSDSALQIHLRSHTGERPFKCNICGNRFSTKGNLKVHFQRHKEKYPHIQMNPYPVPEYLDNVPTCSGIPYGMSLPPEKPVTTWLDSKPVLPTVPTSVGLQLPPTVPGAHGYADSPSATPASRSPQRPSPASSECASLSPGLNHVESGVSATAESPQSLLGGPPLTKAEPVSLPCTNARAGDAPVGAQASAAPTSVDGAPTSLGSPGLPAVSEQFKAQFPFGGLLDSMQTSETSKLQQLVENIDKKMTDPNQCVICHRVLSCQSALKMHYRTHTGERPFKCKICGRAFTTKGNLKTHFGVHRAKPPLRVQHSCPICQKKFTNAVVLQQHIRMHMGGQIPNTPLPEGFQDAMDSELAYDDKNAETLSSYDDDMDENSMEDDAELKDAATDPAKPLLSYAGSCPPSPPSVISSIAALENQMKMIDSVMSCQQLTGLKSVENGSGESDRLSNDSSSAVGDLESRSAGSPALSESSSSQALSPAPSNGESFRSKSPGLGAPEEPQEIPLKTERPDSPAAAPGSGGAPGRAGIKEEAPFSLLFLSRERGPSQSTPSLISSAAPTMIKMEVNGHGKAMALGEGPPLPAGVQVPAGPQTVMGPGLAPMLAPPPRRTPKQHNCQSCGKTFSSASALQIHERTHTGEKPFGCTICGRAFTTKGNLKVHMGTHMWNNAPARRGRRLSVENPMALLGGDALKFSEMFQKDLAARAMNVDPSFWNQYAAAITNGLAMKNNEISVIQNGGIPQLPVSLGGSALPPLGSMASGMDKARTGSSPPIVSLDKASSETAASRPFTRFIEDNKEIGIN

SEQ ID NO: 247562 - DNA, 4775 bp, Artificial Sequence
  derived and/or modified sequence
atgtctcggcgcaagcaggccaagccccagcacctcaagtcggacgaggagctgctgccgcctgacggggctcccgagcacgccgccccgggggaaggtgcggaggacgcagacagcgggcccgagagccgcagcgggggcgaggagaccagcgtgtgcgagaaatgctgcgccgagttcttcaagtgggcggacttcctggagcaccagcggagctgcaccaagctcccgcccgtgctgatcgtgcacgaggacgcgcccgcgccgccccccgaggacttccccgagccttcgcccgccagctcccccagcgagcgcgccgaaagcgaggcggccgaggaggcgggtgcggagggcgcggagggcgaggccaggccggtggagaaggaggccgagcccatggacgcggaacccgcgggggacacgcgcgcgccccggcccccgcctgcggcccctgcacccccaacgcccgcctacggcgcgcccagcaccaacgtgaccctggaggcgctgctgagcaccaaggtggcggtggcgcagttctcgcagggcgcgcgcgcggcaggcggctcgggagcaggtggaggcgtggcagctgcagccgtgcccctgatcctggaacagctcatggccctgcagcagcagcagatccaccagctgcagctcatcgagcagatccgcagccaggtggccctcatgcagcgcccgccgccgcggccctcactcagccccgcggccgccccgagcgcaccgggcccggcccccagccagctgcccgggctggccgcgctcccgctgtcggccggggcccctgccgccgccatcgcgggctcgggccccgccgccccggccgccttcgagggcgcgcagccgctgtcccggcccgagtctggcgccagcacccccggcggccctgcggagcccagcgcgcccgccgcccccagcgccgcccctgcccccgctgcccccgccccggcgccagcgccgcagagcgcagcctcgtcgcagccgcagagcgcatccacgccgcctgccctggccccggggtccctgctgggtgcggcgcccggcctgccaagtccgcttctacctcagacttccgccagcggcgtcatcttccccaacccgctggtcagcatcgcggccacggccaacgctctggacccgctgtccgcgctcatgaagcaccgcaagggcaagccgcccaatgtgtcggtgttcgagcccaaagccagcgccgaggacccgttcttcaagcacaaatgccgcttctgcgccaaggtcttcggcagcgacagcgcgctccagatccacctgcgctcgcacacaggcgagcggcccttcaagtgcaacatctgcgggaaccgcttctccaccaaaggcaacctgaaggtgcacttccagaggcacaaggagaagtacccccacatccagatgaacccttacccggtccccgagtacctggacaacgtgcccacctgctcgggcatcccctacggcatgtcgctgccccccgagaagcccgtgaccacctggctggacagcaagcccgtgctgcccaccgtgcccacgtccgtggggctgcaactgccgcccactgtccctggcgcgcacggctacgccgactctcccagcgccaccccagccagccgctccccgcagaggccctcgcccgcctccagcgagtgcgcctccttgtccccaggcctcaaccacgtggagtccggcgtgtcggccaccgccgagtccccacagtcgctcctcggcgggccgcccctcactaaagccgagcccgtcagcctgccctgcaccaacgccagggccggggacgctcccgtgggcgcgcaggctagcgctgcacccacatcggtggacggcgcacccacgagcctcggcagccccgggctgcccgccgtctccgagcagttcaaggcccagtttccgttcggggggctgctagactcgatgcaaacgtcggaaacctcgaagctgcagcagctggtggagaacatcgacaagaagatgacggacccgaaccagtgcgtcatctgccaccgggtgctgagctgccagagcgcgctgaagatgcactaccggacgcacacgggggagcggccgttcaagtgcaagatctgcggccgcgccttcaccaccaagggcaacctcaagacgcacttcggcgtgcaccgtgcaaagccgcccctgcgcgtgcagcactcctgccccatctgccagaagaagttcaccaacgccgtggtcctgcagcagcacatccgcatgcacatgggcggccagatccccaacacgccgctgccggagggcttccaggatgccatggactccgagctggcctacgacgacaagaacgcggagaccctgagcagctacgatgacgacatggacgagaactccatggaggacgacgctgagctgaaggacgcggccaccgacccggccaagccactcctgtcctacgcggggtcctgcccgccctccccgccctcggtcatctccagcattgccgccctggagaaccagatgaagatgatcgactcggtcatgagctgccagcagctgaccggcctcaagtccgtggagaacgggtccggggagagtgaccgcctgagcaacgactcctcgtcggccgtgggcgacctggagagccgcagcgcgggcagccccgccctgtccgagtcctcgtcctcgcaggccctgtcgccggcccccagcaatggtgagagcttccgctccaagtccccgggcctgggcgccccggaggagccccaggaaatcccgctcaagaccgagaggccggacagcccagccgccgccccgggcagcggaggcgcccctggccgcgcgggcatcaaggaggaggcgcccttcagcctgctgttcctgagcagggagcggggtaagtgtcccagcactgtgtgtggtgtctgtggcaagccttttgcttgcaagagcgcgttggaaatccactaccgcagccatactaaggagcggccattcgtctgcgcgctctgcaggcgagggtgctccactatgggtaatttaaaacagcacttactgacacacagattgaaagagctgccttctcagttatttgaccccaactttgctctaggtcccagccaaagcactcctagcctgatctccagcgccgcacccaccatgatcaaaatggaagtgaacggtcacggcaaggccatggcgctgggcgagggtcccccgctgcccgcgggcgtccaggtccccgccgggcctcagacagtgatgggcccgggcctggcgcccatgctggcccccccaccgcgccggacgcccaagcagcacaactgccagtcgtgcgggaagaccttctcctcggccagcgccctgcagatccatgagcgcacgcacaccggcgagaagccgttcggctgcaccatctgcggccgggccttcaccactaagggcaacctcaaggtgcacatggggacacacatgtggaataacgcccccgcgagacgcggccgccgcctgtctgtggagaaccccatggctctcctagggggtgatgccctgaagttctctgaaatgttccagaaggacctggcagctcgggcaatgaacgtcgaccccagtttttggaaccagtatgctgcagccatcactaacgggctcgccatgaagaacaacgagatctccgtcatccagaacggcggcatcccccagctccccgtgagtcttgggggcagcgccctcccccctctgggcagcatggccagtgggatggacaaagcacgcactggcagtagcccacccatcgtcagcttggacaaagcgagctcagaaacagcagccagccgcccattcacgcggtttatcgaggataacaaggagattggtatcaactagccagtgactcgctcatctgccctgcccaggcccacgttttgaagttggagcatcaggcctccgacctttcttgcctcggttctcattacactttcacccatagcagaaaacactttgtgcggctgccgagaggtggtcttgtaagcgctgcatggcgctcccttcaacagcaagcctgactgttctcgagaactctgcaatcttttaaataagcttccttcaaaaaaaaaagtgcttggaaaaccgccttaggaacagaaagagctcagaccatgtccacttcctttctcctgaaacctaataatctctccgagggagaaaggggttctctgcggtattccagtgaaactcatttgatggtttcttttgaattagttagacacttgaacggtgttttttagaactcttcatgttaaagacgtggtttagtactcccaatgctgtgtatcatgacactatcttcgtctgtagtatttatgatgttaagataatgcgggtaacagacaatataatagccccgaccttaaacgaagcttttgtactgcagaatacatctggctgtgtgatttttttttttaagcaagatttgttttactataaataagtggattatttcaatgcaggcaaaattgtgaagttctgttgggaaagatagcatgcttttcgtgtgcaagtacctgtcagtaataagccttttttttttttttttttaatttaaatgtttgtagctgctatgtggacagttgttttctagtgtggtctgtagcccaataactggggaacgagttacagacaaacatcaccgtaaatgactcacaacattataaacagttgtgagaaaatatttcacattatcaaagctgtacaataaa

SEQ ID NO: 247563 - DNA, 772 bp, Artificial Sequence
  derived and/or modified sequence
tcgacttcagcgagaaactgtgcggagctccagcagctggacttcctggagcagaagagccgctgaaccccgcccctgctgatctcactgcacacagcctagggccccacccgccgaggactccagaaccttctcctaccagctcgcccagagaccaagccaagagagtggtctctgaggagcccgctagaaaggcaaggcgaggcccgcagagaaggatgccaagcctgtagaagcagagacgtcggggatgggggacctgccctgggcgccgccagaggcccaagcgcccagcaccgcaggagctggagacgtcgctgagcaccaggtggcgccggcgcggttcctacagggagcctggaggcaggctgcggggtggctgtgccgggagactggagcggctcctggctccgcgcaggcagggcccccagagacagctcatgcagcagatccgcagccccggggccctcaggcaccgccgcggctgccgccctcgctcagtcccgagcgcgtccaccctggccagccagctgcccccgctgaacctgcgccgggcgctccggctctccgttcgggccccagccaaccccgcgggctcaggctcccagttcctgtcccagcctgcgccggctccagcgcccccggctctccagctgctcttcccgactcctatccttggccgcccccagcgcggaaccgacccgcgaccctaccgccaacatcgcgggtctcgcctctcgcagcctttttggcgtccgcgcctcagcgttga

SEQ ID NO: 247564 - DNA, 585 bp, Artificial Sequence
  derived and/or modified sequence
atgcccgccccccggttcctgtacagcctgcggaactacgagcccatgaaacccttgtttttcattaattaccctgtgtctgatatggagcttcccgtgcgcagcagtacggttaccctgcttcctgcccccctcccacgtcgcggatccgtcaagacttttctagctcccagtaagtcctacttccctgaggaagaacgtgcactcctgaaatcatcacatgctttttgtacaggcttgtggccatggcggcgcgattttcagctcccacagtgtcacttggcactgggactactgccaggagagaggagcgtgcggctcccgcgctttttggcagtactcaaggaattgagtgcaaccgcgagttttaccctggccagtgaagccatccccttcctgtcctcatttccattcccatggaatcttttattgccctccgtgttccaggcccttccacagaagtggcagttcaaggcagatttcttgttagaatgcacactgtcagtcaaggaagcctttcaccaggaatgtggagctggtgtttcactggctaacggcctcaacaaggggctgaggactggttag

SEQ ID NO: 247565 - DNA, 3687 bp, Artificial Sequence
  derived and/or modified sequence
atgtcgcgtcggaagcaagcaaagccccagcacctgaagagtgatgaggaattgttgcctcccgacggcgcgcctgagcatgccgctcctggagagggtgctgaggatgcagatagcggacccgaaagtcgatcgggtggcgaggagacatctgtgtgtgagaaatgctgtgccgaattttttaaatgggccgattttctggaacaccaaagatcatgtactaaactcccacctgtgttgatcgtgcacgaagatgcccccgctccgcctcccgaggacttccccgagccatcccccgcctcttccccctccgagagagcagagtcggaggccgcagaagaagctggagcagaaggcgccgagggggaggcccgtccagtggagaaagaagctgagccaatggacgcggaacccgccggggacacacgtgcgcccagacctcctcccgctgcacctgcaccccccactcctgcctacggagccccaagcactaatgtgacgcttgaggccctcctcagtactaaggtcgccgtagcgcagttcagtcagggagctagggcagcaggaggctccggggcaggtggcggtgtggccgctgcggcggtgccgctcatcctggaacagcttatggcccttcagcagcagcaaatccatcagctgcagcttatcgagcaaatccggagtcaggtcgcgctgatgcagagacctccccctcgtccctctttaagtccagccgctgctccatcagcgccgggacccgcaccctcacagctgcctgggttagccgccctgcctctgagcgcaggggcccccgccgcagccatcgcaggttcgggccctgccgcccctgctgcttttgaaggggcacaacccctgtcaaggccagagagcggagcttccacacccggtggccccgcggaaccgtccgcacccgccgccccttccgcagctcccgcccctgcagctccggcccccgcccctgcaccacagtccgcagccagcagtcagccacagtccgcctccactcctccggctctggctccggggtctctgttgggcgctgcaccaggcttgccgagtccactgttgccacagacttccgccagcggagtgatttttcccaatccactcgtgtccatcgctgcaacagcaaatgcactcgatccgctgtccgcactgatgaaacatagaaaggggaagcctcccaacgtgagtgtttttgagccaaaagccagcgccgaggatccattcttcaagcataagtgtcgcttttgtgctaaggtcttcggctctgatagcgctctccagatccatttacggagccatacaggcgagcgtccttttaaatgtaatatctgcggcaatcgctttagcacaaaaggaaatttaaaggtgcactttcagagacacaaagagaaataccctcacatccagatgaatccttacccagtgcctgagtatctcgacaacgtgcccacctgttccggaatcccatatggcatgagtctcccaccagaaaagccagtgacgacttggctggactcaaagccggtgctccctactgtgcccacgagcgtgggactgcaactccccccgactgtgccaggtgcgcacggctatgcggatagcccctcagcaaccccagcgtcacggtcaccacagagaccgagccccgcctcctctgaatgtgcttctctgtcccccggcctgaatcatgtggaatccggggtgagcgccacagcggaatctccgcaaagcctgttgggaggacctccactaacaaaggctgagcctgtctctctgccgtgcacgaatgcgagagccggagatgctccagttggagcacaagcctccgcagctcccacctcggtggacggtgcaccaaccagtcttgggtcacctggattacccgctgtcagcgaacagtttaaagcccaatttccgttcggaggccttctcgactccatgcagacatctgaaacatcgaagcttcagcaactcgtagaaaatattgacaagaaaatgaccgatccaaaccagtgcgttatctgccacagagtgttgtcatgccagtccgcactgaaaatgcattatcgaacacacactggcgaacggccattcaaatgcaagatctgcggacgtgcgtttactacaaaaggaaacctaaagacgcactttggcgttcaccgggccaagccccctctgcgcgtgcagcactcctgtcctatttgccagaaaaagttcaccaacgcggtggttttgcagcagcacatcagaatgcatatgggcggacaaatcccaaacacccctttgcccgagggttttcaggacgctatggactctgaacttgcttatgatgacaaaaatgccgagactctgagttcctatgacgacgacatggacgaaaacagcatggaggatgacgccgagctgaaggacgccgctaccgaccctgcaaaaccactgctgtcctacgccggctcttgcccccccagccccccatcggtgatctcttctattgctgcacttgagaatcagatgaagatgatagacagcgtgatgtcctgtcagcaactaacagggctgaagtctgtggagaacggcagcggcgagtccgatcgactcagtaacgactcctcctcagctgtgggggacctagaaagccgttcggctggttcccccgcactcagcgaaagttcttcttcccaggccctttcaccagctccttcgaatggcgagtcatttagaagcaaatccccagggctgggagcccctgaagaaccacaggagattcctctcaaaactgagcggcccgattcccctgcagcggccccaggctccggaggtgcgcctggtagagccggaattaaggaggaggcaccattcagtctcctatttctaagccgggagcggggtcccagtcagagtaccccaagcctcatcagttcggccgctcctaccatgattaagatggaggtgaacggtcacgggaaggcaatggcgctgggagaagggcccccccttcccgcaggagtgcaagtgcccgcaggaccccagaccgttatgggacccggactggccccgatgttggcgcctccccctagaaggacacctaaacaacacaactgtcagtcgtgcggtaaaactttttccagtgcttccgccttgcaaatacacgagcgaactcatactggcgaaaaaccgttcgggtgtaccatttgtgggagggcctttactactaagggaaacttgaaggtacacatggggactcacatgtggaacaacgccccggcgcgacgcgggaggcggctgtctgtggagaacccaatggccctcctggggggggacgcacttaaattctccgagatgttccaaaaagatctagctgctagggcgatgaatgtggatccgtcgttctggaaccaatatgccgctgccatcactaacggcttggctatgaaaaacaacgagatctctgttattcagaatggcgggattccccaactccccgtgtcccttgggggctcagccctgccccctctcggatccatggcatccggaatggataaggcccgtactgggagctcccccccaatcgtttcgttggataaggcttcgtctgagactgcagccagtaggccatttacgaggttcatcgaggacaataaggaaatcggaataaactag

SEQ ID NO: 247566 - DNA, 3903 bp, Artificial Sequence
  derived and/or modified sequence
atgagccgacgaaagcaggcaaagcctcaacatctcaaaagtgacgaggaactcctgccacccgacggcgccccggaacacgctgccccaggagagggagccgaagacgcagactctgggccagagtccaggtctggtggtgaggagacttcagtgtgtgagaagtgttgcgcggagttcttcaagtgggcagacttcctcgaacatcagaggtcgtgcacgaaactcccgcccgttttaattgtgcacgaggacgctcctgcaccccctcccgaagacttccccgaacctagtcccgcgtcctccccctccgaacgcgcagagtctgaggccgcggaagaagctggcgctgagggagcggaaggagaggcccggcccgtcgagaaggaagccgagcctatggacgcagagcccgccggggacacccgcgcccccaggcccccccccgccgcccccgccccccccacccctgcttacggtgctccgtcaacgaatgtcacgcttgaggctctactctccacaaaagtggctgtcgcacagttctcccaaggggcaagagcagccggcggttctggggccggcggtggcgtagctgccgccgcagtgcctctgatcctcgagcagctcatggcgctccagcagcagcagatccaccaactgcaattgatcgaacaaatccggagtcaggtagcccttatgcagcgccccccaccacgaccctcactcagcccagccgccgctccatccgcccctggtcccgcacccagccagctcccaggacttgcagccctgccattatcggcaggggcccctgcagcagctatagcagggagtggtccggctgcccctgctgcttttgagggcgcccagcccctgtctcggcctgaaagcggcgccagcaccccagggggacctgctgaaccatctgctccagcggcccctagcgctgccccagctccagcggcacccgctcctgctcccgcaccccagtccgcagcttctagccaaccacagagcgcatccacgcctccggctctggccccggggtctctcttaggggctgcccccggcttgccctcccctctgctaccccaaacatcagcaagcggagtgatctttccgaacccattggtgtccatcgctgccactgctaatgccctcgatcccctctctgctcttatgaagcatcgcaaaggaaaaccgccaaatgtaagcgtattcgagcctaaggcttcggccgaagacccattcttcaaacataagtgtcggttttgcgccaaggtgtttggttccgatagtgctctgcagatacacctgcgttcccacaccggcgagcgaccattcaaatgcaatatttgtggcaataggttcagcaccaagggaaacctgaaggttcacttccagaggcataaggaaaaataccctcacatccaaatgaatccctaccccgtgcccgagtatctcgacaatgtgccgacttgtagcggtatcccatatgggatgagtcttccacccgaaaagcctgtgactacctggctggacagcaagcccgttctcccaaccgtgcctactagcgttggactgcagctgcctccaactgtgcctggggcccacggctacgcagactctccctctgccacccctgcaagcaggtccccgcagcgccctagcccggccagctcagagtgcgcttcgctttcacctggcctgaatcacgttgaatcaggggtctcggcaacagccgaatctcctcaatctctgctggggggtcctcctctcaccaaggctgaaccagtatcacttccgtgtacaaacgccagggctggggacgcccctgtaggggcacaagcatccgctgccccaacaagcgtcgatggggccccaacctcactcgggtctccaggccttcctgccgtctccgaacaatttaaagctcagtttccatttggcgggttgctggacagtatgcagacctcagagacttcaaaacttcagcagctggttgagaacatcgataaaaagatgaccgaccccaaccaatgcgtgatatgccaccgcgtgctgtcatgccaaagcgccctcaagatgcactatagaactcacacgggagaaaggccttttaaatgcaagatatgtgggagggcctttacaacaaagggcaatctgaagacacattttggtgtacaccgcgcaaagccacccctgagagtccagcatagctgtccaatctgtcaaaagaagtttacaaatgccgtggtgctgcagcagcatatccggatgcacatggggggccagattcccaacaccccgctgcctgagggcttccaggatgctatggactccgaacttgcttacgatgacaagaacgcagaaaccctttccagttatgacgacgatatggatgagaacagtatggaggatgacgctgaactaaaagatgcggctacagatccagccaagccccttctgtcctacgccggaagttgccccccctcaccgccctcagttatttcctcaatcgcggcccttgagaatcagatgaagatgattgacagtgtgatgtcctgtcagcaactgaccggcttgaaatctgtggaaaatggctccggagagagcgacaggctttcaaacgacagcagttctgctgtgggcgatctcgagagtagatcagccgggagccccgccctgtcggagtcttccagttctcaggctttgtccccagccccctcaaacggggagtcattcagatccaaaagccctggtcttggggcacccgaagagcctcaggaaattcctctgaagaccgagaggccagatagccctgctgcagcacctggtagcggcggagcacccggccgcgccggaattaaggaagaggctcctttctctctgctattcctgtcccgagagaggggaaaatgtcctagtaccgtatgtggtgtgtgtggcaagccattcgcttgtaaatccgcactcgaaattcattatcggtcgcataccaaggaaagaccgttcgtttgtgccctgtgccgaaggggatgttctaccatgggtaatctgaagcagcacctgctgacccatcgtctgaaggaacttcccagtcagctatttgatcccaatttcgcccttggcccatcacagagcacgccctccctgatcagcagcgccgcccctacaatgataaagatggaggtaaacggacacgggaaagcgatggccttgggtgaaggcccccccttgcccgctggagttcaggtacctgccggcccacagacagtaatgggccctgggcttgctccaatgttggctccacccccgcgcaggaccccgaaacagcataactgccaaagctgcggtaagacattcagcagcgccagcgcactgcagatacacgaaagaacgcacacaggcgaaaagccctttgggtgtacaatttgcgggcgcgcattcaccaccaagggcaatttgaaggtccatatgggtacccacatgtggaacaacgctcccgccagaagaggaaggaggctctcggtggaaaacccgatggccctgcttggaggagacgcgttgaagttctcagaaatgttccaaaaggacctggccgctcgggcaatgaacgtggacccctcgttttggaatcagtatgctgccgctattacgaacgggctggccatgaaaaataacgagatctccgtgattcagaatggggggattccccagctgcctgtctcgctgggcggaagtgcactgccaccactcggtagcatggcaagcggcatggacaaagcaagaaccggctccagcccaccgatcgtgtcgctcgataaagcctccagtgagacagccgcctcacgcccgtttacacgttttatcgaggataacaaggaaattgggattaattag

SEQ ID NO: 247567 - DNA, 2883 bp, Artificial Sequence
  derived and/or modified sequence
atgtctcgcagaaaacaagctaaaccacagcaccttaaatccgacgaggagctgttgcctccggatggtgcaccggaacatgccgcacctggcgaaggggccgaggacgccgactccgggccagagtcccggtctggcggggaggaaacatctgtgtgtgaaaagtgttgtgcggagttcttcaaatgggcggatttccttgagcatcaacggagctgcactaagttgccccccgtcctaatcgtccatgaagacgccccccctgggctgccgagcccccttttaccccagacatccgcatctggtgtgatcttccccaaccccctggtatcaattgccgcaaccgcgaatgcactagatccgctgtccgccctcatgaaacaccgtaagggaaagccccctaacgtttccgtcttcgagccaaaagcatccgccgaggatcctttctttaagcacaaatgtagattttgcgctaaggtgttcggcagcgacagtgccttgcagatccatctgcgcagtcacactggcgagagaccctttaaatgcaacatttgtggaaaccgcttcagcacaaaggggaatctgaaggtgcatttccagcgccacaaggaaaagtatcctcatattcaaatgaatccctaccctgttcccgagtatctggacaacgttcctacttgttcgggcattccctatggcatgtctctgccaccagagaagcccgtgaccacctggttagattccaaacctgtgctgcccaccgtccccaccagcgtaggactgcagctaccacccaccgtccccggtgctcatggctatgctgatagcccatccgctactcctgcgagcaggagcccccagcgtccttcacccgctagctccgagtgtgcaagtctgagcccaggcctgaatcatgtggaatccggggtgagtgccactgccgagtccccccagtctctgctcggcggtcctcctttgacaaaagccgagcctgtgtccctcccatgcacaaacgcccgagcgggtgatgctccagtgggagcccaagcttccgctgcgcccacttccgtggacggagcccccacgtcactaggcagtccaggccttcccgcagtctctgaacaatttaaggcccagttcccttttgggggcctcttggactctatgcagaccagtgagacatctaagttgcagcaactcgttgaaaacatcgataagaaaatgaccgaccctaaccaatgcgtcatctgtcacagggttctgagttgccagtctgctctgaagatgcactaccgtacccacacaggagagcggcccttcaagtgcaagatttgtggtagggccttcacaacgaaggggaatcttaagacacacttcggggtgcaccgcgccaaaccccccctgcgggtgcaacactcgtgccctatctgccaaaagaagttcacaaatgccgtcgttctgcagcagcacatccggatgcacatgggaggccagattcctaacacacctctgcccgagggcttccaagacgctatggacagcgaacttgcatatgacgacaagaatgcggaaactctgtccagctacgacgatgatatggatgaaaatagcatggaggacgatgcagagctcaaagatgctgccactgacccagccaagccattgctctcctatgcagggagctgccccccctctcccccctcggtgatctcttccatcgcggcactggaaaatcagatgaaaatgattgacagcgtgatgtcttgtcagcaacttaccggacttaagtccgtcgaaaacggaagcggcgagtcagatcgactgtctaatgacagttcaagcgccgtgggcgatctcgagtcgcgaagcgctggaagcccagcactttcggagtccagttctagtcaggccctgtctcctgctcccagtaacggtgagtcattcaggagcaagagtcctggcttgggagcgccggaagaacctcaggagatcccactgaaaactgagaggcctgatagtcctgctgcagctccggggagtgggggcgctcccggccgggccggaattaaggaggaggctccgttctccctgctgttcctaagccgggaaagggggccttcacagagcacacctagcctgatctctagcgcagctccaactatgataaagatggaggtgaacgggcatggtaaagctatggcactgggtgaagggccaccccttcccgctggggtgcaagtccccgccggacctcagacggtgatgggccctggtcttgctcccatgctggcacctccccctcgccgcacccccaagcagcacaactgtcagagctgcgggaagacattcagttccgcctccgccttacagattcatgagaggactcacaccggcgagaaacctttcggctgcactatctgcggcagagcctttacaactaagggaaacctaaaagtgcacatgggcacacatatgtggaataacgccccagctaggcgaggaaggagactgtctgttgaaaacccaatggcgctcctaggcggcgacgccctcaaattctcagaaatgttccagaaagaccttgccgccagagccatgaacgtcgatcccagtttctggaatcagtatgctgccgctatcacgaacggacttgcgatgaaaaacaatgagatatctgtgattcaaaatggaggaattccacagttgccagtaagcctgggaggtagcgctctgccacccctgggttctatggcctcagggatggacaaggcccgcacagggagtagtcccccgatcgtcagcctcgataaggcctcaagtgagactgccgccagccggcctttcaccagattcatagaggataacaaggagatcgggatcaattag

SEQ ID NO: 247568 - DNA, 3687 bp, Artificial Sequence
  derived and/or modified sequence
atgagcaggaggaagcaggccaagccccagcacctgaagagtgatgaggagctgctgcccccagatggagcccctgagcacgccgcccctggagagggcgcagaagatgctgacagcggccctgagagccgctctggaggagaggagacctctgtgtgtgagaagtgctgtgccgagttcttcaagtgggccgacttcctggagcaccagaggagctgcaccaagctgccccctgtgctgattgtgcatgaagatgccccagcccctcctcctgaggacttccctgagcccagccctgccagcagccccagcgagagagctgagagcgaggccgctgaggaggccggggctgagggcgctgagggggaggcccggcctgtggagaaggaggccgagcccatggatgctgagcctgctggggacacccgggcccccaggcctcctcctgctgccccagccccacccaccccagcctatggagcccccagcaccaacgtgaccctggaggccctgctgagcaccaaggtggccgtggcccagttcagccagggcgcccgggccgccggcggcagcggggccggcggcggcgtggccgctgctgctgtgcccctcatcctggagcagctgatggccctgcagcagcagcagatccaccagctgcagctgattgagcagatccgcagccaggtggccctgatgcagaggcccccaccccggcccagcctgagccctgctgctgcccccagcgcccctggccctgcccccagccagctgcccggcctggccgccctgcccctgtctgctggggccccagctgctgccatcgccggcagcggccctgctgccccagctgcctttgagggcgcccagcccctgagcaggcctgagagcggggccagcacccctgggggccctgctgagcccagcgccccagctgcccccagcgctgccccagccccagctgccccagccccagccccagccccccagagcgctgccagcagccagccccagagcgccagcaccccaccagccctggcccctggcagcctgctgggcgccgcccctggcctgcccagccccctgctgccccagaccagcgccagcggggtcatcttccccaaccccctggtgtccattgctgccacagccaatgccctggaccccctgagcgccctgatgaagcacaggaagggcaagcccccaaatgtgtctgtgtttgagcccaaggccagcgctgaggaccccttcttcaagcacaagtgccgcttctgtgccaaggtgtttggaagtgacagcgccctgcagatccacctgcggagccacactggagagcggcccttcaagtgcaacatctgtggcaaccgcttcagcaccaagggcaacctgaaggtgcacttccagaggcacaaggagaagtacccccacatccagatgaacccctaccctgtgcctgagtacctggacaacgtgcccacctgcagcggcatcccctacggcatgagcctgcccccagagaagcctgtgaccacctggctggacagcaagcctgtgctgcccaccgtgcccacctctgtgggcctgcagctgcccccaacagtgcctggggcccacggctatgctgacagccccagcgccaccccagccagccgcagcccccagaggcccagccctgccagcagtgaatgtgccagcctgagccctggcctgaaccacgtggagagcggcgtgtctgccacagctgagagcccccagagcctgctgggcggcccccccctgaccaaggccgagcctgtgtccctgccctgcaccaatgcccgggctggagatgcccctgtgggcgcccaggccagcgctgcccccacctctgtggatggagcccccaccagcctgggcagccctggcctgcctgctgtgtctgagcagttcaaggcccagttcccctttggaggcctgctggacagcatgcagaccagcgagaccagcaagctgcagcagctggtggagaacatcgacaagaagatgacagaccccaaccagtgtgtgatctgccaccgggtgctgagctgccagagcgccctgaagatgcactaccgcacccacactggagagcggcccttcaagtgcaagatctgtggccgggccttcaccaccaagggcaacctgaagacccactttggagtgcaccgggccaagccacccctgcgggtgcagcacagctgccccatctgccagaagaagttcaccaatgctgtggtgctgcagcagcacatccgcatgcacatgggcggccagatccccaacacccccctgcctgagggcttccaggatgccatggattctgagctggcctatgatgacaagaatgctgagaccctgagcagctatgatgatgacatggatgagaacagcatggaggatgatgctgagctgaaggatgctgccacagatcctgccaagcccctgctgtcctatgccggcagctgcccccccagccccccatctgtcatcagcagcattgctgccctggagaaccagatgaagatgattgacagcgtgatgagctgccagcagctgaccggcctgaagtctgtggagaatggaagtggagagagtgaccggctgagcaatgacagcagcagcgctgtgggggacctggagagccgctctgctggcagccctgccctgtctgagagcagcagcagccaggccctgagccctgcccccagcaatggagagagcttccgcagcaagagccctggcctgggcgcccctgaggagccccaggagatccccctgaagacagagaggccagacagccctgctgctgcccctggcagcggcggggcccctggccgggccggcatcaaggaggaggcccccttcagcctgctcttcctgagccgggagcggggccccagccagagcacccccagcctcatcagcagcgctgcccccaccatgatcaagatggaggtgaatggccacggcaaggccatggccctgggggagggcccccccctgcctgctggggtgcaggtgcctgctggcccccagacagtgatgggccctggcctggcccccatgctggcccccccacccaggaggacccccaagcagcacaactgccagagctgtgggaagaccttcagcagcgccagcgccctgcagatccacgagaggacccacactggagagaagcccttcggctgcaccatctgtggccgggccttcaccaccaagggcaacctgaaggtgcacatgggcacccacatgtggaacaatgccccagcccggcggggccggcggctgtctgtggagaaccccatggccctgctgggcggagatgccctgaagttcagcgagatgttccagaaggacctggccgcccgggccatgaatgtggaccccagcttctggaaccagtatgctgctgccatcaccaacggcctggccatgaagaacaatgagatcagcgtcatccagaatggaggcatcccccagctgcctgtgtccctgggcggcagcgccctgccccccctgggctccatggccagcggcatggacaaggccaggacaggcagcagcccccccatcgtgtccctggacaaggccagcagcgagacagctgccagccggcccttcacccgcttcatcgaggacaacaaggagatcggcatcaactag

SEQ ID NO: 247569 - DNA, 3903 bp, Artificial Sequence
  derived and/or modified sequence
atgagcaggaggaagcaggccaagccccagcacctgaagagtgatgaggagctgctgcccccagatggagcccctgagcacgccgcccctggagagggcgcagaagatgctgacagcggccctgagagccgctctggaggagaggagacctctgtgtgtgagaagtgctgtgccgagttcttcaagtgggccgacttcctggagcaccagaggagctgcaccaagctgccccctgtgctgattgtgcatgaagatgccccagcccctcctcctgaggacttccctgagcccagccctgccagcagccccagcgagagagctgagagcgaggccgctgaggaggccggggctgagggcgctgagggggaggcccggcctgtggagaaggaggccgagcccatggatgctgagcctgctggggacacccgggcccccaggcctcctcctgctgccccagccccacccaccccagcctatggagcccccagcaccaacgtgaccctggaggccctgctgagcaccaaggtggccgtggcccagttcagccagggcgcccgggccgccggcggcagcggggccggcggcggcgtggccgctgctgctgtgcccctcatcctggagcagctgatggccctgcagcagcagcagatccaccagctgcagctgattgagcagatccgcagccaggtggccctgatgcagaggcccccaccccggcccagcctgagccctgctgctgcccccagcgcccctggccctgcccccagccagctgcccggcctggccgccctgcccctgtctgctggggccccagctgctgccatcgccggcagcggccctgctgccccagctgcctttgagggcgcccagcccctgagcaggcctgagagcggggccagcacccctgggggccctgctgagcccagcgccccagctgcccccagcgctgccccagccccagctgccccagccccagccccagccccccagagcgctgccagcagccagccccagagcgccagcaccccaccagccctggcccctggcagcctgctgggcgccgcccctggcctgcccagccccctgctgccccagaccagcgccagcggggtcatcttccccaaccccctggtgtccattgctgccacagccaatgccctggaccccctgagcgccctgatgaagcacaggaagggcaagcccccaaatgtgtctgtgtttgagcccaaggccagcgctgaggaccccttcttcaagcacaagtgccgcttctgtgccaaggtgtttggaagtgacagcgccctgcagatccacctgcggagccacactggagagcggcccttcaagtgcaacatctgtggcaaccgcttcagcaccaagggcaacctgaaggtgcacttccagaggcacaaggagaagtacccccacatccagatgaacccctaccctgtgcctgagtacctggacaacgtgcccacctgcagcggcatcccctacggcatgagcctgcccccagagaagcctgtgaccacctggctggacagcaagcctgtgctgcccaccgtgcccacctctgtgggcctgcagctgcccccaacagtgcctggggcccacggctatgctgacagccccagcgccaccccagccagccgcagcccccagaggcccagccctgccagcagtgaatgtgccagcctgagccctggcctgaaccacgtggagagcggcgtgtctgccacagctgagagcccccagagcctgctgggcggcccccccctgaccaaggccgagcctgtgtccctgccctgcaccaatgcccgggctggagatgcccctgtgggcgcccaggccagcgctgcccccacctctgtggatggagcccccaccagcctgggcagccctggcctgcctgctgtgtctgagcagttcaaggcccagttcccctttggaggcctgctggacagcatgcagaccagcgagaccagcaagctgcagcagctggtggagaacatcgacaagaagatgacagaccccaaccagtgtgtgatctgccaccgggtgctgagctgccagagcgccctgaagatgcactaccgcacccacactggagagcggcccttcaagtgcaagatctgtggccgggccttcaccaccaagggcaacctgaagacccactttggagtgcaccgggccaagccacccctgcgggtgcagcacagctgccccatctgccagaagaagttcaccaatgctgtggtgctgcagcagcacatccgcatgcacatgggcggccagatccccaacacccccctgcctgagggcttccaggatgccatggattctgagctggcctatgatgacaagaatgctgagaccctgagcagctatgatgatgacatggatgagaacagcatggaggatgatgctgagctgaaggatgctgccacagatcctgccaagcccctgctgtcctatgccggcagctgcccccccagccccccatctgtcatcagcagcattgctgccctggagaaccagatgaagatgattgacagcgtgatgagctgccagcagctgaccggcctgaagtctgtggagaatggaagtggagagagtgaccggctgagcaatgacagcagcagcgctgtgggggacctggagagccgctctgctggcagccctgccctgtctgagagcagcagcagccaggccctgagccctgcccccagcaatggagagagcttccgcagcaagagccctggcctgggcgcccctgaggagccccaggagatccccctgaagacagagaggccagacagccctgctgctgcccctggcagcggcggggcccctggccgggccggcatcaaggaggaggcccccttcagcctgctcttcctgagccgggagcggggcaaatgtcccagcacagtgtgtggggtgtgtgggaagccctttgcctgcaagagcgccctggagatccactaccgcagccacaccaaggagcggccctttgtgtgtgccctgtgcagaagaggctgcagcaccatgggcaacctgaagcagcacctgctgacccaccggctgaaggagctgcccagccagctgtttgaccccaactttgccctgggccccagccagagcacccccagcctcatcagcagcgctgcccccaccatgatcaagatggaggtgaatggccacggcaaggccatggccctgggggagggcccccccctgcctgctggggtgcaggtgcctgctggcccccagacagtgatgggccctggcctggcccccatgctggcccccccacccaggaggacccccaagcagcacaactgccagagctgtgggaagaccttcagcagcgccagcgccctgcagatccacgagaggacccacactggagagaagcccttcggctgcaccatctgtggccgggccttcaccaccaagggcaacctgaaggtgcacatgggcacccacatgtggaacaatgccccagcccggcggggccggcggctgtctgtggagaaccccatggccctgctgggcggagatgccctgaagttcagcgagatgttccagaaggacctggccgcccgggccatgaatgtggaccccagcttctggaaccagtatgctgctgccatcaccaacggcctggccatgaagaacaatgagatcagcgtcatccagaatggaggcatcccccagctgcctgtgtccctgggcggcagcgccctgccccccctgggctccatggccagcggcatggacaaggccaggacaggcagcagcccccccatcgtgtccctggacaaggccagcagcgagacagctgccagccggcccttcacccgcttcatcgaggacaacaaggagatcggcatcaactag

SEQ ID NO: 247570 - DNA, 2883 bp, Artificial Sequence
  derived and/or modified sequence
atgagcaggaggaagcaggccaagccccagcacctgaagagtgatgaggagctgctgcccccagatggagcccctgagcacgccgcccctggagagggcgcagaagatgctgacagcggccctgagagccgctctggaggagaggagacctctgtgtgtgagaagtgctgtgccgagttcttcaagtgggccgacttcctggagcaccagaggagctgcaccaagctgccccctgtgctgattgtgcatgaagatgcccctcctggcctgcccagccccctgctgccccagaccagcgccagcggggtcatcttccccaaccccctggtgtccattgctgccacagccaatgccctggaccccctgagcgccctgatgaagcacaggaagggcaagcccccaaatgtgtctgtgtttgagcccaaggccagcgctgaggaccccttcttcaagcacaagtgccgcttctgtgccaaggtgtttggaagtgacagcgccctgcagatccacctgcggagccacactggagagcggcccttcaagtgcaacatctgtggcaaccgcttcagcaccaagggcaacctgaaggtgcacttccagaggcacaaggagaagtacccccacatccagatgaacccctaccctgtgcctgagtacctggacaacgtgcccacctgcagcggcatcccctacggcatgagcctgcccccagagaagcctgtgaccacctggctggacagcaagcctgtgctgcccaccgtgcccacctctgtgggcctgcagctgcccccaacagtgcctggggcccacggctatgctgacagccccagcgccaccccagccagccgcagcccccagaggcccagccctgccagcagtgaatgtgccagcctgagccctggcctgaaccacgtggagagcggcgtgtctgccacagctgagagcccccagagcctgctgggcggcccccccctgaccaaggccgagcctgtgtccctgccctgcaccaatgcccgggctggagatgcccctgtgggcgcccaggccagcgctgcccccacctctgtggatggagcccccaccagcctgggcagccctggcctgcctgctgtgtctgagcagttcaaggcccagttcccctttggaggcctgctggacagcatgcagaccagcgagaccagcaagctgcagcagctggtggagaacatcgacaagaagatgacagaccccaaccagtgtgtgatctgccaccgggtgctgagctgccagagcgccctgaagatgcactaccgcacccacactggagagcggcccttcaagtgcaagatctgtggccgggccttcaccaccaagggcaacctgaagacccactttggagtgcaccgggccaagccacccctgcgggtgcagcacagctgccccatctgccagaagaagttcaccaatgctgtggtgctgcagcagcacatccgcatgcacatgggcggccagatccccaacacccccctgcctgagggcttccaggatgccatggattctgagctggcctatgatgacaagaatgctgagaccctgagcagctatgatgatgacatggatgagaacagcatggaggatgatgctgagctgaaggatgctgccacagatcctgccaagcccctgctgtcctatgccggcagctgcccccccagccccccatctgtcatcagcagcattgctgccctggagaaccagatgaagatgattgacagcgtgatgagctgccagcagctgaccggcctgaagtctgtggagaatggaagtggagagagtgaccggctgagcaatgacagcagcagcgctgtgggggacctggagagccgctctgctggcagccctgccctgtctgagagcagcagcagccaggccctgagccctgcccccagcaatggagagagcttccgcagcaagagccctggcctgggcgcccctgaggagccccaggagatccccctgaagacagagaggccagacagccctgctgctgcccctggcagcggcggggcccctggccgggccggcatcaaggaggaggcccccttcagcctgctcttcctgagccgggagcggggccccagccagagcacccccagcctcatcagcagcgctgcccccaccatgatcaagatggaggtgaatggccacggcaaggccatggccctgggggagggcccccccctgcctgctggggtgcaggtgcctgctggcccccagacagtgatgggccctggcctggcccccatgctggcccccccacccaggaggacccccaagcagcacaactgccagagctgtgggaagaccttcagcagcgccagcgccctgcagatccacgagaggacccacactggagagaagcccttcggctgcaccatctgtggccgggccttcaccaccaagggcaacctgaaggtgcacatgggcacccacatgtggaacaatgccccagcccggcggggccggcggctgtctgtggagaaccccatggccctgctgggcggagatgccctgaagttcagcgagatgttccagaaggacctggccgcccgggccatgaatgtggaccccagcttctggaaccagtatgctgctgccatcaccaacggcctggccatgaagaacaatgagatcagcgtcatccagaatggaggcatcccccagctgcctgtgtccctgggcggcagcgccctgccccccctgggctccatggccagcggcatggacaaggccaggacaggcagcagcccccccatcgtgtccctggacaaggccagcagcgagacagctgccagccggcccttcacccgcttcatcgaggacaacaaggagatcggcatcaactag

SEQ ID NO: 247571 - DNA, 3687 bp, Artificial Sequence
  derived and/or modified sequence
atgagccggcggaagcaggccaagccccagcacctgaagagcgacgaggaactgctgcccccagacggcgcaccagaacacgccgcccccggggaaggcgcggaagacgcagacagcgggcctgagtctcggagcgggggggaagaaacatcagtgtgcgaaaagtgttgtgctgagttcttcaaatgggccgacttccttgagcatcaaaggtcgtgcactaaattaccacccgtgcttatcgtccacgaagatgcccctgcacccccccccgaagatttcccagaaccctcccccgcctccagtccgtctgaacgggctgaatccgaagccgcagaagaggccggagctgagggcgcggaaggtgaggcgagaccagttgagaaagaagcagaacccatggatgccgagcccgccggtgatacacgcgccccaagacccccccctgccgctcccgcaccacctaccccggcctacggcgcccccagcacgaatgttacgctggaagctcttcttagcactaaggtcgctgtcgcgcagttttctcagggagccagggccgccggtgggtctggagccggaggaggcgtcgcggcggccgccgtgcccttgattttggaacaactcatggcccttcaacagcagcagattcaccagcttcagctgatcgagcaaatccgaagtcaggtagccttgatgcagagaccacctcctcgccccagcctctcaccagccgcagcgcccagcgctccagggccagcgcccagccagctgccaggcctggctgccttacccctgtcggccggtgccccggccgcagcaattgccggtagcggtccagccgcccccgcggctttcgagggcgcccagccactatctaggcccgaatcaggggccagcacacccggaggtcccgccgagccaagcgcaccagccgcaccctccgccgcccccgctcccgccgcaccagccccagctcctgccccccagtcagctgcttcttctcagccccagtccgcaagtaccccccccgcacttgcaccaggctccttgctgggagcagccccgggtcttccaagtccactcctcccgcagacaagcgcctccggtgtgatttttcctaatcctctggtgtctatagctgccacagcaaacgctctagacccgctaagtgcacttatgaagcacaggaaaggcaaacccccgaacgtgagtgtctttgaaccaaaggcatccgctgaggatccattcttcaagcataaatgccggttttgcgccaaagtgtttggttcagactctgctcttcagattcacttgagaagccataccggcgagcggccctttaagtgtaatatctgtggcaataggttcagtacgaaaggcaacctgaaggtgcattttcaaagacacaaggagaagtatccccatatacagatgaatccttaccctgtacctgagtacctagataacgtgcctacctgttcaggcatcccatacggcatgtccctcccgcctgagaaaccagtgaccacttggctcgactcaaagcctgtgttgcccactgtacccacctctgttggactgcagctgccaccaactgtgccaggagcccacgggtacgctgatagtccctctgcaacgcctgcatctcgcagtcctcagagacccagtccggcatcttctgaatgtgcatccttgtctcctggattgaaccatgtggagtctggcgtctctgccactgcggagagcccccagagcctgctgggggggcctccgctgacgaaagcagagcccgtctctctgccttgtacgaatgcccgggcaggcgacgcacccgttggggctcaggcttcagctgcccccacgagcgtagacggggccccaacatcgctgggctccccggggcttccggccgtgagtgagcagttcaaagcccaattcccgttcggaggactcctggactccatgcaaactagcgagacctctaaactgcagcagctggtggaaaatattgataagaagatgacagatcccaatcaatgtgtgatctgtcatagagtcctcagctgccagagtgcacttaaaatgcattaccgcacgcacactggcgagagaccctttaagtgcaaaatttgcggtcgagctttcactaccaagggcaatttgaaaacccattttggtgtgcaccgcgccaagcctcctctccgcgtgcaacactcctgccctatctgtcagaagaaatttaccaacgccgtcgtgctgcaacagcacataaggatgcacatgggaggacagattcctaacacacccctgccggaggggtttcaggacgcgatggattctgagctcgcatacgacgataagaatgccgagaccctgtctagctacgacgatgatatggacgagaactccatggaggacgatgccgaactgaaggatgccgcaaccgatccagctaagccacttctcagttatgccgggagctgcccaccttccccaccatctgtgatttcgtccatcgcggcccttgaaaaccagatgaaaatgatagattccgttatgtcgtgtcagcagctgactggattgaaaagtgtggagaacggctccggggagtctgaccgcctgtcaaatgactccagctctgcagtgggagatttagaatcaaggtccgcaggctcaccagccctttctgaaagctctagtagccaggcactaagcccagctccctcgaatggcgagtctttcaggtcaaagtcacctggactaggggcaccggaagaaccgcaggagatacccctgaagactgaacgtccagactcacctgcggccgctcccggtagcggaggcgcccccggccgagcgggcattaaggaagaggcccccttctccttactgttcctctctcgggagcgagggcctagccagagtacgccaagtttgattagttccgcggctcccactatgatcaaaatggaagtgaatggacatggaaaggcaatggctctgggagaaggaccaccccttcccgccggcgtgcaggtgcctgcaggcccccagactgtcatgggccccgggttggctcccatgcttgcccccccgccccgtcggacaccaaagcagcataactgtcagagctgtggtaaaacattttctagcgcctccgccttgcagatccatgagcgcacccacacaggggaaaagccatttggctgtaccatatgcggaagagcttttacaaccaagggcaatctgaaggttcatatggggacgcacatgtggaacaacgccccagctcggaggggaagaagattgtcagtcgagaatccaatggccctgctcgggggggatgccctcaagttcagtgaaatgtttcagaaggatctggctgctcgtgcgatgaacgtggacccgagtttttggaaccaatacgctgccgcaatcacaaatggtctcgctatgaagaacaacgagatctccgtcatccaaaacggaggcattccgcagctccctgtcagcttaggcgggagtgccctgccccccttggggtcaatggctagcggaatggacaaagcccgcaccggaagctctccacctattgtctcccttgacaaggctagtagtgaaacggcagctagccgccccttcaccagattcatagaggataacaaggaaataggaattaactag

SEQ ID NO: 247572 - DNA, 3903 bp, Artificial Sequence
  derived and/or modified sequence
atgagccggcggaagcaggccaagccccagcacctgaagagcgacgaagaactgcttcccccggatggcgcccccgaacacgccgcccctggggagggggccgaggatgccgatagcgggcctgaaagtcgcagtggcggcgaagaaacctcagtctgtgaaaagtgctgcgccgagttttttaagtgggctgactttctggaacaccagagaagttgtactaagcttccccctgtgttgattgtccacgaggatgcgcccgccccaccaccagaagatttccctgaaccgagtcccgcttcctctcctagtgagagagctgaatctgaagctgccgaagaagcaggcgcagaaggagcggagggtgaagccagacctgtggagaaagaagcagaacctatggacgccgagcctgctggtgatacccgcgcgcccaggcccccccctgcagctccagcgcctccaacacctgcttatggagctccttcgactaacgtcacgctggaagcactgctcagtacaaaggtagccgttgcgcagttttcacaaggggcacgagcggccgggggctcaggagcagggggcggcgtagcagctgctgccgttcctctcatcttagagcagctgatggccctgcagcagcagcagattcaccaactgcagttgatagaacaaattaggagccaagtggccctgatgcagcgcccccccccgagaccctcattatcccccgccgcggctccttccgctccgggacccgctccttcacagctacccggtctggccgcgctgcctctctccgctggagcccccgcggctgccatcgccggctccggccctgccgcccccgctgcatttgagggagctcagccgttatctcgaccagagtccggcgcatccacacccggaggcccggcggagcctagcgccccagccgcaccaagcgctgcacccgctcctgcagctcccgctccagccccagctccacaatcggccgctagctcacagccccagtccgcttccactccccctgcgctagccccgggttccctcctgggcgcagcaccaggactgccctcacccctgctaccccagaccagtgcatctggggtgatcttccctaaccccctagtgtcgatagctgctaccgccaacgccctggatcctttgtccgcattgatgaagcacagaaaaggaaaacctccgaatgtgtcagtgttcgagcccaaggcctctgcggaggaccccttctttaagcataagtgcaggttctgcgcaaaagtgttcggtagcgacagtgccctgcagattcacttgcggagccatacaggagagagaccatttaagtgtaacatttgtggtaatcgtttcagcaccaagggtaacctgaaggtgcacttccaacgtcataaagaaaaataccctcacattcagatgaatccctaccctgtccctgagtatcttgacaacgtgcccacttgctctggaattccgtatggcatgagcctgccacccgaaaagcccgtaacaacctggctggactcgaagccggttctgccaaccgtgccaacatctgtaggccttcagcttcctcctaccgtgccaggagctcacggttatgctgacagtccatcagctacccctgccagccgctctccacaaagaccatctcctgcctcaagcgaatgcgccagtttgtctccagggctcaatcacgttgaatctggtgtgtccgcaaccgccgaaagcccccagtcactgctgggcggcccacccttgacaaaggccgagcctgtatcgcttccgtgcacaaatgctagggcaggagacgccccggtaggtgcccaagctagtgccgctcctacttccgttgacggagcacctacttcccttggatcaccagggctgcctgcagtttccgagcagttcaaagcccaattcccctttggtggtttacttgacagcatgcagacgtctgaaacttctaaactgcagcagctcgtggagaatatcgacaaaaaaatgacagatcctaatcagtgcgttatctgtcatcgagtgctatcgtgccagtccgccctcaaaatgcattaccggacccataccggcgagagaccattcaagtgtaaaatctgtggcagggctttcacaaccaaggggaacctaaagacacacttcggcgtccatcgggcaaagcctcccctcagggtacagcactcttgtcctatctgtcagaaaaagtttaccaatgctgtggtactgcagcagcacattagaatgcacatgggcggacagatacccaatacgccacttcctgaggggtttcaggacgctatggacagcgagcttgcatacgacgacaagaatgccgaaactctgtctagctatgatgacgatatggatgagaactccatggaggacgacgccgaacttaaagacgctgccaccgatccggccaaaccgctcctcagctatgccgggtcttgccccccatctccacctagtgtgattagcagtattgcagccctggagaatcagatgaaaatgattgactctgtgatgagctgtcagcaacttacaggactcaagagcgtcgagaacggaagcggtgaatccgaccggctgagcaatgactcatctagcgcagttggggacctggagtcccggtccgcgggctccccagccctgtccgagagttcatcaagccaagcgctgagcccagcgccatccaatggcgagtcttttcggtctaaatctccgggactcggcgctcctgaagagccgcaggaaattccactgaaaacggagagaccggactcacccgcagctgccccaggatccggaggcgcccccggtcgtgcaggtattaaggaagaagcacctttctcgctgttattccttagcagagagcggggaaaatgcccctccaccgtgtgcggtgtgtgtgggaagccattcgcttgcaagtctgcgctggagattcactaccgctctcataccaaggaaaggccatttgtctgcgccctctgcaggcgcggctgtagcaccatgggtaaccttaaacagcacctcctgactcatcggttaaaggagctgccttcccagctatttgaccctaactttgccttaggacctagccagtctacaccaagtctcatctcatccgcggcacccacgatgatcaaaatggaggtgaacggccacggcaaagctatggcactcggtgagggaccgcctctccctgccggggtccaagtacccgctggaccccagacagtaatggggcctggactggctccgatgctcgctccccccccacggcgaaccccgaagcaacacaattgtcagagctgcggcaaaacatttagtagtgcctcagctctccagattcacgagaggactcacaccggcgagaagccttttggttgtaccatttgcggtagggcattcaccactaaggggaacctgaaagtgcacatgggaacacacatgtggaataatgctcctgcaagacgggggcgcaggctgtctgtcgaaaatcccatggccctcttagggggtgatgcattaaagttctctgagatgttccagaaggatctcgccgcccgcgcaatgaacgttgacccgtcgttttggaatcaatatgcagccgcgattaccaacgggctggcaatgaaaaataatgaaatctccgtgatacagaatggaggcattcctcaacttccagtaagtctcggaggctccgctctgcctcctctggggagcatggctagtggcatggataaagccagaaccggaagtagcccaccaatagttagcttggacaaggctagttctgaaacggccgccagccgccccttcacacggtttatagaggacaacaaagagatcggcattaactag

SEQ ID NO: 247573 - DNA, 2883 bp, Artificial Sequence
  derived and/or modified sequence
atgagccggcggaagcaggccaagccccagcacctgaagagcgacgaggagctgttgcctccggatggcgccccagagcacgcagccccgggggagggggcagaagatgctgacagtgggcctgagtcaaggtccggcggggaagaaactagcgtctgcgagaagtgctgcgcagaattctttaagtgggccgattttctggagcaccaacgctcatgtacaaagctaccccccgttttgattgtgcatgaagacgcaccccctgggctgccctcaccactgcttcctcagacatcagctagcggggtgatatttccaaaccccctagtaagtattgcagccaccgccaatgccttagatccgttgtccgccctgatgaagcaccggaaggggaaaccccctaacgtatctgtgtttgagccaaaagcatctgccgaagaccctttctttaagcataagtgccgattttgtgcaaaggttttcggatcggattctgctttacagatccatcttcgttctcacaccggtgagaggcctttcaagtgcaacatatgtggtaatcgctttagtaccaagggcaacttgaaggtgcattttcagcgccacaaagagaagtatcctcacatacagatgaacccctaccccgtacccgaatacttagataacgtacccacatgttctggtattccctacggaatgagcctgccccctgagaagccggtgaccacttggctcgactcaaaaccagtccttccaacagtgcctacaagcgtcggccttcaacttccacctacagtgcctggggcccacggctatgctgactctccttccgcaactccagcctcccgctccccccaacggccaagtcccgcttcatctgagtgcgcatccctatctcccggactgaatcacgtcgagagtggcgtatcggccactgccgaatccccccagtctcttcttggggggcccccactgacaaaggctgagccggtgtcactaccctgcacgaacgcccgggctggcgatgccccagtgggagcacaagctagcgctgcaccgactagcgtcgatggtgccccaacttcactgggatcccccggactaccagccgtctccgagcagtttaaggcgcaatttcctttcggtggattgctggactctatgcagacctcggagacttctaaacttcaacagctggtggagaatatcgacaagaagatgacggatccaaatcagtgcgttatctgccatcgggtgttaagctgccagtccgcgttaaagatgcattaccgaacacacacaggcgagcggccgtttaagtgtaagatctgcggcagggcctttaccacaaaaggtaatctgaagacccactttggtgtgcaccgagcaaagccacccctgagggtccagcatagctgccctatttgtcagaagaaattcaccaatgccgtggtgttgcaacagcatatacggatgcatatgggcggacagattcccaacaccccgctgcctgaaggcttccaggatgcaatggattctgaactcgcttatgatgacaagaatgccgaaacactttcatcttacgacgacgatatggacgagaacagtatggaagatgatgcagaactgaaagacgcagccaccgacccagctaagcctttactaagctatgccggttcctgccctccttctcccccctctgtgatcagtagtattgcagctctggagaaccagatgaaaatgatcgatagtgtcatgagctgccaacagttaactggcttaaagtctgtagagaacggctctggggagtccgatcgcctctcaaacgatagctcctccgcagtgggggatcttgagtcacggtccgcgggctctcccgctttgtcagagtccagtagcagccaggcacttagcccggctccgagcaacggagaatcattccgcagtaagagtccagggctaggtgccccggaagaaccgcaggaaattccattgaaaactgagcgtccagactcacctgctgcagctcccggatcagggggcgctcctggaagggcaggtatcaaagaggaggccccgttttccttgttatttctgtcacgagagagaggacccagccagtccacccctagtcttatcagcagcgccgctcccaccatgatcaagatggaagttaacggacacggcaaagcgatggccctgggcgagggccctcccctgccggcgggggtgcaggtgccggcagggccccaaacagtgatgggccctggactggcacctatgttggcccctcctccgaggagaacccctaagcaacataattgccagtcttgcggcaaaactttctctagtgcttctgcgctccaaatccacgagcgcactcataccggagaaaaaccttttgggtgcactatttgtggacgtgcctttaccacaaaaggcaatctgaaggtgcatatgggcacacatatgtggaacaacgctccagctagacgggggcggcgactcagcgtggagaacccaatggcattgctgggaggagacgcactcaaatttagcgaaatgtttcagaaagatctggccgcccgggctatgaatgtggaccccagcttctggaatcagtacgccgctgctatcactaatgggctcgccatgaaaaataatgaaatttcggtgattcagaatggcgggatcccccagttaccggtttctctgggtggctcggccttaccgccactggggagcatggcttccggtatggataaggctcgaactgggagctcccctcctatagtttctctggacaaggcgtcttcagagacggctgcaagtcggccgttcacaagattcatcgaggacaacaaggaaatagggatcaactag

SEQ ID NO: 247574 - DNA, 3687 bp, Artificial Sequence
  derived and/or modified sequence
atgtcacgaaggaagcaggctaagccgcaacacctgaagagcgacgaggagctgctaccacccgatggcgcacctgagcacgccgctcctggagaaggagccgaggacgcagacagtgggccagagtccaggtcaggcggtgaagagactagcgtttgtgaaaaatgttgtgcagaattctttaaatgggcagacttcttggaacatcagagaagttgcactaagctgcctcccgtgctgatcgttcatgaggatgctcccgctcctcccccagaggactttcccgaacctagtccagccagttcacccagtgaacgcgctgaaagcgaagccgcagaggaggctggcgctgagggagcagaaggtgaggctaggccggtggaaaaagaggctgagccaatggacgcagaaccagctggggacactcgggctccgaggccgccacctgcagcccctgctccgccaacaccagcctatggggcaccatccactaacgtcacactggaagccctgttatccaccaaggttgcagtggcccaatttagccagggagcacgcgcagcaggaggttcaggtgccggaggtggcgttgcagccgcagcggttccactgatccttgaacagctgatggctctgcaacaacagcagatccatcagctacagctgatagaacaaatccgctcgcaggtagctttaatgcaaagacctccgcctagaccttcgctgtctccagccgcagccccttccgcgccaggtccggctccctctcaattacccggactagccgcactcccgttgtctgccggagcacctgcggctgccatcgcgggttccggtccagcagctcctgccgcattcgagggagcccagcccctgtctcggccagagtcaggagcgtcaactccgggagggcctgcagagcctagcgcgcctgccgcaccatccgccgctcctgctcctgccgcacccgcacctgccccagctcctcagtcggccgcttctagtcagccacaatccgccagcacaccacccgcactcgctccaggcagccttttaggcgctgcccctggtctgccaagtccactgttaccccagacctctgctagcggagttatcttcccaaatccactagtcagcattgcagctacggcaaatgccctcgatcccctgtctgcactgatgaaacaccggaagggcaagcctcccaacgtcagcgtgtttgagcccaaagcttcggcggaagacccattcttcaagcacaagtgtaggttctgtgctaaggtgtttggaagcgattctgcgcttcaaattcacctcaggagccatactggggaaagaccctttaagtgtaatatatgcgggaaccgcttttcgaccaaagggaacttaaaggtacatttccaacgacataaggaaaagtatccccacattcagatgaatccctatccggtacccgaatatctggacaatgtccctacctgtagtggcatcccctacggcatgagccttccgccagaaaagcccgtgacgacttggctggactccaagccagttctgccaaccgtgccgaccagtgtcggactgcagttgcccccaactgtcccaggtgcccacgggtacgcagattcaccatctgccactccagcctcaaggtccccccaaaggccatctcctgccagctcggaatgcgcttccctttcaccgggattaaatcatgtcgaatcaggtgtgtcagcaaccgcggaaagcccccagagtctgctggggggacccccactgaccaaggccgagccagtgagcctgccttgtacaaacgcaagagccggtgacgccccagtgggagcacaggcctcagcggctccgacaagcgtggacggcgcaccaacttctctgggaagcccgggattgccagctgtctccgagcagtttaaagcccagttcccttttggtggtcttttggattcgatgcagacatctgagacttccaaactccagcagctcgtggaaaatatagacaaaaaaatgaccgaccccaatcagtgcgtgatctgccatcgggtactgagctgccagagcgctctaaaaatgcactaccgcactcacacaggcgaaaggcccttcaagtgtaagatatgcggccgagcctttactactaaagggaacctaaaaacacacttcggagtacatcgcgctaaaccgcctcttcgggtgcagcactcttgtccgatttgtcagaagaagttcaccaacgctgttgtgcttcagcagcacattaggatgcacatggggggtcagataccaaacactcctcttccagagggattccaggatgcaatggatagcgaactggcgtatgacgataagaatgccgagactctatcatcctatgatgacgatatggacgaaaactccatggaggacgatgccgaactgaaggatgctgccaccgaccctgccaagccccttctcagctatgccggttcttgtcctccctctcccccttcagttatctcctctatagccgctctcgaaaatcagatgaaaatgatcgattctgtgatgagctgtcagcagctgactgggctgaagtctgtggagaatgggagcggcgagagtgaccgcttgtccaatgattctagttccgccgtcggtgacctcgaatctcgttctgctggctcaccagctttgagtgaatcctcttcatcacaagcactgagcccagcaccttcgaatggcgaaagtttccgctctaaatctcccggtttaggtgcacccgaagagcctcaggagatcccactgaaaacagagcggccagatagccctgctgctgcaccaggcagtggcggagccccaggcagggccggaatcaaggaagaggcccctttttccttactgtttttgtccagagaaagaggcccttcacagagcacaccatctcttatttcgagcgccgcacctactatgatcaagatggaagttaacggccatggtaaagctatggcacttggggagggccctcccctcccagcaggggtacaagtaccagccggaccacagacagtgatgggacccggtcttgccccaatgctagctccaccacctcgcaggactcctaaacagcacaattgtcagtcctgcggaaagaccttctcctcagcatcagcactccagatacacgagcgaacacacacaggcgagaagccttttggctgtaccatctgcggccgagcttttacaaccaagggtaatctgaaggtgcacatgggcacccacatgtggaataatgccccagcccgtcgcggaaggaggctgagcgtcgaaaaccctatggctttactgggcggtgacgccctgaaattttctgagatgttccaaaaggatctggccgctagagctatgaatgtggatccgtcattctggaatcagtacgccgctgcaatcaccaatggcctagcaatgaagaacaatgaaatctcggtgatccagaacggaggcattcctcagctgcctgtttcgttaggcggtagtgccctcccaccactggggagtatggcctccggcatggacaaggctcgtaccggaagttctccaccaatcgtgtccctggataaagcgtcaagtgagactgccgcttccaggccattcacccgattcattgaagacaataaagagattggcatcaattag

SEQ ID NO: 247575 - DNA, 3903 bp, Artificial Sequence
  derived and/or modified sequence
atgtcacgccgtaagcaggccaaaccacagcaccttaaatccgatgaggagttattaccaccagatggagcgccagagcatgcagctccgggtgagggggcagaggacgctgactctggacccgagtcccggtctggcggtgaagagacctccgtttgcgagaaatgttgcgctgaattcttcaaatgggcagacttcttggaacaccaaaggagctgtacgaagctgccccctgtccttatagtgcatgaagatgccccagctccccctcccgaagacttcccagagccctctcccgcttcttctcctagcgagagagcagaaagcgaggcggcagaggaagccggtgctgagggcgctgaaggcgaggcacgcccagttgagaaggaggcagaacctatggacgcagagccagctggcgacacaagagcacctaggcctcccccagcggcacccgctcccccaacacccgcatatggtgccccatccaccaacgtcaccctggaggccttactgagcacaaaagtggcggtcgcccaattttcccagggggctagagccgctggcggttctggcgctgggggaggcgtggccgctgccgcagtgccattgatactggagcaactcatggccctacagcagcagcaaattcatcagttgcagcttattgagcagatccggtcacaggtggccctgatgcagagaccaccaccaaggccatcactgtcaccggctgccgctccttcggcacctggtccagcaccaagtcagcttccaggattggccgctcttcccctaagtgctggcgctccagccgcagctatcgcgggatcaggcccagccgctccagccgctttcgagggagctcagcctttatcacgccctgagtcgggtgctagcacacctgggggacctgccgagccctccgcacctgctgccccatcagctgcccctgcccctgccgctcccgctcctgctccagcaccacaatcagctgctagcagccaaccacagagcgcctctacccccccagccttagcacctggttccctcctcggagccgcaccgggtttgccgtcgccacttttgccccaaacatctgcatccggggtgatcttccctaatccacttgtttcgattgcagccacagcgaatgctttagacccgctgtctgccctgatgaagcacagaaagggtaaacccccaaacgttagcgtgttcgaacccaaggcatctgccgaagatccttttttcaaacacaagtgtcgtttttgcgcaaaagtattcggatctgactccgctttgcagatccacctcagaagccataccggggagcggccatttaaatgtaatatctgcggaaaccgcttttcaacaaagggcaatcttaaagtgcatttccagcggcacaaggagaagtatccacatatacagatgaacccttatcctgtgccagaatatctcgataacgtgccaacctgtagtggtatcccctatggaatgtcactgcccccagagaagcctgttaccacgtggctggatagcaagccagtactgccaactgtcccaacatccgttgggctacagcttccaccaactgtcccaggggcacatggatatgcggactcacccagtgccacacctgcctcccgtagccctcaacgacctagcccggcttcaagtgaatgtgcttcactgagcccgggacttaaccacgtggaatccggggtgagcgccacggcggaatcccctcagtctctgttgggtggacctcccctgaccaaagccgaaccagtgtcccttccttgcactaacgccagagccggtgatgccccagtaggagcccaagcgtcagccgcaccgacttccgtggacggagcccctacctcgttaggcagccctggcctgcccgcagtgtcagaacagtttaaagcccagttccccttcggcggtcttctggacagcatgcagaccagtgaaacatctaagctacaacagcttgttgagaatattgataagaaaatgaccgacccaaatcagtgcgtgatctgccatcgagtcttgtcttgtcaatctgccctcaagatgcattaccgcacacatacaggcgaaagaccctttaaatgcaagatctgtgggagggcttttactaccaaagggaatttgaagacccacttcggagtgcacagagcgaagccacctctcagagttcagcactcctgtcccatatgccagaagaaatttactaatgctgtggtgttacagcagcacatccggatgcacatgggtgggcagattcccaacaccccattacccgaggggttccaagatgctatggatagcgaactcgcgtacgatgataaaaatgccgagacgctctcttcgtatgacgacgacatggatgagaacagcatggaggacgacgctgagctgaaggacgccgctaccgaccctgctaaacccctgctctcttacgccggttcatgtcccccttctccgcctagtgtgatctcgagcattgcggctctggaaaatcaaatgaagatgatcgacagtgtgatgagctgccaacagttaacagggctgaaatccgtggagaacggatctggcgagtccgacagattgagcaatgacagttccagcgcagtgggtgatctggaatctcgttccgctgggagcccagcactgtcggagtcaagtagcagccaagccctcagccctgctccttccaatggggagtcttttcgctctaaatctcccggactgggtgcaccagaggaaccccaggagattcctctaaagacagagcggcctgactcccccgcagcggcacctggctcggggggtgcccctggacgggcaggcattaaggaagaggccccatttagcctactattcctatcacgcgagcgaggcaagtgcccgtctactgtctgtggagtctgcgggaagccgtttgcttgtaaatcagcgcttgagatccattacagatctcacaccaaggagcggcctttcgtgtgtgcgctgtgcagacgcggatgctcaacaatgggcaatctcaaacaacacctcctgacccaccgtctaaaggagctgccgagccagctctttgacccgaacttcgccctgggtccatctcaatctaccccatccctcatcagcagtgccgctcctacgatgatcaagatggaagttaatggtcatggcaaggccatggcactgggcgagggtcctcccctccctgcgggtgttcaggtacctgccggtccccaaactgttatgggacccggtctagccccaatgttggcccctcctcccaggcggacccctaaacagcataattgtcagtcctgtgggaaaacattttcttctgctagcgcattgcagattcacgagagaacacacactggggaaaaaccattcggatgcacaatctgtggcagggcttttactactaaggggaacctgaaggtgcatatggggacacatatgtggaataacgccccagccaggagaggcagacggctgagcgtggaaaatcccatggcgcttctgggcggtgacgccctaaagttctcggaaatgtttcaaaaagacctggccgctagagcgatgaatgtcgatccgtcattttggaatcagtacgcagctgccatcactaacgggctggcaatgaaaaacaacgagatctcagtaattcagaatggcggtataccacaactgcctgtttccttggggggttcagcactcccaccactagggtccatggcttctgggatggataaggcacgtactggctcaagccccccaattgtatcgctggacaaggccagcagcgagacagccgctagtaggccgtttacgagattcatagaggataacaaggagattggtataaactag

SEQ ID NO: 247576 - DNA, 2883 bp, Artificial Sequence
  derived and/or modified sequence
atgtcccgtcggaaacaggcaaaaccacagcatctcaagtcggacgaggagctgctccccccagatggtgcccctgagcacgccgctcctggtgaaggggctgaggacgccgattctggcccagagtcacgctcagggggagaggaaactagtgtatgcgaaaagtgttgcgccgagttttttaaatgggcggatttcctggaacaccaacgctcctgtaccaaactgccacctgtactgattgtgcacgaggatgccccacctggtttgccatcaccactgctcccgcagacaagcgcgagtggcgtgatttttcctaaccctctggtttctatcgctgcgaccgcaaacgctttagatcctctctctgccttgatgaagcacagaaagggaaagccgcctaacgtcagtgtgtttgagccaaaagcgagcgccgaggaccccttcttcaagcataaatgtagattttgtgctaaagtgtttggctccgattctgccctgcagatccacctgcgcagtcacaccggagagcggcctttcaaatgcaacatctgtggaaatcgattctcaacgaaaggcaatctcaaagtgcattttcagaggcacaaagaaaaatatcctcatatacagatgaacccatatccggtccctgagtacctggacaacgtcccaacttgctccggcattccatacggtatgtcccttccacctgagaagccagtgacaacgtggctggattcgaaacctgtgctgcccaccgttcctacgtccgtcggcctccagctcccaccgactgtgcctggagcacacgggtacgctgactccccatccgcaacgccagccagccggtcccctcagaggccctctcccgcttccagcgaatgcgccagtttatccccaggactcaaccatgtcgagtccggagtcagcgccactgcagagtcacctcagagtctgctcggcggacccccactgaccaaggcggaacccgtaagtttaccttgtacgaacgccagggccggagatgccccagtcggcgctcaggcttccgctgctcctacctcagtggatggcgctcctacctctctgggcagccccggtctgcccgctgtgtccgagcagttcaaagcccagtttcccttcgggggtctgctcgattccatgcagacgtctgaaactagtaaacttcagcaattggtcgaaaacatagataaaaaaatgacggatcctaaccagtgcgtaatctgccacagggtgctgtcttgtcaaagtgctctgaagatgcactaccggacccatacaggcgagagaccgtttaagtgtaagatttgtggtagagcctttactacaaaggggaacctaaaaacgcatttcggagtacacagagctaagccacccctgcgagtgcagcacagttgccccatttgccagaagaagttcacaaatgccgtggttctgcagcaacacatacgcatgcacatgggcggacagattccaaacacccccctacccgaagggtttcaggacgcgatggatagtgagctcgcctacgacgacaagaacgccgaaacactctcctcctatgatgacgatatggacgagaattctatggaggatgacgccgaattgaaagacgctgccaccgatcctgccaagccattactcagctacgctgggagttgtcctccgtccccaccaagtgtcatctcctcgatcgcagctctggagaaccagatgaagatgatcgacagtgtgatgtcttgtcaacagctgaccggcctgaaaagcgtggagaatggaagtggcgagtctgacaggctgagtaatgactcttcatcagcggtgggggacctagaatcaaggtcggccggaagccctgccttatccgagagctccagtagtcaagctttgtccccagccccaagcaatggcgagagcttccggagtaagtcccccggactaggagcgcctgaagagccccaggagataccgctgaagacagaacggccagacagccctgccgcagctcctggttcaggtggagcgcctggacgtgctgggatcaaagaggaggcacctttcagtctgctcttcttgagcagagagagaggaccctctcagtctaccccctcactgatttcaagcgccgcaccgactatgatcaagatggaggtaaatggccatggtaaggccatggccttgggcgaggggccaccactgcctgctggggttcaggtacccgctggaccgcagaccgtgatgggacctgggctagcgcctatgctcgcccctccccctcgtcgaactccaaaacagcacaactgtcagtcctgtggtaaaacattctcctccgcgtccgccttgcagattcacgagcggacacatacgggcgagaagccatttggctgtacgatctgcgggcgtgcctttacgacaaagggtaacttaaaagtccatatgggcacacacatgtggaataacgctcctgcacgacgcggacggcgactttcagtggaaaatcccatggcgttacttggaggagatgctctcaaattttctgaaatgttccagaaggacctggcagccagggcaatgaacgtggacccatctttctggaatcagtatgccgcagctattaccaacgggttagctatgaagaataatgagatttcggtcatccagaacggaggtatccctcaattacctgttagcctagggggatctgcccttccaccattaggctctatggcctcaggaatggacaaagcccgaaccggcagctcacctccaattgtgtctctagataaagcctcatccgagacggctgctagccggccattcacgaggttcattgaggataataaggaaattggcatcaactag

SEQ ID NO: 247577 - DNA, 3762 bp, Artificial Sequence
  derived and/or modified sequence
atgtctcggcgcaagcaggccaagccccagcacctcaagtcggacgaggagctgctgccgcctgacggggctcccgagcacgccgccccgggggaaggtgcggaggacgcagacagcgggcccgagagccgcagcgggggcgaggagaccagcgtgtgcgagaaatgctgcgccgagttcttcaagtgggcggacttcctggagcaccagcggagctgcaccaagctcccgcccgtgctgatcgtgcacgaggacgcgcccgcgccgccccccgaggacttccccgagccttcgcccgccagctcccccagcgagcgcgccgaaagcgaggcggccgaggaggcgggtgcggagggcgcggagggcgaggccaggccggtggagaaggaggccgagcccatggacgcggaacccgcgggggacacgcgcgcgccccggcccccgcctgcggcccctgcacccccaacgcccgcctacggcgcgcccagcaccaacgtgaccctggaggcgctgctgagcaccaaggtggcggtggcgcagttctcgcagggcgcgcgcgcggcaggcggctcgggagcaggtggaggcgtggcagctgcagccgtgcccctgatcctggaacagctcatggccctgcagcagcagcagatccaccagctgcagctcatcgagcagatccgcagccaggtggccctcatgcagcgcccgccgccgcggccctcactcagccccgcggccgccccgagcgcaccgggcccggcccccagccagctgcccgggctggccgcgctcccgctgtcggccggggcccctgccgccgccatcgcgggctcgggccccgccgccccggccgccttcgagggcgcgcagccgctgtcccggcccgagtctggcgccagcacccccggcggccctgcggagcccagcgcgcccgccgcccccagcgccgcccctgcccccgctgcccccgccccggcgccagcgccgcagagcgcagcctcgtcgcagccgcagagcgcatccacgccgcctgccctggccccggggtccctgctgggtgcggcgcccggcctgccaagtccgcttctacctcagacttccgccagcggcgtcatcttccccaacccgctggtcagcatcgcggccacggccaacgctctggacccgctgtccgcgctcatgaagcaccgcaagggcaagccgcccaatgtgtcggtgttcgagcccaaagccagcgccgaggacccgttcttcaagcacaaatgccgcttctgcgccaaggtcttcggcagcgacagcgcgctccagatccacctgcgctcgcacacaggcgagcggcccttcaagtgcaacatctgcgggaaccgcttctccaccaaaggcaacctgaaggtgcacttccagaggcacaaggagaagtacccccacatccagatgaacccttacccggtccccgagtacctggacaacgtgcccacctgctcgggcatcccctacggcatgtcgctgccccccgagaagcccgtgaccacctggctggacagcaagcccgtgctgcccaccgtgcccacgtccgtggggctgcaactgccgcccactgtccctggcgcgcacggctacgccgactctcccagcgccaccccagccagccgctccccgcagaggccctcgcccgcctccagcgagtgcgcctccttgtccccaggcctcaaccacgtggagtccggcgtgtcggccaccgccgagtccccacagtcgctcctcggcgggccgcccctcactaaagccgagcccgtcagcctgccctgcaccaacgccagggccggggacgctcccgtgggcgcgcaggctagcgctgcacccacatcggtggacggcgcacccacgagcctcggcagccccgggctgcccgccgtctccgagcagttcaaggcccagtttccgttcggggggctgctagactcgatgcaaacgtcggaaacctcgaagctgcagcagctggtggagaacatcgacaagaagatgacggacccgaaccagtgcgtcatctgccaccgggtgctgagctgccagagcgcgctgaagatgcactaccggacgcacacgggggagcggccgttcaagtgcaagatctgcggccgcgccttcaccaccaagggcaacctcaagacgcacttcggcgtgcaccgtgcaaagccgcccctgcgcgtgcagcactcctgccccatctgccagaagaagttcaccaacgccgtggtcctgcagcagcacatccgcatgcacatgggcggccagatccccaacacgccgctgccggagggcttccaggatgccatggactccgagctggcctacgacgacaagaacgcggagaccctgagcagctacgatgacgacatggacgagaactccatggaggacgacgctgagctgaaggacgcggccaccgacccggccaagccactcctgtcctacgcggggtcctgcccgccctccccgccctcggtcatctccagcattgccgccctggagaaccagatgaagatgatcgactcggtcatgagctgccagcagctgaccggcctcaagtccgtggagaacgggtccggggagagtgaccgcctgagcaacgactcctcgtcggccgtgggcgacctggagagccgcagcgcgggcagccccgccctgtccgagtcctcgtcctcgcaggccctgtcgccggcccccagcaatggtgagagcttccgctccaagtccccgggcctgggcgccccggaggagccccaggaaatcccgctcaagaccgagaggccggacagcccagccgccgccccgggcagcggaggcgcccctggccgcgcgggcatcaaggaggaggcgcccttcagcctgctgttcctgagcagggagcggggtcccagccaaagcactcctagcctgatctccagcgccgcacccaccatgatcaaaatggaagtgaacggtcacggcaaggccatggcgctgggcgagggtcccccgctgcccgcgggcgtccaggtccccgccgggcctcagacagtgatgggcccgggcctggcgcccatgctggcccccccaccgcgccggacgcccaagcagcacaactgccagtcgtgcgggaagaccttctcctcggccagcgccctgcagatccatgagcgcacgcacaccggcgagaagccgttcggctgcaccatctgcggccgggccttcaccactaagggcaacctcaaggtgcacatggggacacacatgtggaataacgcccccgcgagacgcggccgccgcctgtctgtggagaaccccatggctctcctagggggtgatgccctgaagttctctgaaatgttccagaaggacctggcagctcgggcaatgaacgtcgaccccagtttttggaaccagtatgctgcagccatcactaacgggctcgccatgaagaacaacgagatctccgtcatccagaacggcggcatcccccagctccccgtgagtcttgggggcagcgccctcccccctctgggcagcatggccagtgggatggacaaagcacgcactggcagtagcccacccatcgtcagcttggacaaagcgagctcagaaacagcagccagccgcccattcacgcggtttatcgaggataacaaggagattggtatcaactagccagtgactcgctcatctgccctgcccaggcccacgttttgaagttggagcatcaggcctccgacctttcttgcc

SEQ ID NO: 247578 - DNA, 3903 bp, Artificial Sequence
  derived and/or modified sequence
atgtctcggcgcaagcaggccaagccccagcacctcaagtcggacgaggagctgctgccgcctgacggggctcccgagcacgccgccccgggggaaggtgcggaggacgcagacagcgggcccgagagccgcagcgggggcgaggagaccagcgtgtgcgagaaatgctgcgccgagttcttcaagtgggcggacttcctggagcaccagcggagctgcaccaagctcccgcccgtgctgatcgtgcacgaggacgcgcccgcgccgccccccgaggacttccccgagccttcgcccgccagctcccccagcgagcgcgccgaaagcgaggcggccgaggaggcgggtgcggagggcgcggagggcgaggccaggccggtggagaaggaggccgagcccatggacgcggaacccgcgggggacacgcgcgcgccccggcccccgcctgcggcccctgcacccccaacgcccgcctacggcgcgcccagcaccaacgtgaccctggaggcgctgctgagcaccaaggtggcggtggcgcagttctcgcagggcgcgcgcgcggcaggcggctcgggagcaggtggaggcgtggcagctgcagccgtgcccctgatcctggaacagctcatggccctgcagcagcagcagatccaccagctgcagctcatcgagcagatccgcagccaggtggccctcatgcagcgcccgccgccgcggccctcactcagccccgcggccgccccgagcgcaccgggcccggcccccagccagctgcccgggctggccgcgctcccgctgtcggccggggcccctgccgccgccatcgcgggctcgggccccgccgccccggccgccttcgagggcgcgcagccgctgtcccggcccgagtctggcgccagcacccccggcggccctgcggagcccagcgcgcccgccgcccccagcgccgcccctgcccccgctgcccccgccccggcgccagcgccgcagagcgcagcctcgtcgcagccgcagagcgcatccacgccgcctgccctggccccggggtccctgctgggtgcggcgcccggcctgccaagtccgcttctacctcagacttccgccagcggcgtcatcttccccaacccgctggtcagcatcgcggccacggccaacgctctggacccgctgtccgcgctcatgaagcaccgcaagggcaagccgcccaatgtgtcggtgttcgagcccaaagccagcgccgaggacccgttcttcaagcacaaatgccgcttctgcgccaaggtcttcggcagcgacagcgcgctccagatccacctgcgctcgcacacaggcgagcggcccttcaagtgcaacatctgcgggaaccgcttctccaccaaaggcaacctgaaggtgcacttccagaggcacaaggagaagtacccccacatccagatgaacccttacccggtccccgagtacctggacaacgtgcccacctgctcgggcatcccctacggcatgtcgctgccccccgagaagcccgtgaccacctggctggacagcaagcccgtgctgcccaccgtgcccacgtccgtggggctgcaactgccgcccactgtccctggcgcgcacggctacgccgactctcccagcgccaccccagccagccgctccccgcagaggccctcgcccgcctccagcgagtgcgcctccttgtccccaggcctcaaccacgtggagtccggcgtgtcggccaccgccgagtccccacagtcgctcctcggcgggccgcccctcactaaagccgagcccgtcagcctgccctgcaccaacgccagggccggggacgctcccgtgggcgcgcaggctagcgctgcacccacatcggtggacggcgcacccacgagcctcggcagccccgggctgcccgccgtctccgagcagttcaaggcccagtttccgttcggggggctgctagactcgatgcaaacgtcggaaacctcgaagctgcagcagctggtggagaacatcgacaagaagatgacggacccgaaccagtgcgtcatctgccaccgggtgctgagctgccagagcgcgctgaagatgcactaccggacgcacacgggggagcggccgttcaagtgcaagatctgcggccgcgccttcaccaccaagggcaacctcaagacgcacttcggcgtgcaccgtgcaaagccgcccctgcgcgtgcagcactcctgccccatctgccagaagaagttcaccaacgccgtggtcctgcagcagcacatccgcatgcacatgggcggccagatccccaacacgccgctgccggagggcttccaggatgccatggactccgagctggcctacgacgacaagaacgcggagaccctgagcagctacgatgacgacatggacgagaactccatggaggacgacgctgagctgaaggacgcggccaccgacccggccaagccactcctgtcctacgcggggtcctgcccgccctccccgccctcggtcatctccagcattgccgccctggagaaccagatgaagatgatcgactcggtcatgagctgccagcagctgaccggcctcaagtccgtggagaacgggtccggggagagtgaccgcctgagcaacgactcctcgtcggccgtgggcgacctggagagccgcagcgcgggcagccccgccctgtccgagtcctcgtcctcgcaggccctgtcgccggcccccagcaatggtgagagcttccgctccaagtccccgggcctgggcgccccggaggagccccaggaaatcccgctcaagaccgagaggccggacagcccagccgccgccccgggcagcggaggcgcccctggccgcgcgggcatcaaggaggaggcgcccttcagcctgctgttcctgagcagggagcggggtaagtgtcccagcactgtgtgtggtgtctgtggcaagccttttgcttgcaagagcgcgttggaaatccactaccgcagccatactaaggagcggccattcgtctgcgcgctctgcaggcgagggtgctccactatgggtaatttaaaacagcacttactgacacacagattgaaagagctgccttctcagttatttgaccccaactttgctctaggtcccagccaaagcactcctagcctgatctccagcgccgcacccaccatgatcaaaatggaagtgaacggtcacggcaaggccatggcgctgggcgagggtcccccgctgcccgcgggcgtccaggtccccgccgggcctcagacagtgatgggcccgggcctggcgcccatgctggcccccccaccgcgccggacgcccaagcagcacaactgccagtcgtgcgggaagaccttctcctcggccagcgccctgcagatccatgagcgcacgcacaccggcgagaagccgttcggctgcaccatctgcggccgggccttcaccactaagggcaacctcaaggtgcacatggggacacacatgtggaataacgcccccgcgagacgcggccgccgcctgtctgtggagaaccccatggctctcctagggggtgatgccctgaagttctctgaaatgttccagaaggacctggcagctcgggcaatgaacgtcgaccccagtttttggaaccagtatgctgcagccatcactaacgggctcgccatgaagaacaacgagatctccgtcatccagaacggcggcatcccccagctccccgtgagtcttgggggcagcgccctcccccctctgggcagcatggccagtgggatggacaaagcacgcactggcagtagcccacccatcgtcagcttggacaaagcgagctcagaaacagcagccagccgcccattcacgcggtttatcgaggataacaaggagattggtatcaactag

SEQ ID NO: 247579 - DNA, 2958 bp, Artificial Sequence
  derived and/or modified sequence
atgtctcggcgcaagcaggccaagccccagcacctcaagtcggacgaggagctgctgccgcctgacggggctcccgagcacgccgccccgggggaaggtgcggaggacgcagacagcgggcccgagagccgcagcgggggcgaggagaccagcgtgtgcgagaaatgctgcgccgagttcttcaagtgggcggacttcctggagcaccagcggagctgcaccaagctcccgcccgtgctgatcgtgcacgaggacgcgccccccggcctgccaagtccgcttctacctcagacttccgccagcggcgtcatcttccccaacccgctggtcagcatcgcggccacggccaacgctctggacccgctgtccgcgctcatgaagcaccgcaagggcaagccgcccaatgtgtcggtgttcgagcccaaagccagcgccgaggacccgttcttcaagcacaaatgccgcttctgcgccaaggtcttcggcagcgacagcgcgctccagatccacctgcgctcgcacacaggcgagcggcccttcaagtgcaacatctgcgggaaccgcttctccaccaaaggcaacctgaaggtgcacttccagaggcacaaggagaagtacccccacatccagatgaacccttacccggtccccgagtacctggacaacgtgcccacctgctcgggcatcccctacggcatgtcgctgccccccgagaagcccgtgaccacctggctggacagcaagcccgtgctgcccaccgtgcccacgtccgtggggctgcaactgccgcccactgtccctggcgcgcacggctacgccgactctcccagcgccaccccagccagccgctccccgcagaggccctcgcccgcctccagcgagtgcgcctccttgtccccaggcctcaaccacgtggagtccggcgtgtcggccaccgccgagtccccacagtcgctcctcggcgggccgcccctcactaaagccgagcccgtcagcctgccctgcaccaacgccagggccggggacgctcccgtgggcgcgcaggctagcgctgcacccacatcggtggacggcgcacccacgagcctcggcagccccgggctgcccgccgtctccgagcagttcaaggcccagtttccgttcggggggctgctagactcgatgcaaacgtcggaaacctcgaagctgcagcagctggtggagaacatcgacaagaagatgacggacccgaaccagtgcgtcatctgccaccgggtgctgagctgccagagcgcgctgaagatgcactaccggacgcacacgggggagcggccgttcaagtgcaagatctgcggccgcgccttcaccaccaagggcaacctcaagacgcacttcggcgtgcaccgtgcaaagccgcccctgcgcgtgcagcactcctgccccatctgccagaagaagttcaccaacgccgtggtcctgcagcagcacatccgcatgcacatgggcggccagatccccaacacgccgctgccggagggcttccaggatgccatggactccgagctggcctacgacgacaagaacgcggagaccctgagcagctacgatgacgacatggacgagaactccatggaggacgacgctgagctgaaggacgcggccaccgacccggccaagccactcctgtcctacgcggggtcctgcccgccctccccgccctcggtcatctccagcattgccgccctggagaaccagatgaagatgatcgactcggtcatgagctgccagcagctgaccggcctcaagtccgtggagaacgggtccggggagagtgaccgcctgagcaacgactcctcgtcggccgtgggcgacctggagagccgcagcgcgggcagccccgccctgtccgagtcctcgtcctcgcaggccctgtcgccggcccccagcaatggtgagagcttccgctccaagtccccgggcctgggcgccccggaggagccccaggaaatcccgctcaagaccgagaggccggacagcccagccgccgccccgggcagcggaggcgcccctggccgcgcgggcatcaaggaggaggcgcccttcagcctgctgttcctgagcagggagcggggtcccagccaaagcactcctagcctgatctccagcgccgcacccaccatgatcaaaatggaagtgaacggtcacggcaaggccatggcgctgggcgagggtcccccgctgcccgcgggcgtccaggtccccgccgggcctcagacagtgatgggcccgggcctggcgcccatgctggcccccccaccgcgccggacgcccaagcagcacaactgccagtcgtgcgggaagaccttctcctcggccagcgccctgcagatccatgagcgcacgcacaccggcgagaagccgttcggctgcaccatctgcggccgggccttcaccactaagggcaacctcaaggtgcacatggggacacacatgtggaataacgcccccgcgagacgcggccgccgcctgtctgtggagaaccccatggctctcctagggggtgatgccctgaagttctctgaaatgttccagaaggacctggcagctcgggcaatgaacgtcgaccccagtttttggaaccagtatgctgcagccatcactaacgggctcgccatgaagaacaacgagatctccgtcatccagaacggcggcatcccccagctccccgtgagtcttgggggcagcgccctcccccctctgggcagcatggccagtgggatggacaaagcacgcactggcagtagcccacccatcgtcagcttggacaaagcgagctcagaaacagcagccagccgcccattcacgcggtttatcgaggataacaaggagattggtatcaactagccagtgactcgctcatctgccctgcccaggcccacgttttgaagttggagcatcaggcctccgacctttcttgcc

SEQ ID NO: 247580 - DNA, 3687 bp, Artificial Sequence
  derived and/or modified sequence
atgagcagaagaaagcaggccaagccccagcacctgaagagcgacgaggagctgctgccccccgacggcgcccccgagcacgccgcccccggcgagggcgccgaggacgccgacagcggccccgagagcagaagcggcggcgaggagaccagcgtgtgcgagaagtgctgcgccgagttcttcaagtgggccgacttcctggagcaccagagaagctgcaccaagctgccccccgtgctgatcgtgcacgaggacgcccccgcccccccccccgaggacttccccgagcccagccccgccagcagccccagcgagagagccgagagcgaggccgccgaggaggccggcgccgagggcgccgagggcgaggccagacccgtggagaaggaggccgagcccatggacgccgagcccgccggcgacaccagagcccccagacccccccccgccgcccccgccccccccacccccgcctacggcgcccccagcaccaacgtgaccctggaggccctgctgagcaccaaggtggccgtggcccagttcagccagggcgccagagccgccggcggcagcggcgccggcggcggcgtggccgccgccgccgtgcccctgatcctggagcagctgatggccctgcagcagcagcagatccaccagctgcagctgatcgagcagatcagaagccaggtggccctgatgcagagacccccccccagacccagcctgagccccgccgccgcccccagcgcccccggccccgcccccagccagctgcccggcctggccgccctgcccctgagcgccggcgcccccgccgccgccatcgccggcagcggccccgccgcccccgccgccttcgagggcgcccagcccctgagcagacccgagagcggcgccagcacccccggcggccccgccgagcccagcgcccccgccgcccccagcgccgcccccgcccccgccgcccccgcccccgcccccgccccccagagcgccgccagcagccagccccagagcgccagcaccccccccgccctggcccccggcagcctgctgggcgccgcccccggcctgcccagccccctgctgccccagaccagcgccagcggcgtgatcttccccaaccccctggtgagcatcgccgccaccgccaacgccctggaccccctgagcgccctgatgaagcacagaaagggcaagccccccaacgtgagcgtgttcgagcccaaggccagcgccgaggaccccttcttcaagcacaagtgcagattctgcgccaaggtgttcggcagcgacagcgccctgcagatccacctgagaagccacaccggcgagagacccttcaagtgcaacatctgcggcaacagattcagcaccaagggcaacctgaaggtgcacttccagagacacaaggagaagtacccccacatccagatgaacccctaccccgtgcccgagtacctggacaacgtgcccacctgcagcggcatcccctacggcatgagcctgccccccgagaagcccgtgaccacctggctggacagcaagcccgtgctgcccaccgtgcccaccagcgtgggcctgcagctgccccccaccgtgcccggcgcccacggctacgccgacagccccagcgccacccccgccagcagaagcccccagagacccagccccgccagcagcgagtgcgccagcctgagccccggcctgaaccacgtggagagcggcgtgagcgccaccgccgagagcccccagagcctgctgggcggcccccccctgaccaaggccgagcccgtgagcctgccctgcaccaacgccagagccggcgacgcccccgtgggcgcccaggccagcgccgcccccaccagcgtggacggcgcccccaccagcctgggcagccccggcctgcccgccgtgagcgagcagttcaaggcccagttccccttcggcggcctgctggacagcatgcagaccagcgagaccagcaagctgcagcagctggtggagaacatcgacaagaagatgaccgaccccaaccagtgcgtgatctgccacagagtgctgagctgccagagcgccctgaagatgcactacagaacccacaccggcgagagacccttcaagtgcaagatctgcggcagagccttcaccaccaagggcaacctgaagacccacttcggcgtgcacagagccaagccccccctgagagtgcagcacagctgccccatctgccagaagaagttcaccaacgccgtggtgctgcagcagcacatcagaatgcacatgggcggccagatccccaacacccccctgcccgagggcttccaggacgccatggacagcgagctggcctacgacgacaagaacgccgagaccctgagcagctacgacgacgacatggacgagaacagcatggaggacgacgccgagctgaaggacgccgccaccgaccccgccaagcccctgctgagctacgccggcagctgcccccccagcccccccagcgtgatcagcagcatcgccgccctggagaaccagatgaagatgatcgacagcgtgatgagctgccagcagctgaccggcctgaagagcgtggagaacggcagcggcgagagcgacagactgagcaacgacagcagcagcgccgtgggcgacctggagagcagaagcgccggcagccccgccctgagcgagagcagcagcagccaggccctgagccccgcccccagcaacggcgagagcttcagaagcaagagccccggcctgggcgcccccgaggagccccaggagatccccctgaagaccgagagacccgacagccccgccgccgcccccggcagcggcggcgcccccggcagagccggcatcaaggaggaggcccccttcagcctgctgttcctgagcagagagagaggccccagccagagcacccccagcctgatcagcagcgccgcccccaccatgatcaagatggaggtgaacggccacggcaaggccatggccctgggcgagggcccccccctgcccgccggcgtgcaggtgcccgccggcccccagaccgtgatgggccccggcctggcccccatgctggcccccccccccagaagaacccccaagcagcacaactgccagagctgcggcaagaccttcagcagcgccagcgccctgcagatccacgagagaacccacaccggcgagaagcccttcggctgcaccatctgcggcagagccttcaccaccaagggcaacctgaaggtgcacatgggcacccacatgtggaacaacgcccccgccagaagaggcagaagactgagcgtggagaaccccatggccctgctgggcggcgacgccctgaagttcagcgagatgttccagaaggacctggccgccagagccatgaacgtggaccccagcttctggaaccagtacgccgccgccatcaccaacggcctggccatgaagaacaacgagatcagcgtgatccagaacggcggcatcccccagctgcccgtgagcctgggcggcagcgccctgccccccctgggcagcatggccagcggcatggacaaggccagaaccggcagcagcccccccatcgtgagcctggacaaggccagcagcgagaccgccgccagcagacccttcaccagattcatcgaggacaacaaggagatcggcatcaactag

SEQ ID NO: 247581 - DNA, 3903 bp, Artificial Sequence
  derived and/or modified sequence
atgagcagaagaaagcaggccaagccccagcacctgaagagcgacgaggagctgctgccccccgacggcgcccccgagcacgccgcccccggcgagggcgccgaggacgccgacagcggccccgagagcagaagcggcggcgaggagaccagcgtgtgcgagaagtgctgcgccgagttcttcaagtgggccgacttcctggagcaccagagaagctgcaccaagctgccccccgtgctgatcgtgcacgaggacgcccccgcccccccccccgaggacttccccgagcccagccccgccagcagccccagcgagagagccgagagcgaggccgccgaggaggccggcgccgagggcgccgagggcgaggccagacccgtggagaaggaggccgagcccatggacgccgagcccgccggcgacaccagagcccccagacccccccccgccgcccccgccccccccacccccgcctacggcgcccccagcaccaacgtgaccctggaggccctgctgagcaccaaggtggccgtggcccagttcagccagggcgccagagccgccggcggcagcggcgccggcggcggcgtggccgccgccgccgtgcccctgatcctggagcagctgatggccctgcagcagcagcagatccaccagctgcagctgatcgagcagatcagaagccaggtggccctgatgcagagacccccccccagacccagcctgagccccgccgccgcccccagcgcccccggccccgcccccagccagctgcccggcctggccgccctgcccctgagcgccggcgcccccgccgccgccatcgccggcagcggccccgccgcccccgccgccttcgagggcgcccagcccctgagcagacccgagagcggcgccagcacccccggcggccccgccgagcccagcgcccccgccgcccccagcgccgcccccgcccccgccgcccccgcccccgcccccgccccccagagcgccgccagcagccagccccagagcgccagcaccccccccgccctggcccccggcagcctgctgggcgccgcccccggcctgcccagccccctgctgccccagaccagcgccagcggcgtgatcttccccaaccccctggtgagcatcgccgccaccgccaacgccctggaccccctgagcgccctgatgaagcacagaaagggcaagccccccaacgtgagcgtgttcgagcccaaggccagcgccgaggaccccttcttcaagcacaagtgcagattctgcgccaaggtgttcggcagcgacagcgccctgcagatccacctgagaagccacaccggcgagagacccttcaagtgcaacatctgcggcaacagattcagcaccaagggcaacctgaaggtgcacttccagagacacaaggagaagtacccccacatccagatgaacccctaccccgtgcccgagtacctggacaacgtgcccacctgcagcggcatcccctacggcatgagcctgccccccgagaagcccgtgaccacctggctggacagcaagcccgtgctgcccaccgtgcccaccagcgtgggcctgcagctgccccccaccgtgcccggcgcccacggctacgccgacagccccagcgccacccccgccagcagaagcccccagagacccagccccgccagcagcgagtgcgccagcctgagccccggcctgaaccacgtggagagcggcgtgagcgccaccgccgagagcccccagagcctgctgggcggcccccccctgaccaaggccgagcccgtgagcctgccctgcaccaacgccagagccggcgacgcccccgtgggcgcccaggccagcgccgcccccaccagcgtggacggcgcccccaccagcctgggcagccccggcctgcccgccgtgagcgagcagttcaaggcccagttccccttcggcggcctgctggacagcatgcagaccagcgagaccagcaagctgcagcagctggtggagaacatcgacaagaagatgaccgaccccaaccagtgcgtgatctgccacagagtgctgagctgccagagcgccctgaagatgcactacagaacccacaccggcgagagacccttcaagtgcaagatctgcggcagagccttcaccaccaagggcaacctgaagacccacttcggcgtgcacagagccaagccccccctgagagtgcagcacagctgccccatctgccagaagaagttcaccaacgccgtggtgctgcagcagcacatcagaatgcacatgggcggccagatccccaacacccccctgcccgagggcttccaggacgccatggacagcgagctggcctacgacgacaagaacgccgagaccctgagcagctacgacgacgacatggacgagaacagcatggaggacgacgccgagctgaaggacgccgccaccgaccccgccaagcccctgctgagctacgccggcagctgcccccccagcccccccagcgtgatcagcagcatcgccgccctggagaaccagatgaagatgatcgacagcgtgatgagctgccagcagctgaccggcctgaagagcgtggagaacggcagcggcgagagcgacagactgagcaacgacagcagcagcgccgtgggcgacctggagagcagaagcgccggcagccccgccctgagcgagagcagcagcagccaggccctgagccccgcccccagcaacggcgagagcttcagaagcaagagccccggcctgggcgcccccgaggagccccaggagatccccctgaagaccgagagacccgacagccccgccgccgcccccggcagcggcggcgcccccggcagagccggcatcaaggaggaggcccccttcagcctgctgttcctgagcagagagagaggcaagtgccccagcaccgtgtgcggcgtgtgcggcaagcccttcgcctgcaagagcgccctggagatccactacagaagccacaccaaggagagacccttcgtgtgcgccctgtgcagaagaggctgcagcaccatgggcaacctgaagcagcacctgctgacccacagactgaaggagctgcccagccagctgttcgaccccaacttcgccctgggccccagccagagcacccccagcctgatcagcagcgccgcccccaccatgatcaagatggaggtgaacggccacggcaaggccatggccctgggcgagggcccccccctgcccgccggcgtgcaggtgcccgccggcccccagaccgtgatgggccccggcctggcccccatgctggcccccccccccagaagaacccccaagcagcacaactgccagagctgcggcaagaccttcagcagcgccagcgccctgcagatccacgagagaacccacaccggcgagaagcccttcggctgcaccatctgcggcagagccttcaccaccaagggcaacctgaaggtgcacatgggcacccacatgtggaacaacgcccccgccagaagaggcagaagactgagcgtggagaaccccatggccctgctgggcggcgacgccctgaagttcagcgagatgttccagaaggacctggccgccagagccatgaacgtggaccccagcttctggaaccagtacgccgccgccatcaccaacggcctggccatgaagaacaacgagatcagcgtgatccagaacggcggcatcccccagctgcccgtgagcctgggcggcagcgccctgccccccctgggcagcatggccagcggcatggacaaggccagaaccggcagcagcccccccatcgtgagcctggacaaggccagcagcgagaccgccgccagcagacccttcaccagattcatcgaggacaacaaggagatcggcatcaactag

SEQ ID NO: 247582 - DNA, 2883 bp, Artificial Sequence
  derived and/or modified sequence
atgagcagaagaaagcaggccaagccccagcacctgaagagcgacgaggagctgctgccccccgacggcgcccccgagcacgccgcccccggcgagggcgccgaggacgccgacagcggccccgagagcagaagcggcggcgaggagaccagcgtgtgcgagaagtgctgcgccgagttcttcaagtgggccgacttcctggagcaccagagaagctgcaccaagctgccccccgtgctgatcgtgcacgaggacgccccccccggcctgcccagccccctgctgccccagaccagcgccagcggcgtgatcttccccaaccccctggtgagcatcgccgccaccgccaacgccctggaccccctgagcgccctgatgaagcacagaaagggcaagccccccaacgtgagcgtgttcgagcccaaggccagcgccgaggaccccttcttcaagcacaagtgcagattctgcgccaaggtgttcggcagcgacagcgccctgcagatccacctgagaagccacaccggcgagagacccttcaagtgcaacatctgcggcaacagattcagcaccaagggcaacctgaaggtgcacttccagagacacaaggagaagtacccccacatccagatgaacccctaccccgtgcccgagtacctggacaacgtgcccacctgcagcggcatcccctacggcatgagcctgccccccgagaagcccgtgaccacctggctggacagcaagcccgtgctgcccaccgtgcccaccagcgtgggcctgcagctgccccccaccgtgcccggcgcccacggctacgccgacagccccagcgccacccccgccagcagaagcccccagagacccagccccgccagcagcgagtgcgccagcctgagccccggcctgaaccacgtggagagcggcgtgagcgccaccgccgagagcccccagagcctgctgggcggcccccccctgaccaaggccgagcccgtgagcctgccctgcaccaacgccagagccggcgacgcccccgtgggcgcccaggccagcgccgcccccaccagcgtggacggcgcccccaccagcctgggcagccccggcctgcccgccgtgagcgagcagttcaaggcccagttccccttcggcggcctgctggacagcatgcagaccagcgagaccagcaagctgcagcagctggtggagaacatcgacaagaagatgaccgaccccaaccagtgcgtgatctgccacagagtgctgagctgccagagcgccctgaagatgcactacagaacccacaccggcgagagacccttcaagtgcaagatctgcggcagagccttcaccaccaagggcaacctgaagacccacttcggcgtgcacagagccaagccccccctgagagtgcagcacagctgccccatctgccagaagaagttcaccaacgccgtggtgctgcagcagcacatcagaatgcacatgggcggccagatccccaacacccccctgcccgagggcttccaggacgccatggacagcgagctggcctacgacgacaagaacgccgagaccctgagcagctacgacgacgacatggacgagaacagcatggaggacgacgccgagctgaaggacgccgccaccgaccccgccaagcccctgctgagctacgccggcagctgcccccccagcccccccagcgtgatcagcagcatcgccgccctggagaaccagatgaagatgatcgacagcgtgatgagctgccagcagctgaccggcctgaagagcgtggagaacggcagcggcgagagcgacagactgagcaacgacagcagcagcgccgtgggcgacctggagagcagaagcgccggcagccccgccctgagcgagagcagcagcagccaggccctgagccccgcccccagcaacggcgagagcttcagaagcaagagccccggcctgggcgcccccgaggagccccaggagatccccctgaagaccgagagacccgacagccccgccgccgcccccggcagcggcggcgcccccggcagagccggcatcaaggaggaggcccccttcagcctgctgttcctgagcagagagagaggccccagccagagcacccccagcctgatcagcagcgccgcccccaccatgatcaagatggaggtgaacggccacggcaaggccatggccctgggcgagggcccccccctgcccgccggcgtgcaggtgcccgccggcccccagaccgtgatgggccccggcctggcccccatgctggcccccccccccagaagaacccccaagcagcacaactgccagagctgcggcaagaccttcagcagcgccagcgccctgcagatccacgagagaacccacaccggcgagaagcccttcggctgcaccatctgcggcagagccttcaccaccaagggcaacctgaaggtgcacatgggcacccacatgtggaacaacgcccccgccagaagaggcagaagactgagcgtggagaaccccatggccctgctgggcggcgacgccctgaagttcagcgagatgttccagaaggacctggccgccagagccatgaacgtggaccccagcttctggaaccagtacgccgccgccatcaccaacggcctggccatgaagaacaacgagatcagcgtgatccagaacggcggcatcccccagctgcccgtgagcctgggcggcagcgccctgccccccctgggcagcatggccagcggcatggacaaggccagaaccggcagcagcccccccatcgtgagcctggacaaggccagcagcgagaccgccgccagcagacccttcaccagattcatcgaggacaacaaggagatcggcatcaactag

SEQ ID NO: 247583 - protein, 167 aa, Artificial Sequence
  derived and/or modified sequence
MVSNFFHVIQVFEKSATLISKTEHIGFVIYSWRKSTTHLGSRRKFAISIYLSEVSLQKYDCPFSGTSFVVFSLFLICAMAGDVVYADIKTVRTSPLELAFPLQRSVSFNFSTVHKSCPAKDWKVHKGKCYWIAETKKSWNKSQNDCAINNSYLMVIQDITAMVRFNI

SEQ ID NO: 247584 - DNA, 670 bp, Artificial Sequence
  derived and/or modified sequence
ggcagaaaactaactgaaaaacgagaacctactgtatggttagtaatttcttccatgtcatacaagtattcgagaaatctgctaccttgattagtaagactgaacacattggttttgtcatttattcatggaggaagtccaccacccacttggggagcagaaggaaatttgccatctcaatttacttatcagaagtttctttgcagaaatatgattgtcccttcagtgggacatcatttgtggtcttctctctctttttgatctgtgcaatggctggagatgtagtctacgctgacatcaaaactgttcggacttccccgttagaactcgcgtttccacttcagagatctgtttctttcaacttttctactgtccataaatcatgtcctgccaaagactggaaggtgcataagggaaaatgttactggattgctgaaactaagaaatcttggaacaaaagtcaaaatgactgtgccataaacaattcatatctcatggtgattcaagacattactgctatggtgagatttaacatttagaggtgacagcatcccccacactggcagtgaattttttgtgctacaaacttggcaaaagtctgtgaaaagaagtttcaacttcatgtgttattaactatacaaatattagttgaatgaattgttgaattaca

SEQ ID NO: 247585 - DNA, 504 bp, Artificial Sequence
  derived and/or modified sequence
atggtgagcaacttcttccacgtgatccaggtgttcgagaagagcgccaccctgatcagcaagaccgagcacatcggcttcgtgatctacagctggagaaagagcaccacccacctgggcagcagaagaaagttcgccatcagcatctacctgagcgaggtgagcctgcagaagtacgactgccccttcagcggcaccagcttcgtggtgttcagcctgttcctgatctgcgccatggccggcgacgtggtgtacgccgacatcaagaccgtgagaaccagccccctggagctggccttccccctgcagagaagcgtgagcttcaacttcagcaccgtgcacaagagctgccccgccaaggactggaaggtgcacaagggcaagtgctactggatcgccgagaccaagaagagctggaacaagagccagaacgactgcgccatcaacaacagctacctgatggtgatccaggacatcaccgccatggtgagattcaacatctag

SEQ ID NO: 247586 - DNA, 504 bp, Artificial Sequence
  derived and/or modified sequence
atggtgagcaatttctttcatgtgatccaggtctttgagaaatctgctacactaatttccaaaacagagcatatcgggtttgttatttactcatggcggaagtctacaacccacctgggcagtcgaagaaaattcgccattagcatttacttgagtgaagtgtctcttcagaagtacgattgcccattcagtggcacctcttttgtagttttctcactgttcctgatctgtgcaatggcaggagacgtggtttacgctgacataaaaaccgtgcggactagtccacttgaactcgcttttcccctacaacgaagtgtcagttttaatttctctactgtccataaatcctgcccagcaaaggattggaaggtgcacaagggcaagtgctattggatcgccgaaacaaaaaagagctggaataaatcccagaacgattgcgcaattaataacagttatctgatggtgatccaggacatcacagctatggtacgctttaacatttag

SEQ ID NO: 247587 - DNA, 504 bp, Artificial Sequence
  derived and/or modified sequence
atggtgagcaacttcttccacgtgatccaggtgtttgagaagagcgccaccctcatcagcaagacagagcacatcggctttgtgatctacagctggaggaagagcaccacccacctgggcagcaggaggaagtttgccatcagcatctacctgtctgaggtgtccctgcagaagtatgactgccccttcagcggcaccagctttgtggtgttcagcctcttcctgatctgtgccatggctggagatgtggtgtatgctgacatcaagacagtgaggaccagccccctggagctggccttccccctgcagaggtctgtgtccttcaacttcagcacagtgcacaagagctgcccagccaaggactggaaggtgcacaagggcaagtgctactggattgctgagaccaagaagtcctggaacaagagccagaatgactgtgccatcaacaacagctacctgatggtgatccaggacatcacagccatggtgcgcttcaacatctag

SEQ ID NO: 247588 - DNA, 504 bp, Artificial Sequence
  derived and/or modified sequence
atggtgagcaacttcttccacgtgatccaggtgttcgagaagagcgcaacattgattagcaagacagaacacatagggttcgtgatttacagttggcgtaaaagcacaacacatcttgggagcaggagaaagtttgcgatttccatttatctctccgaagtgtcactccagaagtatgattgtcccttttccggcacatcattcgttgtgttttccttattcctcatttgcgccatggccggcgatgtcgtgtatgctgacatcaagaccgtacgcacttccccccttgagcttgcttttcctctacaacggtccgtctcttttaatttctctaccgtacacaaatcttgtccagccaaggattggaaggtgcacaagggaaagtgttattggattgctgagaccaaaaaatcctggaacaagtcacagaatgattgtgcaattaacaactcttacctcatggtgatccaggacattaccgcaatggtccgctttaatatctag

SEQ ID NO: 247589 - DNA, 504 bp, Artificial Sequence
  derived and/or modified sequence
atggtcagtaatttttttcacgtgatccaagttttcgaaaagtcagccactctgatctccaaaaccgagcatatcgggttcgtgatctacagctggcgaaagtcaactactcacctaggatcgagacgcaagtttgccatatctatctatctctcagaggtcagcctgcaaaaatatgattgtccgttctctggtaccagctttgtggtcttcagtttgttccttatctgtgcgatggcaggggatgttgtgtatgctgacataaaaactgttaggacctcccccctggagcttgcgttcccactgcagcgttccgtctctttcaacttcagtaccgtccacaaatcttgtccagccaaggactggaaagtgcataagggcaaatgctactggatagcggaaacgaaaaagtcctggaacaagagccagaatgattgtgcaattaataactcgtatctgatggttatacaggacatcaccgccatggtacgattcaacatttag

SEQ ID NO: 247590 - protein, 204 aa, Artificial Sequence
  derived and/or modified sequence
MEESVVRPSVFVVDGQTDIPFTRLGRSHRRQSCSVARDGPAGSWEQLIQERRSHEVNPAAHLTGANSSLTGSGGPLLWETQLGLAFLRGLSYHDGALVVTKAGYYYIYSKVQLGGVGCPLGLASTITHGLYKRTPRYPEELELLVSQQSPCGRATSSSRVWWDSSFLGGVVHLEAGEKVVVRVLDERLVRLRDGTRSYFGAFMV

SEQ ID NO: 247591 - DNA, 615 bp, Artificial Sequence
  derived and/or modified sequence
atggaggagagcgtggtgagacccagcgtgttcgtggtggacggccagaccgacatccccttcaccagactgggcagaagccacagaagacagagctgcagcgtggccagagacggccccgccggcagctgggagcagctgatccaggagagaagaagccacgaggtgaaccccgccgcccacctgaccggcgccaacagcagcctgaccggcagcggcggccccctgctgtgggagacccagctgggcctggccttcctgagaggcctgagctaccacgacggcgccctggtggtgaccaaggccggctactactacatctacagcaaggtgcagctgggcggcgtgggctgccccctgggcctggccagcaccatcacccacggcctgtacaagagaacccccagataccccgaggagctggagctgctggtgagccagcagagcccctgcggcagagccaccagcagcagcagagtgtggtgggacagcagcttcctgggcggcgtggtgcacctggaggccggcgagaaggtggtggtgagagtgctggacgagagactggtgagactgagagacggcaccagaagctacttcggcgccttcatggtgtag

SEQ ID NO: 247592 - DNA, 615 bp, Artificial Sequence
  derived and/or modified sequence
atggaagaaagtgtggtgcgccccagtgtttttgttgtggacggccagaccgatataccattcactaggctgggccggagtcaccggagacagagctgtagcgtcgcccgtgatggccctgcaggctcatgggaacagctgatccaggagcgtcggtctcacgaagttaatccggcggcccacttgaccggggctaattcatcactgactggtagtggcggtcccctgctgtgggaaacacagctcgggctcgcatttctccgggggttaagctaccacgacggtgccttggtagtgactaaggccggatactattacatctactctaaagtacagttggggggggttggatgtcctcttgggttagcttctactataacacatggactttacaaaaggacccctcgttaccctgaggagctggagctgctggtctcccaacagagcccttgcgggcgcgccacttcctcaagccgggtatggtgggatagtagcttcctcggcggtgtggtccacttggaagccggcgagaaggtggtcgtgcgggtcctggatgaacggctcgtgagacttcgggacggcacacgaagctactttggagctttcatggtgtag

SEQ ID NO: 247593 - DNA, 615 bp, Artificial Sequence
  derived and/or modified sequence
atggaggagagcgtggtgcggcccagcgtgtttgtggtggatggccagacagacatccccttcacccggctgggccgcagccaccggcggcagagctgcagcgtggccagagatggccctgctggctcctgggagcagctgatccaggagaggaggagccatgaggtgaacccagctgcccacctgactggagccaacagcagcctgaccggcagcggcggccccctgctgtgggagacccagctgggcctggccttcctgcggggcctgagctaccatgatggagccctggtggtgaccaaggccggctactactacatctacagcaaggtgcagctgggcggcgtgggctgccccctgggcctggccagcaccatcacccacggcctgtacaagaggaccccccgctacccagaggagctggagctgctggtgtcccagcagagcccctgtggccgggccaccagcagcagccgggtgtggtgggacagcagcttcctgggcggcgtggtgcacctggaggccggggagaaggtggtggtgcgggtgctggatgagcggctggtgcggctgagagatggcaccaggagctactttggagccttcatggtgtag

SEQ ID NO: 247594 - DNA, 615 bp, Artificial Sequence
  derived and/or modified sequence
atggaggagagcgtggtgcggcccagcgtgttcgtggtggacggccagacggatatcccatttacacgcctcggtcggtctcatcgccgacaatcatgtagcgtggctagggacgggccggccggttcttgggaacaactcatccaggaacgtagatctcacgaggttaatcccgctgctcatctcaccggcgcgaatagctccctgacaggctccggaggcccgttgctgtgggaaacccaactagggctggcctttctgagaggtctgtcttatcacgacggggcccttgttgtgacgaaggctgggtactattacatatatagtaaggtgcagctcggaggcgtagggtgccctctaggtttagcttcgactatcacacatgggctgtacaaacgcacgccccggtacccagaagagctggagctgctggtcagccaacagtctccatgtgggcgcgccacgagcagtagtagggtgtggtgggattcttccttcttaggcggggttgtccatcttgaggctggggagaaagttgtggtgcgcgttctcgacgaacgattggtgagactcagggatggcacacggagctactttggggcttttatggtatag

SEQ ID NO: 247595 - DNA, 615 bp, Artificial Sequence
  derived and/or modified sequence
atggaggagtctgtggtgcgcccatctgtattcgtagttgacggccaaacagacatcccttttacgagactcgggcgttctcacaggcggcagagttgttccgttgcaagggacggaccggcaggttcttgggagcagctgatccaggaaagaagatctcacgaggtgaatccggctgcacatctgaccggtgccaacagctccctgacagggagtggtggccctctactctgggaaacacagctcggtctggcttttctcagaggattgagctatcatgacggagccttagttgtgactaaggccggatattactatatttattccaaagtgcagcttggtggcgttggctgtcccctggggctggcaagtaccatcactcacggattgtataagcggacccctcgctaccccgaagagctagagcttcttgtctcccaacagtctccatgcggacgggctactagtagcagccgagtctggtgggactcgtcattcctaggaggcgttgtacatctggaagccggagagaaggtggtggttcgggtgctggatgagaggctcgtgagactccgcgatgggactcgttcgtactttggcgcattcatggtgtag

SEQ ID NO: 247596 - DNA, 2786 bp, Artificial Sequence
  derived and/or modified sequence
cgagactccatctcaaaaacaaaacaaataaacgaacaaaaaaacccacaacgtattattttcttgtttacgaggtttcttgtctctctggctccaccagaagaggagcagggacccttcttgctgttgttcattgctgcatcccccacaccgagagcagagcctggcatgggcagaaagtcctcagtcgatatttggtggccccaagcgaatgaagcatccaagaagggaaagctgggggctccccactgcacttgccacctgagtcacattttcagaagcctctggaaagtcgtgcacagcccaggagtgttgagcaatttcggtttcctctgaggttgaaggacccaggcgtgtcagccctgctccagacaccttgggcatggaggagagtgtcgtacggccctcagtgtttgtggtggatggacagaccgacatcccattcacgaggctgggacgaagccaccggagacagtcgtgcagtgtggcccgggacggacctgcaggctcctgggagcagctgatacaagagcgaaggtctcacgaggtcaacccagcagcgcatctcacaggggccaactccagcttgaccggcagcggggggccgctgttatgggagactcagctgggcctggccttcctgaggggcctcagctaccacgatggggcccttgtggtcaccaaagctggctactactacatctactccaaggtgcagctgggcggtgtgggctgcccgctgggcctggccagcaccatcacccacggcctctacaagcgcacaccccgctaccccgaggagctggagctgttggtcagccagcagtcaccctgcggacgggccaccagcagctcccgggtctggtgggacagcagcttcctgggtggtgtggtacacctggaggctggggagaaggtggtcgtccgtgtgctggatgaacgcctggttcgactgcgtgatggtacccggtcttacttcggggctttcatggtgtgaaggaaggagcgtggtgcattggacatgggtctgacacgtggagaactcagagggtgcctcaggggaaagaaaactcacgaagcagaggctgggcgtggtggctctcgcctgtaatcccagcactttgggaggccaaggcaggcggatcacctgaggtcaggagttcgagaccagcctggctaacatggcaaaaccccatctctactaaaaatacaaaaattagccggacgtggtggtgcctgcctgtaatccagctactcaggaggctgaggcaggataattttgcttaaacccgggaggcggaggttgcagtgagccgagatcacaccactgcactccaacctgggaaacgcagtgagactgtgcctcaaaaaaaagaaaggaagaaaaaagaaaactcaggaaacagatcttgggggacactccagggaacccaaaactcaaaggcggagagctcagtgggcaccaccaaggcgagatgaagccccagcaggcaccttcagaagacccacgtagactgcagaccctgccacggacaatactaaggacaaaaacccagagacttggggtctgtgggcccccaaacatggggtaaagttgatttgcctgatattcaggaagaaggggtgaggggtgggtatttatgcttttgattcagaagaaagtggggcttgggattccagggacttggctgggggtgggaaacttcatccacttccctactctcatcatgagtacggacagggtgggcgggagactgatcatcgggactcatcatgaagagcccagccccaccccacatactcagatcccacccacagactggtggccacacctcagcctggtcacaaagagttacactcagatacatgagcacggcagcgtgctcataactgtttaacaaccagctgtcctgggagggggacagctttgtaatgtttgccaatttccatggtgtaaatgctaccaccatggctgatttcatcactgccaagcatagacatccctaataggacaccacggatctgtccccggcatccggcccagggcctggcacaaagcatgctctagggaaatgcttgctgattgaaaggaaggaagaatgactctacagtcacacctatggcatcccacaaaatctgtcacatggctgcataatctcagccactctttcacaactatagactcatacacgcgaagtgccagattcatgcacaaccacacaatcacatggaagtcacagacggcatcacagacagtcacagcactgtgtgtatgttataacacaagcacacaaaactcagacagcatcccagctacacagccactcccagaggtgtcaccgtcacacttggtaattaatactcattacattagacacagacagaccaagttatagtcagacctggttacacacatacacacacacaatatcaccatgacaaatacacattacacacacacaacatcacaatgacaaacacacattacacacacaacatcacgatgacaaacacacattacacacacaacatcacgatgacaaacacacattacacacacatcacaatgacaaacacaacattacacacacacaacatcacaatgacacacacatcacacacacatcacaatgacaaacacacaacattacacacatatacacacagcctgagggccctccccagcccagactaacacatctcggggtgaggaccagaccttgttcataaccctgggcctcttaaccactgatctttgaaataaatggcaaatagttgtacctgga

SEQ ID NO: 247597 - protein, 488 aa, Artificial Sequence
  derived and/or modified sequence
MAETSLLEAGASAASTAAALENLQVEASCSVCLEYLKEPVIIECGHNFCKACITRWWEDLERDFPCPVCRKTSRYRSLRPNRQLGSMVEIAKQLQAVKRKIRDESLCPQHHEALSLFCYEDQEAVCLICAISHTHRAHTVVPLDDATQEYKEKLQKCLEPLEQKLQEITRCKSSEEKKPGELKRLVESRRQQILREFEELHRRLDEEQQVLLSRLEEEEQDILQRLRENAAHLGDKRRDLAHLAAEVEGKCLQSGFEMLKDVKSTLEKCEKVKTMEVTSVSIELEKNFSNFPRQYFALRKILKQLIADVTLDPETAHPNLVLSEDRKSVKFVETRLRDLPDTPRRFTFYPCVLATEGFTSGRHYWEVEVGDKTHWAVGVCRDSVSRKGELTPLPETGYWRVRLWNGDKYAATTTPFTPLHIKVKPKRVGIFLDYEAGTLSFYNVTDRSHIYTFTDTFTEKLWPLFYPGIRAGRKNAAPLTIRPPTDWE

SEQ ID NO: 247598 - protein, 227 aa, Artificial Sequence
  derived and/or modified sequence
  misc_feature (1)..(1): Xaa can be any naturally occurring amino acid
XTSRYRSLRPNRQLGSMVEIAKQLQAVKRKIRDESLCPQHHEALSLFCYEDQEAVCLICAISHTHRAHTVVPLDDATQEYKEKLQKCLEPLEQKLQEITRCKSSEEKKPGELKRLVESRRQQILREFEELHRRLDEEQQVLLSRLEEEEQDILQRLRENAAHLGDKRRDLAHLAAEVEGKCLQSGFEMLKDVKSTLEKCEKVKTMEVTSTTPCTSLHSEINDNVRGR

SEQ ID NO: 247599 - protein, 261 aa, Artificial Sequence
  derived and/or modified sequence
MAETSLLEAGASAASTAAALENLQVEASCSVCLEYLKEPVIIECGHNFCKACITRWWEDLERDFPCPVCRKTSRYRSLRPNRQLGSMVEIAKQLQAVKRKIRDESLCPQHHEALSLFCYEDQEAVCLICAISHTHRAHTVVPLDDATQEYKEKLQKCLEPLEQKLQEITRCKSSEEKKPGELKRLVESRRQQILREFEELHRRLDEEQQVLLSRLEEEEQDILQRLRENAAHLGDKRRDLAHLAAEVEGKCLQSGFEMLKV

SEQ ID NO: 247600 - protein, 411 aa, Artificial Sequence
  derived and/or modified sequence
MAETSLLEAGASAASTAAALENLQVEASCSVCLEYLKEPVIIECGHNFCKACITRWWEDLERDFPCPVCRKTSRYRSLRPNRQLGSMVEIAKQLQAVKRKIRDESLCPQHHEALSLFCYEDQEAVCLICAISHTHRAHTVVPLDDATQEYKEKLQKCLEPLEQKLQEITRCKSSEEKKPGELKRLVESRRQQILREFEELHRRLDEEQQVLLSRLEEEEQDILQRLRENAAHLGDKRRDLAHLAAEVEGKCLQSGFEMLKPVLSAREECEKVKTMEVTSVSIELEKNFSNFPRQYFALRKILKQLIADVTLDPETAHPNLVLSEDRKSVKFVETRLRDLPDTPRRFTFYPCVLATEGFTSGRHYWEVEVGDKTHWAVGVCRDSVSRKGGCGYGMGTNMQPPPHLLPLCTSR

SEQ ID NO: 247601 - protein, 488 aa, Artificial Sequence
  derived and/or modified sequence
MAETSLLEAGASAASTAAALENLQVEASCSVCLEYLKEPVIIECGHNFCKACITRWWEDLERDFPCPVCRKTSRYRSLRPNRQLGSMVEIAKQLQAVKRKIRDESLCPQHHEALSLFCYEDQEAVCLICAISHTHRAHTVVPLDDATQEYKEKLQKCLEPLEQKLQEITRCKSSEEKKPGELKRLVESRRQQILREFEELHRRLDEEQQVLLSRLEEEEQDILQRLRENAAHLGDKRRDLAHLAAEVEGKCLQSGFEMLKPVLSAREECEKVKTMEVTSVSIELEKNFSNFPRQYFALRKILKQLIADVTLDPETAHPNLVLSEDRKSVKFVETRLRDLPDTPRRFTFYPCVLATEGFTSGRHYWEVEVGDKTHWAVGVCRDSVSRKGELTPLPETGYWRVRLWNGDKYAATTTPFTPLHIKVKPKRVGIFLDYEAGTLSFYNVTDRSHIYTFTDTFTEKLWPLFYPGIRAGRKNAAPLTIRPPTDWE

SEQ ID NO: 247602 - DNA, 1467 bp, Artificial Sequence
  derived and/or modified sequence
atggccgagaccagcctgctggaggccggcgccagcgccgccagcaccgccgccgccctggagaacctgcaggtggaggccagctgcagcgtgtgcctggagtacctgaaggagcccgtgatcatcgagtgcggccacaacttctgcaaggcctgcatcaccagatggtgggaggacctggagagagacttcccctgccccgtgtgcagaaagaccagcagatacagaagcctgagacccaacagacagctgggcagcatggtggagatcgccaagcagctgcaggccgtgaagagaaagatcagagacgagagcctgtgcccccagcaccacgaggccctgagcctgttctgctacgaggaccaggaggccgtgtgcctgatctgcgccatcagccacacccacagagcccacaccgtggtgcccctggacgacgccacccaggagtacaaggagaagctgcagaagtgcctggagcccctggagcagaagctgcaggagatcaccagatgcaagagcagcgaggagaagaagcccggcgagctgaagagactggtggagagcagaagacagcagatcctgagagagttcgaggagctgcacagaagactggacgaggagcagcaggtgctgctgagcagactggaggaggaggagcaggacatcctgcagagactgagagagaacgccgcccacctgggcgacaagagaagagacctggcccacctggccgccgaggtggagggcaagtgcctgcagagcggcttcgagatgctgaaggacgtgaagagcaccctggagaagtgcgagaaggtgaagaccatggaggtgaccagcgtgagcatcgagctggagaagaacttcagcaacttccccagacagtacttcgccctgagaaagatcctgaagcagctgatcgccgacgtgaccctggaccccgagaccgcccaccccaacctggtgctgagcgaggacagaaagagcgtgaagttcgtggagaccagactgagagacctgcccgacacccccagaagattcaccttctacccctgcgtgctggccaccgagggcttcaccagcggcagacactactgggaggtggaggtgggcgacaagacccactgggccgtgggcgtgtgcagagacagcgtgagcagaaagggcgagctgacccccctgcccgagaccggctactggagagtgagactgtggaacggcgacaagtacgccgccaccaccacccccttcacccccctgcacatcaaggtgaagcccaagagagtgggcatcttcctggactacgaggccggcaccctgagcttctacaacgtgaccgacagaagccacatctacaccttcaccgacaccttcaccgagaagctgtggcccctgttctaccccggcatcagagccggcagaaagaacgccgcccccctgaccatcagaccccccaccgactgggagtag

SEQ ID NO: 247603 - DNA, 435 bp, Artificial Sequence
  derived and/or modified sequence
atggccgagaccagcctgctggaggccggcgccagcgccgccagcaccgccgccgccctggagaacctgcaggtggaggccagctgcagcgtgtgcctggagtacctgaaggagcccgtgatcatcgagtgcggccacaacttctgcaaggcctgcatcaccagatggtgggaggacctggagagagacttcccctgccccgtgtgcagaaagaccagcagatacagaagcctgagacccaacagacagctgggcagcatggtggagatcgccaagcagctgcaggccgtgaagagaaagatcagagacgagagcctgtgcccccagcaccacgaggccctgagcctgttctgctacgaggaccaggaggccgtgtgcctgatctgcgccatcagccacacccacagagcccacaccgtggtgcccctggactag

SEQ ID NO: 247604 - DNA, 684 bp, Artificial Sequence
  derived and/or modified sequence
tgaaccagcagatacagaagcctgagacccaacagacagctgggcagcatggtggagatcgccaagcagctgcaggccgtgaagagaaagatcagagacgagagcctgtgcccccagcaccacgaggccctgagcctgttctgctacgaggaccaggaggccgtgtgcctgatctgcgccatcagccacacccacagagcccacaccgtggtgcccctggacgacgccacccaggagtacaaggagaagctgcagaagtgcctggagcccctggagcagaagctgcaggagatcaccagatgcaagagcagcgaggagaagaagcccggcgagctgaagagactggtggagagcagaagacagcagatcctgagagagttcgaggagctgcacagaagactggacgaggagcagcaggtgctgctgagcagactggaggaggaggagcaggacatcctgcagagactgagagagaacgccgcccacctgggcgacaagagaagagacctggcccacctggccgccgaggtggagggcaagtgcctgcagagcggcttcgagatgctgaaggacgtgaagagcaccctggagaagtgcgagaaggtgaagaccatggaggtgaccagcaccaccccctgcaccagcctgcacagcgagatcaacgacaacgtgagaggcagatag

SEQ ID NO: 247605 - DNA, 225 bp, Artificial Sequence
  derived and/or modified sequence
atggccgagaccagcctgctggaggccggcgccagcgccgccagcaccgccgccgccctggagaacctgcaggtggaggccagctgcagcgtgtgcctggagtacctgaaggagcccgtgatcatcgagtgcggccacaacttctgcaaggcctgcatcaccagatggtgggaggacctggagagagacttcccctgccccgtgtgcagaaagaccagcagatag

SEQ ID NO: 247606 - DNA, 147 bp, Artificial Sequence
  derived and/or modified sequence
atggccgagaccagcctgctggaggccggcgccagcgccgccagcaccgccgccgccctggagaacctgcaggtggaggccagctgcagcgtgtgcctggagtacctgaaggagcccgtgatcatcgagtgcggccacaacttctag

SEQ ID NO: 247607 - DNA, 180 bp, Artificial Sequence
  derived and/or modified sequence
atggccgagaccagcctgctggaggccggcgccagcgccgccagcaccgccgccgccctggagaacctgcaggtggaggccagctgcagcgtgtgcctggagtacctgaaggagcccgtgatcatcgagtgcggccacaacttctgcaaggcctgcatcaccagatggtgggaggactag

SEQ ID NO: 247608 - DNA, 786 bp, Artificial Sequence
  derived and/or modified sequence
atggccgagaccagcctgctggaggccggcgccagcgccgccagcaccgccgccgccctggagaacctgcaggtggaggccagctgcagcgtgtgcctggagtacctgaaggagcccgtgatcatcgagtgcggccacaacttctgcaaggcctgcatcaccagatggtgggaggacctggagagagacttcccctgccccgtgtgcagaaagaccagcagatacagaagcctgagacccaacagacagctgggcagcatggtggagatcgccaagcagctgcaggccgtgaagagaaagatcagagacgagagcctgtgcccccagcaccacgaggccctgagcctgttctgctacgaggaccaggaggccgtgtgcctgatctgcgccatcagccacacccacagagcccacaccgtggtgcccctggacgacgccacccaggagtacaaggagaagctgcagaagtgcctggagcccctggagcagaagctgcaggagatcaccagatgcaagagcagcgaggagaagaagcccggcgagctgaagagactggtggagagcagaagacagcagatcctgagagagttcgaggagctgcacagaagactggacgaggagcagcaggtgctgctgagcagactggaggaggaggagcaggacatcctgcagagactgagagagaacgccgcccacctgggcgacaagagaagagacctggcccacctggccgccgaggtggagggcaagtgcctgcagagcggcttcgagatgctgaaggtgtag

SEQ ID NO: 247609 - DNA, 1236 bp, Artificial Sequence
  derived and/or modified sequence
atggccgagaccagcctgctggaggccggcgccagcgccgccagcaccgccgccgccctggagaacctgcaggtggaggccagctgcagcgtgtgcctggagtacctgaaggagcccgtgatcatcgagtgcggccacaacttctgcaaggcctgcatcaccagatggtgggaggacctggagagagacttcccctgccccgtgtgcagaaagaccagcagatacagaagcctgagacccaacagacagctgggcagcatggtggagatcgccaagcagctgcaggccgtgaagagaaagatcagagacgagagcctgtgcccccagcaccacgaggccctgagcctgttctgctacgaggaccaggaggccgtgtgcctgatctgcgccatcagccacacccacagagcccacaccgtggtgcccctggacgacgccacccaggagtacaaggagaagctgcagaagtgcctggagcccctggagcagaagctgcaggagatcaccagatgcaagagcagcgaggagaagaagcccggcgagctgaagagactggtggagagcagaagacagcagatcctgagagagttcgaggagctgcacagaagactggacgaggagcagcaggtgctgctgagcagactggaggaggaggagcaggacatcctgcagagactgagagagaacgccgcccacctgggcgacaagagaagagacctggcccacctggccgccgaggtggagggcaagtgcctgcagagcggcttcgagatgctgaagcccgtgctgagcgccagagaggagtgcgagaaggtgaagaccatggaggtgaccagcgtgagcatcgagctggagaagaacttcagcaacttccccagacagtacttcgccctgagaaagatcctgaagcagctgatcgccgacgtgaccctggaccccgagaccgcccaccccaacctggtgctgagcgaggacagaaagagcgtgaagttcgtggagaccagactgagagacctgcccgacacccccagaagattcaccttctacccctgcgtgctggccaccgagggcttcaccagcggcagacactactgggaggtggaggtgggcgacaagacccactgggccgtgggcgtgtgcagagacagcgtgagcagaaagggcggctgcggctacggcatgggcaccaacatgcagccccccccccacctgctgcccctgtgcaccagcagatag

SEQ ID NO: 247610 - DNA, 1467 bp, Artificial Sequence
  derived and/or modified sequence
atggccgagaccagcctgctggaggccggcgccagcgccgccagcaccgccgccgccctggagaacctgcaggtggaggccagctgcagcgtgtgcctggagtacctgaaggagcccgtgatcatcgagtgcggccacaacttctgcaaggcctgcatcaccagatggtgggaggacctggagagagacttcccctgccccgtgtgcagaaagaccagcagatacagaagcctgagacccaacagacagctgggcagcatggtggagatcgccaagcagctgcaggccgtgaagagaaagatcagagacgagagcctgtgcccccagcaccacgaggccctgagcctgttctgctacgaggaccaggaggccgtgtgcctgatctgcgccatcagccacacccacagagcccacaccgtggtgcccctggacgacgccacccaggagtacaaggagaagctgcagaagtgcctggagcccctggagcagaagctgcaggagatcaccagatgcaagagcagcgaggagaagaagcccggcgagctgaagagactggtggagagcagaagacagcagatcctgagagagttcgaggagctgcacagaagactggacgaggagcagcaggtgctgctgagcagactggaggaggaggagcaggacatcctgcagagactgagagagaacgccgcccacctgggcgacaagagaagagacctggcccacctggccgccgaggtggagggcaagtgcctgcagagcggcttcgagatgctgaagcccgtgctgagcgccagagaggagtgcgagaaggtgaagaccatggaggtgaccagcgtgagcatcgagctggagaagaacttcagcaacttccccagacagtacttcgccctgagaaagatcctgaagcagctgatcgccgacgtgaccctggaccccgagaccgcccaccccaacctggtgctgagcgaggacagaaagagcgtgaagttcgtggagaccagactgagagacctgcccgacacccccagaagattcaccttctacccctgcgtgctggccaccgagggcttcaccagcggcagacactactgggaggtggaggtgggcgacaagacccactgggccgtgggcgtgtgcagagacagcgtgagcagaaagggcgagctgacccccctgcccgagaccggctactggagagtgagactgtggaacggcgacaagtacgccgccaccaccacccccttcacccccctgcacatcaaggtgaagcccaagagagtgggcatcttcctggactacgaggccggcaccctgagcttctacaacgtgaccgacagaagccacatctacaccttcaccgacaccttcaccgagaagctgtggcccctgttctaccccggcatcagagccggcagaaagaacgccgcccccctgaccatcagaccccccaccgactgggagtag

SEQ ID NO: 247611 - DNA, 1467 bp, Artificial Sequence
  derived and/or modified sequence
atggcagagacatccctgctggaggctggggctagtgccgcctctactgccgccgctctcgaaaatctgcaagtggaggcttcctgctctgtgtgtctggaatacttgaaggagccggtcatcattgaatgtggccataacttctgcaaagcttgcatcactagatggtgggaagatctcgaaagagattttccctgccctgtctgtcggaaaacctctcgctatcgctcactgcgtccaaatcggcagcttggctcgatggtcgaaattgccaaacaactgcaggctgtcaagcgcaagattagggatgagagcttgtgtccccagcaccacgaggcgctgagtcttttttgttatgaggatcaggaggctgtttgcctgatctgtgcaatatcccacacgcaccgcgcccatactgttgtccccctcgacgacgccacacaggaatataaagaaaagctccagaagtgcctagagcctctcgaacagaagctccaggagatcacacgttgcaagagctcagaggagaaaaagcccggcgaactgaaaaggctggtggaaagtcggcggcagcagattctgagggagtttgaggaacttcatcggaggctggatgaggaacaacaggtattacttagtcgtctcgaagaggaagagcaagacatactacaaaggctgagggagaatgctgctcaccttggtgataagcggcgcgatctcgctcacctcgccgccgaggtggaaggaaagtgccttcagagcggctttgaaatgctgaaggacgtcaaatctacgctcgagaagtgtgagaaggtgaaaactatggaagttacgtccgtcagcatcgaactagagaaaaacttttccaacttccctcgacaatactttgcactccgcaaaattctgaagcagctgatcgcagacgtcaccctggatcccgaaactgcacacccaaacctcgtgctttccgaggacagaaagagcgtcaaattcgtggaaactcgcctcagagaccttcctgatacgccccggagatttactttttacccatgcgtgctcgcgacggagggtttcactagcggaaggcactattgggaggtagaggtgggcgacaagactcactgggcggttggggtatgtcgcgactccgtctctcggaaaggtgagctgactcctttgccagagacaggctattggcgcgtcagattgtggaatggcgacaaatacgctgcaactacaacgccgtttacacctctgcatattaaggtgaagcctaaacgcgtgggcatcttcctcgattacgaagctggcaccttgtctttttacaatgtcaccgatcgtagtcatatttataccttcacagatacctttaccgaaaaactttggccattattttaccccggcatccgtgcgggtcggaaaaacgccgctcccctcaccatcaggccgccaaccgattgggagtag

SEQ ID NO: 247612 - DNA, 1467 bp, Artificial Sequence
  derived and/or modified sequence
atggccgaaacctccctcctcgaagcaggcgcatcagcagcttctaccgctgccgcattggagaaccttcaggtagaggcaagctgttccgtttgtttggagtatctgaaggagcccgtgatcatcgagtgtggccacaacttctgtaaggcgtgcattactcgctggtgggaagaccttgaaagagattttccctgcccggtgtgtcgtaagacatctagatataggagtctgaggccaaacagacagttgggcagcatggtggagatagcgaagcagctccaggccgtcaaaagaaaaataagagacgaaagcctatgtccccagcaccatgaagccttgtcgctgttttgttatgaagatcaggaagctgtttgtctcatctgtgccatttctcacacacacagggcccacactgtggtacctctggatgacgctacacaagagtataaggaaaagttacaaaaatgtctggaacctttagagcagaaactgcaggaaattactcgatgcaagtcaagcgaagagaagaagcccggtgaactgaaacggctcgtagagtcaagaaggcagcaaattctccgtgagttcgaggagctccaccgccggctagatgaggagcagcaggtgttgttgagccggctggaggaagaggaacaagacatacttcagaggctacgggaaaatgcagctcaccttggggacaaacgcagagatctggcccacctcgctgccgaggtagagggaaaatgcttacagtccgggttcgaaatgttgaaagatgtgaaaagcaccctggagaaatgcgaaaaggtgaaaacaatggaggtcacctccgtgagtatcgagttggagaaaaatttctcgaacttccctcgccaatactttgcgttgagaaagatcctaaaacagttaatcgccgatgtgacactggacccagagaccgctcatccaaatctggtcctgagcgaagaccgcaagtccgtgaaatttgtggagactaggctccgcgacttgccggataccccacgaaggttcaccttctatccttgtgtgctggccactgagggttttacttctgggcgccactattgggaagttgaggtcggagataaaacccattgggcggttggggtttgccgagatagtgtctcgcggaaaggagagctcacccccctgccagagaccggctactggcgcgttcgcttatggaacggcgacaaatacgcagcaaccacaaccccattcacgccgcttcatattaaagtgaaacctaaacgcgttggcatctttctcgactacgaggccggtacattgtccttttacaacgtcaccgataggagtcacatatacacatttaccgacacattcactgaaaagctgtggcctctcttttacccaggaatccgggcgggtcgcaaaaacgccgctcccttgacgatccgtccccctacggactgggagtag

SEQ ID NO: 247613 - DNA, 1467 bp, Artificial Sequence
  derived and/or modified sequence
atggccgagaccagcttgctcgaagctggagcatcggccgcctcaacagcggctgccttggagaacctacaggtcgaggcctcctgttccgtctgcctggagtacctcaaggagccagtgataatagaatgtggacataacttctgcaaagcatgcattacccgctggtgggaggacctagaaagggatttcccctgtccagtctgccggaagaccagtcgctaccgcagtctacgtcctaatcggcagttgggttctatggtggaaatcgctaaacagttacaggctgtgaagcggaaaataagggacgagtctttgtgtcctcaacatcacgaggcactctccctgttttgttacgaagatcaggaagccgtgtgtctaatttgcgctatcagccacacacatagagctcacaccgtggtgcctttggacgatgctacccaggagtataaagaaaaactgcagaaatgccttgaaccactggaacagaagctgcaagagattacacgttgtaaatcatccgaggagaagaaacctggcgagctcaaaagactggtggaaagtaggcggcagcaaatcctgcgcgaattcgaggagctccaccggcgtctggacgaagagcaacaagtgttactgtctcgcttggaggaggaggagcaggatattctgcagcgtcttcgcgagaacgcagcgcacctgggtgacaagagacgcgacctagctcatttggccgcagaagtcgagggaaaatgcctccaatcaggcttcgaaatgttaaaggatgtcaagagtacgctggaaaagtgtgagaaggtgaaaacgatggaagtgacttccgtcagtatcgagctggaaaagaacttcagcaatttcccccgtcagtactttgctctgcgcaagatccttaaacagcttatcgcagacgtcacgctggaccctgaaacagcgcatccgaacctggtcttatctgaagaccgcaagagcgtgaagttcgttgagactcgcttgagggacttgcccgacaccccgcgccggtttacgttctatccttgtgttctggccactgaaggatttacttctgggagacactactgggaagtggaagttggagacaaaacccactgggccgtcggcgtctgtagagactccgtctccagaaagggagagctgacccccctaccagaaaccggatattggagagtgcgcctctggaatggcgataaatatgccgctaccaccacaccttttactccgctgcacattaaagtaaaaccaaagcgtgtggggatcttcttggattacgaggcaggcacgctctctttctacaatgtcacggatcgttctcatatctatacttttacagacaccttcacagagaagctatggccacttttctaccctggaatccgggctggccgtaagaacgctgcccctctcaccatcagacctcccaccgactgggaatag

SEQ ID NO: 247614 - DNA, 1467 bp, Artificial Sequence
  derived and/or modified sequence
atggctgaaacttcattacttgaagctggggcttcggcagcctctactgccgccgcattggagaacttacaggttgaagcatcctgcagcgtttgtctggagtatcttaaggagcccgtgattatcgaatgcggacataacttttgcaaggcatgtatcactagatggtgggaggacctcgagcgcgattttccatgcccagtgtgccggaaaacatctagatacaggtccctgcgcccaaaccgccaattaggatcaatggtagagatagcaaaacaactgcaggccgtgaagaggaagatccgggatgaatctctgtgcccgcaacaccatgaagcactcagccttttttgttacgaggatcaggaagctgtctgcctcatctgcgccatatcccacacacaccgcgcacatacagtcgtgcctctggatgacgcaacccaggaatataaagaaaaactccagaagtgcctggaacctctggagcaaaaactacaggaaattaccaggtgcaaatcatccgaagagaagaagccgggcgaactgaagcgactcgtggaatcccggaggcaacagatcttgagggaattcgaggaacttcacaggagattagatgaagagcagcaggtcctgctgagtcgactggaggaggaagaacaggatatactacaacgactgagagagaacgcagcccacctgggagacaagagaagggacttagctcacttggcagcagaggtcgaagggaagtgcctccagtccggctttgaaatgctgaaggacgtgaagtctaccctcgagaagtgtgaaaaagttaaaacaatggaggtgacatccgtgtccatcgagctggaaaaaaatttctcgaacttcccacgacagtattttgctttaaggaagatccttaagcaactgatcgccgatgtaactctggatcctgaaacggcacaccctaacctggtcctgagcgaagaccgtaagagcgtgaaatttgtagaaaccaggctgcgcgacctaccagacacccccaggcggtttaccttctacccttgcgttctcgccacagaaggcttcacctccggtagacactattgggaggtggaagtgggcgacaagacccattgggccgtgggggtctgccgtgatagtgtatccaggaagggcgaacttaccccgttgccagaaacaggctattggagagtccggttatggaatggagataagtatgctgcaacaaccacacctttcactcctctgcacatcaaagttaaaccaaagagggtgggtatatttttagattacgaggctggaacactgagtttctacaacgtaacagacagatcgcatatttacactttcactgataccttcaccgaaaaactctggcctctgttctacccaggcattcgtgccggacgcaagaacgctgctccccttactataagaccgcctaccgactgggaatag

SEQ ID NO: 247615 - DNA, 1467 bp, Artificial Sequence
  derived and/or modified sequence
atggccgagacctccttgttggaagcaggagcgtccgcagcaagtaccgctgcggctttggagaacttgcaagtggaggccagctgttctgtgtgcttagaatatttaaaggaaccagtgattattgagtgtgggcataacttctgcaaggcttgcatcactcggtggtgggaagatctggaacgcgattttccctgtcccgtctgccggaagacgtcacgctaccgttcactgcggccgaataggcagctgggttcaatggtggaaatcgcaaaacagctgcaggctgtcaaacgaaagatacgggatgaaagcctgtgtccacagcaccatgaggcgctgagtttattctgctacgaagaccaggaagcggtgtgcctcatttgcgccatttcacacacacaccgcgctcacacagtggtcccgcttgatgatgcgacccaggagtataaggaaaagctccaaaaatgcctggagccacttgagcagaagctccaggaaattactcgctgcaagtcgagtgaagaaaaaaagcctggagaattgaagagattggtcgaatctcgacgacagcagatactccgcgaatttgaggaacttcacaggagactggacgaggagcagcaggtactgctgagtcgtttggaggaggaagagcaagacattctccaacggctgcgtgagaatgccgcccacttgggcgacaagagacgggaccttgctcacctggcagccgaggtcgagggtaagtgcttgcaaagtggctttgagatgctgaaagacgtgaaaagcaccctcgaaaagtgcgagaaggtaaagaccatggaagtcacatccgtgagcattgagctcgaaaagaacttttctaattttccacgccagtacttcgcccttagaaaaatactcaagcagttgattgcagacgttactcttgatccggagacagctcaccccaacttggtgctgagcgaagataggaaatccgtgaaattcgttgagaccagactgcgagacctcccagataccccaagaaggttcactttctatccttgtgtattggccactgagggatttacgtcggggcggcactattgggaagtcgaggtgggcgacaaaacacattgggcggtgggcgtttgtcgcgatagcgtgtcgcgcaagggggaactcaccccattgcccgaaaccggctactggcgggtccgactgtggaacggcgacaagtacgccgctacgactacacccttcacaccgctgcatataaaggtgaaaccaaaaagggtcggcattttcctggactatgaggctgggacgctcagtttttataacgtgacagaccggagccatatatacacattcacggatacttttactgagaagctttggccgttgttttatcccgggattagggcaggtcgaaaaaacgcagccccactgacaatcaggccacccacagactgggaatag

SEQ ID NO: 247616 - DNA, 1467 bp, Artificial Sequence
  derived and/or modified sequence
atggccgagacctctcttctcgaggctggggcatctgcggccagcacagcagcagctctggaaaacctacaggttgaggcttcctgcagtgtatgtctggagtacctgaaagaacccgtaatcatcgaatgcggtcacaacttctgtaaggcgtgcataaccagatggtgggaagacctcgagcgggattttccctgtcctgtctgcaggaagactagtagatataggtcgcttaggccaaacagacaacttggttccatggtagagatagccaagcagcttcaggccgtgaagcgaaaaattagagatgaaagcctttgcccacagcatcacgaggctctctcccttttctgctacgaagaccaagaagctgtgtgcctcatttgcgctatctcccacactcaccgagcacacaccgtggttccgctggatgacgccacccaagaatataaggaaaagttacaaaagtgcctagaaccactcgaacagaagctgcaggaaatcacaagatgcaaatccagcgaggaaaagaaacctggggaactaaagcggttggtagagtcccgcagacagcagattctcagagaatttgaggagttacacaggagactggacgaggagcagcaagtactgctatctcggctggaggaggaggagcaagacatactgcaacgtctaagggaaaatgcagcccacctgggggacaaacgccgggatctcgcccatctggccgcagaagtcgaaggaaagtgcctccagtccggatttgaaatgctgaaagatgtaaagtctactctggagaagtgcgagaaagttaaaactatggaagtgactagtgtgtctatcgagttggaaaagaacttcagcaattttccaaggcaatacttcgccttacggaaaatactgaaacagctcatagcggatgtgactctagacccagagaccgcccaccctaatttggtgttaagtgaagatcggaaatcagtaaagttcgtggagacccgcctgcgggaccttccagatacgccccggagatttacgttttatccttgcgtattggctacagaaggattcacatcagggaggcattactgggaggtcgaagtcggcgacaagactcactgggcggtcggcgtgtgccgtgatagcgtcagcaggaaaggggaattgactcccctgccagagaccggatattggcgggtgaggctgtggaacggcgataagtacgccgccaccaccaccccctttacaccacttcacattaaagtgaagcccaaaagagtggggatcttcctagattatgaggctggaacactttctttctataacgtgactgataggagccacatctataccttcaccgatacattcacagagaagttatggccactcttttatcctggaatccgagctggtcgcaaaaatgctgccccattgacaattcggccacctactgattgggaatag

SEQ ID NO: 247617 - DNA, 435 bp, Artificial Sequence
  derived and/or modified sequence
atggcagagaccagtctgctagaagcaggcgcgtccgccgcctccaccgctgccgccctcgagaacctacaggtggaggccagctgtagcgtatgcctcgaatacctgaaagaaccagtaataatcgagtgtgggcataatttctgcaaggcgtgtataactaggtggtgggaggaccttgagagggatttcccttgtccagtctgccgaaaaacaagccgatatcgcagtctccgtccaaataggcagctcgggagcatggtcgagatcgcaaaacagcttcaggcagtcaaacgtaaaatccgtgacgagagtctatgtccgcagcaccacgaggccttgtctctgttctgctatgaagatcaggaggctgtgtgtctcatttgtgcaatctcccacacgcaccgagctcacaccgtggtgccgctggattag

SEQ ID NO: 247618 - DNA, 684 bp, Artificial Sequence
  derived and/or modified sequence
taaacatcccggtacagatccctcagacctaaccgccagcttggaagcatggtggaaatcgccaagcaactgcaagcagtaaagagaaagataagagacgagagtctctgcccacaacaccacgaggccctaagtctgttctgctacgaggatcaggaggctgtgtgtttaatctgcgccatctctcacacccaccgcgcgcacaccgttgtccccttggatgacgccacccaagagtacaaggaaaagctgcaaaagtgtctggagccgctggagcaaaagctccaggagatcacgaggtgtaaaagttccgaggaaaaaaaacctggtgaacttaagcggctggtggagtcgcggcgtcagcagatcttgcgggagtttgaggagctgcatcgcagactggacgaggagcagcaagtcttactcagtcgtcttgaggaagaagagcaggatatactgcagaggctgcgggaaaacgcagcacatctgggcgataagcggagagatttagcgcacctggccgcagaggtggaaggtaaatgcctgcagtccggtttcgagatgttgaaagacgttaaatccacacttgaaaagtgtgaaaaagtcaagactatggaagtcaccagtactactccttgcaccagccttcactctgagattaacgataacgtgaggggccgctag

SEQ ID NO: 247619 - DNA, 225 bp, Artificial Sequence
  derived and/or modified sequence
atggctgagacgtccctgctagaagccggcgcctccgcagccagcaccgctgccgctcttgaaaatctgcaggtcgaggccagttgctcagtttgtctggaataccttaaggaacccgtgattattgaatgcggccacaacttctgtaaggcctgtatcactcgatggtgggaggatctggagagagattttccctgccccgtttgcaggaagacgtcaagatag

SEQ ID NO: 247620 - DNA, 1467 bp, Artificial Sequence
  derived and/or modified sequence
atggctgaaacctctctcttggaagccggtgcttcagctgcaagcacagcagcggcccttgaaaatttacaggtggaggctagctgtagcgtgtgcctggaatatcttaaagaacctgttatcatcgagtgcggacacaatttctgtaaagcttgcattacccggtggtgggaagatttagaaagagacttcccctgcccagtgtgtaggaaaactagtagatatagatccctccgccccaatcggcagttggggtccatggttgaaatcgctaagcagctgcaagcagtgaaaagaaagatccgggatgagagcctgtgcccgcagcatcacgaggcactttcattattctgctacgaagaccaagaagccgtgtgtctgatttgcgccatttcccatactcacagggcccacacagtcgtgccattggatgatgctacccaggagtacaaggagaagctgcaaaaatgtctggaacctttggagcagaaactgcaggaaataacgcgctgtaaatctagtgaggagaagaaaccaggcgagctgaagcgcctcgtcgaaagtaggaggcagcaaatcctccgggagtttgaggagctgcacaggcggctggacgaagagcagcaggttctgctgtcccggctggaggaagaggaacaggacatcctccaacgtctaagggagaatgcagctcatctgggagataaaagacgcgatcttgctcatcttgccgctgaagtcgagggaaaatgtctgcaatcaggtttcgagatgctgaaagacgtcaagagtactcttgagaaatgtgagaaagtgaagacaatggaggtgacttccgtgtccatcgagttggagaaaaacttcagcaacttcccacgtcaatattttgccctgcgaaagattttgaaacagttaatcgcggacgttacactggaccctgagacggcgcatcccaatctggtgctgagcgaggatcgcaaaagcgtgaaattcgtggaaacacgattgagagacctgcctgataccccccgccggttcaccttctacccctgtgtacttgccaccgaaggcttcacaagcggtagacactactgggaggttgaggtgggggacaagacacattgggctgtgggagtttgcagagacagcgtgtctcgtaagggtgagctgacgccactgccggaaactggatactggcgggtgcgactgtggaacggtgataagtatgccgctactactacaccttttacacctctacacatcaaggttaaacccaaaagagtagggattttcctcgattacgaagcagggacactctcattttataacgttacagatcgcagccacatatacaccttcactgacaccttcacagaaaagctgtggcctctgttttatccaggtattagggcgggtcggaaaaacgcagcccctctcacaatccgcccgcctacagattgggagtag

SEQ ID NO: 247621 - DNA, 435 bp, Artificial Sequence
  derived and/or modified sequence
atggcggaaacatctctgttagaggcaggtgcatcagccgctagtacagcggcagccctcgaaaacctccaggtcgaagctagctgctcagtgtgtctggagtatctgaaggaacccgtcataatcgagtgtggccacaacttttgcaaggcctgtattacaagatggtgggaagatctcgaacgtgatttcccttgcccagtctgtcgtaagacgagccgctacaggagcctgcggccgaacaggcagctaggtagcatggtggagatagccaagcaattacaggcagttaagaggaaaatccgggatgagtcgctgtgtccccagcaccatgaggccctgtcactcttttgttacgaggatcaggaagcggtatgtctgatctgtgccatctctcatacacacagggcacacaccgtggttcctctggactag

SEQ ID NO: 247622 - DNA, 225 bp, Artificial Sequence
  derived and/or modified sequence
atggctgagacaagtctcctggaggctggggcctccgccgcgtctacggccgcggccctcgaaaacctgcaggtcgaagccagctgctccgtgtgcctggaatacctgaaggagcctgtgatcatcgagtgtggacataacttttgtaaagcctgcatcactcgctggtgggaggatctggagagggactttccctgcccagtgtgccgcaaaacgagtcgctag

SEQ ID NO: 247623 - DNA, 147 bp, Artificial Sequence
  derived and/or modified sequence
atggcagagacttccctactggaggccggcgcttccgctgcatccacagctgccgcactggagaacctgcaggtggaggctagttgcagcgtctgcctggaatatctgaaggagccggtcattatcgagtgtgggcataacttttag

SEQ ID NO: 247624 - DNA, 1467 bp, Artificial Sequence
  derived and/or modified sequence
atggcagagaccagcctgctcgaggccggggcgtctgccgcctctaccgccgccgcgctggagaacctgcaagtcgaagcttcatgcagcgtgtgcctcgaatacttaaaagaaccggtgattatcgagtgtgggcacaatttctgcaaagcttgcattactcgttggtgggaggatttagagagggactttccgtgtcccgtgtgccggaagacttctcgttatagaagcttgcggcccaatagacagctcggaagcatggttgaaatcgccaagcagctacaggcagtgaagcgaaagatccgggatgaaagtctgtgcccccagcaccatgaggctctgagtctgttctgttatgaagatcaggaggccgtgtgtctcatatgtgctatcagtcatacacaccgcgcccacactgttgtgcctctggacgatgcgacgcaggaatataaagagaaactgcagaagtgtttggaacccctggagcagaaacttcaggagataactagatgtaaatctagtgaagaaaagaagccgggtgagttgaaaagactcgttgaatctcgcagacagcaaatcttgcgcgagttcgaggaactccatcgccggttggatgaagagcagcaggtgctcctttcccgcttggaagaggaggagcaagacattctacagcgtctgagagagaacgcagcacacctgggggataagcggagagacctcgcacacctggccgcggaggtcgaaggcaagtgcctgcagtccggatttgagatgttgaaagacgtgaaatctacgctggagaaatgtgaaaaggtgaagactatggaggtgaccagcgtgagcatcgagctggagaagaatttctccaatttcccacgtcagtactttgcgctgagaaaaattctgaagcagttaatcgcggatgtgacactggatccagagactgctcatccaaacttggtactctcagaagaccgcaaatcagttaaattcgtggagactaggttgagggatctgcccgacactcctcgtagatttacattctatccctgtgtgttggctacagaggggttcacctctggtcggcattattgggaagttgaagttggagataagacccactgggccgttggggtctgccgcgactccgtttctaggaaaggggaactgacccctcttcccgagactggttattggcgcgttagactctggaacggagataagtacgctgccaccaccaccccttttacccccctccatatcaaagtgaagccaaaacgcgtgggaatcttcctggattacgaggcaggaacattatctttttataatgtcaccgacaggtctcatatctacacattcactgacacgtttacggagaagctttggccccttttctatcccgggatccgtgccgggaggaagaatgcagcgccgctgacaatccgtccacccacagactgggaatag

SEQ ID NO: 247625 - DNA, 684 bp, Artificial Sequence
  derived and/or modified sequence
tgaacctccagatataggtccttgcggccaaatcgccaactgggtagtatggtggaaattgctaaacagctacaagcggtgaagcggaaaattcgggatgagagcctgtgtccccagcatcatgaagcactgtcactgttttgttacgaggatcaggaggcagtctgtctcatctgcgccatctcccatacacatcgggcccacaccgtggtgccactggatgatgcaacacaagagtataaagaaaaactccagaagtgtctcgaacctctggaacagaaactccaggaaatcactcgttgcaagtcaagtgaagagaagaagcccggagagctgaagcggctcgtagagagcaggcgtcagcagattctgcgggaattcgaggagctgcatcgcagactggacgaggaacagcaggtactactgtcccggttagaggaagaagaacaggacatcctgcaaagactgagagagaacgctgcccacctaggggataagagaagagatctggcccacctggccgcagaggtggagggaaaatgcctacagtcggggttcgagatgctgaaggacgtgaaaagtacactggaaaagtgcgagaaggttaagacaatggaggtgacatcaacgacaccctgcacaagcctgcactccgagattaacgacaacgtgcggggccgctag

SEQ ID NO: 247626 - DNA, 147 bp, Artificial Sequence
  derived and/or modified sequence
atggccgagacatctttgctcgaagccggagcctcagccgcgagcaccgcagctgcgctagagaacctgcaagtggaggcctcatgtagcgtgtgtctggagtacctgaaagaaccagtgatcattgagtgtgggcacaacttctag

SEQ ID NO: 247627 - DNA, 147 bp, Artificial Sequence
  derived and/or modified sequence
atggcggagaccagtttgcttgaagccggcgcaagtgctgcctccaccgctgccgccctcgagaatcttcaagtagaggcaagctgcagcgtctgtctcgagtacctcaaagagcctgtgattatagaatgcggccacaatttttag

SEQ ID NO: 247628 - DNA, 180 bp, Artificial Sequence
  derived and/or modified sequence
atggctgagacctcactcctggaggcaggggccagcgctgctagcacggccgcagccctggagaatttgcaagtggaagcctcgtgctcggtgtgtttggagtacctcaaagagcctgtcatcattgagtgcggccacaatttttgcaaggcatgtatcacaagatggtgggaagattag

SEQ ID NO: 247629 - DNA, 180 bp, Artificial Sequence
  derived and/or modified sequence
atggccgagacatctctcctggaagccggtgctagtgctgcgtccacagcagccgctttggagaacctccaggtagaggctagttgcagcgtctgcctcgagtacctgaaggagcccgtgattatcgaatgcggacacaacttctgtaaagcctgtattacacgctggtgggaagactag

SEQ ID NO: 247630 - DNA, 435 bp, Artificial Sequence
  derived and/or modified sequence
atggcagaaactagtcttctcgaggctggcgcatccgctgcttctaccgcggcagcactggagaacctccaggttgaagcctcttgttctgtctgcctggagtatctcaaggagcctgtcatcatcgagtgtggtcataacttttgtaaggcttgcataactaggtggtgggaggacctggagcgggattttccctgtccagtgtgtaggaagacctcccggtaccgaagcttacgacccaacaggcagttggggtcaatggtcgaaattgcaaagcagcttcaggccgtcaagcggaagatcagagacgagtctttgtgccctcaacatcatgaagctctgtctctgttctgctacgaagatcaggaggcagtgtgtctaatctgcgccatctcgcacacccatcgggcccatacagtcgttccccttgactag

SEQ ID NO: 247631 - DNA, 684 bp, Artificial Sequence
  derived and/or modified sequence
tgaacatctcgctatcgttccctccgccccaaccggcaattgggcagcatggtcgaaatcgccaagcagctgcaggccgtcaagaggaaaatcagagatgagtctctctgcccacaacaccacgaagcactatcactgttttgctacgaagatcaagaagcagtgtgtctaatatgcgctatctctcacacccacagagcgcatacagtggtacctcttgatgatgcaacccaggagtataaagaaaaactgcagaagtgtcttgagccgcttgagcaaaaactccaagaaattaccaggtgcaaaagtagcgaagagaagaaacctggagaactcaagaggcttgtggagtcaagacggcaacagatcctaagggagttcgaggagctgcacagaaggctggacgaggagcaacaagtgcttctttctcggcttgaagaagaagaacaagacatcctccaacgcttgagggagaatgctgctcacctgggagataagcggagagatctcgcccatcttgccgccgaggtagaagggaaatgccttcaatcaggctttgaaatgctgaaggacgtgaagagcacacttgagaagtgtgaaaaagtcaagaccatggaagtgacgtctacgaccccctgtacctctttgcatagtgagataaacgataatgtgcgtggacgctag

SEQ ID NO: 247632 - DNA, 684 bp, Artificial Sequence
  derived and/or modified sequence
taaacaagccgttaccggtccctgcggcctaaccggcagttaggttcgatggtcgagattgcgaagcagctgcaggcagtaaaaagaaagataagggatgagagcctgtgccctcagcaccacgaggccctgtccctgttctgttatgaagatcaggaggcagtgtgtctaatctgcgccatcagccatacccaccgagctcatacggtggtgccccttgacgacgccactcaggaatataaagaaaagctgcagaaatgtctcgaaccactcgagcaaaagctgcaagagattactagatgcaagtcttcggaggaaaagaaacccggcgagctgaagcgcctggtagaaagcaggcgtcagcagattttgcgggaatttgaagagctgcatcggagattagatgaagagcaacaggttctgctctctaggctggaggaggaggagcaggacatccttcagcgtctgagagaaaacgcggcacatctgggcgataaaagaagggaccttgcccacctggccgccgaggttgaggggaagtgtctgcagtctggtttcgagatgctgaaggatgtcaaaagcactctggaaaagtgtgagaaggtcaaaactatggaagtcaccagcacaacaccttgcactagcctgcactccgaaataaatgataacgttaggggccgctag

SEQ ID NO: 247633 - DNA, 147 bp, Artificial Sequence
  derived and/or modified sequence
atggccgaaacctctctgctagaggccggcgccagtgcagcaagcacagcggccgccctagagaatctgcaggtggaggcatcatgctcggtctgcttggagtatctcaaagagcccgttatcatcgagtgtggacacaacttctag

SEQ ID NO: 247634 - DNA, 225 bp, Artificial Sequence
  derived and/or modified sequence
atggccgaaacttccttactggaggctggggcatcagccgccagtacggccgccgccctggagaatctgcaagtggaggcaagttgtagcgtttgtctcgagtatttgaaggagcctgtgattatcgagtgcggccataatttttgtaaggcttgcatcactaggtggtgggaggatcttgagcgcgatttcccgtgtccggtttgcagaaagacgagtagatag

SEQ ID NO: 247635 - DNA, 180 bp, Artificial Sequence
  derived and/or modified sequence
atggcagagacctctctcctggaggccggagcgtccgctgcttctaccgcggcagccctagagaatttgcaggtggaagcctcatgcagcgtgtgtcttgagtatttaaaagagcctgtgattatcgagtgcgggcataatttctgcaaggcctgcattaccagatggtgggaagattag

SEQ ID NO: 247636 - DNA, 147 bp, Artificial Sequence
  derived and/or modified sequence
atggcggaaacatccctgctggaggccggcgctagtgctgcttccactgccgctgcgttggagaacttgcaggtcgaggcctcctgtagtgtgtgtttagaataccttaaggagccagttattatcgagtgtgggcacaatttctag

SEQ ID NO: 247637 - DNA, 786 bp, Artificial Sequence
  derived and/or modified sequence
atggcagaaaccagcttactcgaggctggagccagcgccgcctcgaccgctgcagccctggaaaatctgcaggtcgaggcctcctgttcggtttgcctggaataccttaaggaaccggtaataatcgagtgcggccataacttttgcaaggcctgcattacacgctggtgggaggacctagagcgagactttccatgcccagtctgccgcaaaacatctcggtatcgatccctgcgcccaaaccgccagctaggctctatggttgagatcgctaagcagctgcaggctgtaaagagaaagattcgggacgagtctttgtgccctcagcaccatgaagccctgagcctgttttgctatgaggatcaggaggctgtgtgtctcatctgcgcaattagccatactcacagagctcacactgtcgtgcccctggatgacgccacacaggagtataaagagaagcttcagaagtgcctcgagccgctggaacaaaagctgcaggagataactagatgcaaatcttctgaggaaaaaaaaccaggagaactgaaaaggctggtagagtctcggcgacagcagatcttacgcgagttcgaagaactacaccgccggttagatgaggagcagcaggtgctcctgagtcggctggaggaagaggaacaagacatcctccagcgcctgcgggaaaacgccgcccatcttggagacaaaagacgcgatctcgcccatcttgccgcagaagtggaaggaaagtgcctccagagcggatttgaaatgctgaaggtctag

SEQ ID NO: 247638 - DNA, 180 bp, Artificial Sequence
  derived and/or modified sequence
atggccgagactagcctgctcgaggccggggctagcgcagccagcactgcagcagccctggagaatctccaggtcgaggccagctgctccgtatgtctcgagtacctcaaggaacctgttatcattgagtgtggccacaatttttgcaaagcttgcataacacggtggtgggaagattag

SEQ ID NO: 247639 - DNA, 435 bp, Artificial Sequence
  derived and/or modified sequence
atggccgagacctctctgcttgaagctggagcatctgccgccagcaccgctgccgctctggagaacctgcaggtggaagcctcatgttcagtgtgcctggaatacctgaaggagcccgtcattattgagtgcggtcataacttctgtaaggcctgcatcacccgctggtgggaagatcttgagcgcgactttccttgcccagtgtgcagaaaaacttctcgctatcgttccttaagacccaatcgacagcttggctcaatggtcgaaatagcgaagcagctccaggctgtcaagagaaagatacgagacgagtccctgtgcccacagcaccacgaggctctaagcctgttctgttacgaggatcaagaggctgtctgtctgatctgtgcaattagccacactcaccgggctcacacagtggtgcctctggattag

SEQ ID NO: 247640 - DNA, 1467 bp, Artificial Sequence
  derived and/or modified sequence
atggccgaaactagcctgctcgaggccggagcctcagccgcctctacggcagcagccctcgaaaatttgcaggtcgaagcgtcctgctcagtctgtctggagtacctcaaggagcccgtcatcattgaatgtgggcataatttttgtaaggcatgtataacaaggtggtgggaggaccttgagagagacttcccttgccccgtctgtagaaaaactagccgttatagatccctgcggccaaacaggcaattaggctccatggtggagatcgccaagcagttgcaagctgttaagcggaaaatacgggatgagagcctctgtccgcagcaccacgaggccctaagcctgttttgttacgaggatcaggaggccgtctgtctgatctgcgccatttcccacacccaccgcgctcacaccgtggtacccctagatgacgccactcaggagtataaagaaaagttgcagaaatgtctagagcccttggaacagaagctccaggagattacaagatgtaaaagctccgaggagaagaaacccggcgagctcaaacgattggtggaatctagacggcagcagattctgagagaatttgaagagctccacaggcgacttgacgaagagcagcaggtgctgctgtctaggctggaggaagaagagcaagacatcctccagcgccttagagagaatgctgcccacctcggggataagcgccgggatcttgcccatctggcagccgaggtggaaggtaaatgcctgcagtcaggattcgaaatgctaaaggacgtcaagagtacactcgagaagtgcgaaaaggttaagaccatggaagtgactagcgtgagcatagagcttgagaagaattttagtaactttccaaggcagtattttgcgctgagaaagattcttaagcagttaattgccgacgtgacattggatcctgaaaccgcccatccaaacctggtgctctcagaggatcgcaagagcgtgaagtttgtagaaactcgcctccgcgatctgcccgacacccctagacgttttaccttttacccatgcgttcttgcaaccgaaggcttcacctcaggaagacactattgggaggtagaagtgggcgataaaacacactgggctgtgggggtgtgtagagatagtgtttcccggaaaggcgaactgacgccactgcctgagaccggatactggcgagtgagattgtggaatggggacaagtacgccgctactacgactccatttacacctctccatatcaaagtcaagcctaagagagttggtatttttctggactacgaagcgggcacactgtccttctacaacgtgaccgaccgcagccatatatacactttcaccgatactttcaccgagaagctgtggcctttgttttatccaggaatcagagccggccggaagaacgccgcacccctgactatccgaccacctaccgactgggagtag

SEQ ID NO: 247641 - DNA, 1467 bp, Artificial Sequence
  derived and/or modified sequence
atggccgagaccagtttgctggaggcgggggctagtgcggcatcaacggccgctgcgcttgagaacttacaggttgaagcatcatgcagtgtttgtttggagtatcttaaggaaccagtgatcatcgagtgtggtcacaacttctgcaaggcctgcattacccgctggtgggaggacctcgaaagagactttccttgtccagtgtgccggaaaacatcgcggtacagatctctgcggcccaatagacagctcgggagcatggtggaaatcgctaagcagttgcaggcggtgaaaaggaagattagagatgagagcctttgtccacagcatcatgaagctctgtcactcttctgctatgaggaccaggaggctgtttgcctcatctgcgcaataagtcacacccaccgtgcgcatacagtggtgccactagatgatgctactcaggaatataaggagaaattgcaaaaatgcctggaaccccttgaacagaaactgcaagaaattacccgttgtaagtccagcgaagagaaaaagccaggagaattgaaaagacttgttgaaagccgccggcagcagatcctaagggaattcgaagagctgcatagacgtctagacgaggagcagcaagtcctcctgtccaggcttgaggaggaagagcaagacattcttcaacggctcagggaaaatgctgcacatctgggagataagcgccgagacctggcccatctcgctgccgaagtggagggcaaatgcttacaatctggtttcgagatgcttaaagatgtgaaaagcaccctcgaaaagtgcgagaaagtgaagacaatggaagtcacctcggtgagtatagagctagagaagaacttttctaacttccccagacagtacttcgcccttcgtaagatactgaaacaactcatcgccgacgttacgttggacccagaaaccgcccatccgaatttggtgctcagtgaagacagaaaatctgtcaaatttgtggagaccaggctgcgagacctacccgacactcctcgtagattcactttctatccttgcgtactcgccaccgaaggcttcacaagtgggagacactattgggaagtggaagttggcgataagacccactgggcagttggcgtgtgtagagacagcgtgagccgcaaaggagagctgactccacttcctgagacgggctactggagggtccgtttgtggaatggtgataaatatgcagctaccacgacaccattcacaccccttcacatcaaggtgaagcctaaacgagtaggcatattcttagattacgaggctggcaccctctcattttataatgtaaccgatcgatctcatatctacacctttaccgatacttttaccgaaaaactgtggccgctgttctaccccggtattagggccgggcggaagaacgctgctccactcactatcaggcctcctaccgactgggagtag

SEQ ID NO: 247642 - DNA, 786 bp, Artificial Sequence
  derived and/or modified sequence
atggcggagacctcacttctagaggccggcgccagtgcggcatctactgcggcagccctcgagaatttacaggtcgaagcttcatgctcagtgtgcctggagtacctcaaggagccagtgataattgagtgtgggcacaatttttgcaaggcctgcattactcggtggtgggaggatctcgaaagggatttcccttgtcccgtatgcaggaaaacatctcgctaccggtcactgaggcctaaccgccagcttgggtcgatggtagaaattgcgaagcagctgcaagccgtcaagcgaaagatcagagacgaatctctgtgtcctcagcaccacgaggctttatcgctattctgctatgaggatcaggaagcagtgtgtctcatatgcgcaatcagtcacacacatcgcgctcacactgttgtgcctctggatgatgccacgcaagagtacaaggagaaacttcaaaagtgcctcgagcctctagagcagaagctccaagagataaccaggtgcaaatcaagcgaggaaaaaaaacccggcgagctaaagagattggtcgagagtagaaggcaacaaattcttcgcgaatttgaggagttacacagaagattggatgaagaacagcaggttctccttagtcggctggaggaggaggagcaggatattctgcaaagactgagagagaacgccgcccatctgggtgacaagaggcgcgacttagcacaccttgccgctgaggtggaaggaaagtgcctacaatctggctttgagatgctgaaagtgtag

SEQ ID NO: 247643 - DNA, 1467 bp, Artificial Sequence
  derived and/or modified sequence
atggccgaaacaagcctactggaagctggagcatcagccgcctctaccgcagccgccctggaaaacctgcaggtcgaggcctcatgcagcgtgtgtctggagtacctgaaggaaccggtaataatcgaatgtggccacaatttctgtaaggcttgcattacccggtggtgggaagatctcgagagggatttcccctgcccggtgtgcagaaagacaagcaggtaccggtcccttagaccaaacagacagttgggctcaatggtcgaaatcgccaagcagcttcaagccgtgaaaagaaaaatccgcgatgagagcttgtgtcctcagcaccacgaggccctgagtctattttgctacgaagaccaggaagctgtatgcctgatatgtgccatttcccacacccatcgggctcacacagtagttcccctggacgacgcgactcaagaatataaggagaagctacagaagtgcctggagcctcttgaacagaaactgcaggaaatcacaagatgcaaaagctcagaggaaaaaaagccgggcgaacttaagcggttggttgagagcaggcgacagcagattctgagggaatttgaagagctccataggcggctggatgaggaacagcaagtgctgctctctaggctcgaggaggaagaacaggacattctgcagagactccgcgagaacgctgctcatcttggagacaaacgcagagacctggctcacctggctgcggaagtagaaggcaaatgcttgcaaagcggcttcgaaatgctaaaggacgtgaaatcaacactggagaagtgcgagaaggtgaaaacaatggaggtaacgagcgtctccatagaactagaaaaaaattttagtaactttccacgccagtactttgccttgagaaagatcctgaagcaactgatagccgatgtaactttggaccctgaaaccgcccatcctaacctggtcctaagcgaggatcgcaagtcagtgaagtttgttgagactaggcttcgcgacctgcctgacacgccacggagattcacattttacccttgtgttctggctacagagggattcacatcaggaaggcattactgggaggtcgaagtaggtgataagacacattgggccgtgggcgtttgccgtgattcagtgagccgtaagggggagttgactcctctcccagagacgggatattggcgggtgcgtctctggaacggggacaaatacgcagccacaaccaccccctttaccccccttcacataaaggtgaaacctaagagagtggggatcttcttggattatgaagcgggcactctctccttttacaacgtcaccgataggtcccacatatacacattcaccgacacttttaccgagaagctgtggcccttgttctatcccggtatcagggctgggcggaagaatgctgcccccctgacaatccgcccaccaactgattgggaatag

SEQ ID NO: 247644 - DNA, 180 bp, Artificial Sequence
  derived and/or modified sequence
atggctgagacatccctattggaagctggcgcatctgccgccagtacggccgccgcgctcgaaaatctgcaggtggaggcttcttgtagtgtttgtctcgagtacctcaaggaacccgtgatcattgaatgtggccataacttttgtaaagcttgcatcacgaggtggtgggaggactag

SEQ ID NO: 247645 - DNA, 180 bp, Artificial Sequence
  derived and/or modified sequence
atggctgagacatctctgctcgaggcaggtgcttcagctgcaagtaccgccgctgcactggagaatctgcaagtcgaggcttcatgttctgtgtgccttgagtacctaaaggagccggttatcatagagtgcggacacaacttctgcaaggcttgcatcacgcgctggtgggaggattag

SEQ ID NO: 247646 - DNA, 684 bp, Artificial Sequence
  derived and/or modified sequence
taaacttctcgctatagatctcttaggccaaacagacagctggggtctatggtcgaaattgccaagcagcttcaagcggtcaagcgtaagatcagagatgagagtctctgccctcaacatcatgaggctctttctcttttttgttatgaagaccaggaggccgtatgtctgatttgtgctattagtcacacacatcgcgcgcatacagtggtgccactcgatgacgcgacccaggaatataaggaaaagctccagaaatgtttggagccactggaacagaaactgcaggaaattacccgctgtaagagttccgaagaaaagaaacccggagaactgaaaagattagtggagtctagacgacagcagattctgagggaattcgaggagttgcaccggcggctagatgaggagcaacaggttctgttgtctagattggaggaagaggagcaggatattcttcagcggttgcgcgaaaatgcagcgcatctcggcgacaagcgcagggatctcgctcacctagcagcagaggtagaaggaaaatgtttgcaaagtggattcgaaatgttgaaagacgtgaaaagcacactcgagaaatgtgaaaaagtgaagaccatggaggttacgagcaccacaccatgcacaagcttgcactccgagataaacgacaacgtccggggcagatag

SEQ ID NO: 247647 - DNA, 1467 bp, Artificial Sequence
  derived and/or modified sequence
atggcggaaaccagcttactcgaggcgggagcttcggcggccagcaccgccgccgcattagagaatctgcaagttgaggcctcatgcagcgtctgcctggagtatttgaaagagcctgtgattattgagtgtgggcataatttctgcaaagcatgcattaccaggtggtgggaggacctggaaagagatttcccttgccctgtctgtaggaagacaagtaggtatcggtctctcaggccgaatagacaacttgggtccatggtggagattgcaaagcagctgcaagctgtgaaacggaagataagggatgaatcattgtgccctcagcatcatgaagccctgtcccttttctgctatgaggaccaggaagcagtatgcctgatctgcgccataagccacacccaccgggcccacacagtcgtgccgctggacgatgccacccaagagtacaaagagaagctccagaagtgcctggaacctctggagcagaagctccaggaaattacccgttgcaagtcgtcagaagaaaagaagcccggcgagttgaagaggttggtggagtctcgtcgtcagcagatcctacgagagtttgaagaactgcacagacgcctggacgaggaacagcaggtgcttttgagcaggctggaggaagaggagcaggacatccttcagcgcttgcgcgagaatgcagcgcacctgggcgacaagcggagggacctggcacacctggccgcagaggtcgagggtaagtgtttgcagagcgggtttgaaatgctgaaagatgtgaagtctacactggagaaatgcgaaaaagtgaagacaatggaagttacctccgtgagtatagaactcgaaaagaatttctcaaactttcctcgccagtacttcgccctcagaaagatcctgaagcagttaatcgccgacgtcacattagaccctgagacagcccaccccaatctggttttgagcgaagaccgtaagtccgtaaagttcgtcgagacgaggctccgagatctgcctgatactcccagaaggtttacattctatccctgcgtgctggcaaccgaggggtttacatctgggcgccactactgggaagtagaagtgggagacaagacacactgggcagttggcgtctgcagggactcagtgtcccgcaaaggggaactaacaccactccccgaaacaggatattggcgcgtgcgactctggaatggcgataagtatgccgccacgacaactcccttcacaccgctacatatcaaggtgaagccaaagcgggtggggatctttctggactatgaggcgggaactctcagtttctacaacgtcacagacagatcccatatttatacttttacagatacttttaccgaaaaactgtggccactgttctatccgggcattcgagccggccggaaaaacgctgccccgttaaccatccgccccccgaccgactgggagtag

SEQ ID NO: 247648 - DNA, 225 bp, Artificial Sequence
  derived and/or modified sequence
atggcggaaacctcactgctggaggccggcgcctccgctgctagcactgcggccgccctcgagaacctccaggtagaggcttcttgcagcgtgtgcctggagtacctcaaagaacctgtgattatcgagtgtgggcacaacttctgtaaagcatgcatcactcgctggtgggaggacttggagcgagactttccttgcccagtttgtcgcaaaacaagccggtag

SEQ ID NO: 247649 - DNA, 684 bp, Artificial Sequence
  derived and/or modified sequence
taaacatctaggtaccgaagcctgagacctaatagacaattaggaagcatggtggaaattgctaagcagctgcaggccgtcaagagaaagatcagagatgagtctctctgtccacagcatcacgaagcgctcagcctcttttgctacgaagatcaggaagctgtgtgtctcatctgcgcaataagccacacacatagagcgcacaccgtggtgccccttgatgacgccacccaggagtacaaagagaagttgcagaagtgcctcgagccactagaacagaagctccaggagatcaccaggtgcaagagctcggaagaaaaaaagcccggcgaactgaagagactggttgagtcccggcgacagcagattctgcgggagttcgaagaacttcaccggcgcctggacgaagagcagcaagtcttgctgagccggttggaggaggaggagcaggatattctccagagactgagggagaatgcagcccatctgggcgacaagcgacgcgacctggcccatctagcagccgaagtggaaggaaaatgtctccagagtgggttcgaaatgcttaaggatgtcaagagcactctagaaaaatgtgaaaaagtcaagacaatggaagtcacctcaactactccgtgtacgtccttacattccgagattaatgataacgttcggggtcgctag

SEQ ID NO: 247650 - DNA, 1467 bp, Artificial Sequence
  derived and/or modified sequence
atggcggagaccagtctgctagaagccggcgcctcagcagcctcaacagctgccgccctagaaaatctccaggtggaagcgtcttgctctgtgtgtcttgagtatttgaaggagcccgtgatcattgagtgcggacataacttttgtaaagcctgtatcacaagatggtgggaagaccttgagcgggatttcccttgcccagtatgtcggaagaccagccgttatagatcactgagaccaaatcgccagctagggagcatggtggagatagctaaacaactccaggcagtgaagagaaagatccgtgatgaatcgctttgtccgcagcatcacgaagctctatcgctgttttgttacgaggatcaggaggctgtatgtcttatctgtgctatcagccacacacatcgagcacatacggttgtgccattggacgatgccactcaggagtataaggagaaactccagaagtgtttggagcctctagagcagaaactgcaagaaattactagatgtaagtccagtgaagaaaagaagccaggagagctaaagagacttgtggagagccgcaggcagcaaatcttgcgcgagtttgaggagctgcataggcgcctggacgaggagcagcaagtgttgttgtccaggctggaagaggaggagcaagatattctgcagaggctccgcgagaatgcagcccaccttggagacaagcgacgggacctagcacacctcgccgccgaagtcgaggggaaatgcctgcagtctgggtttgagatgcttaaggacgtaaagtctactctggaaaagtgcgagaaggtgaagactatggaggtgacatcagtctcgattgaattggagaaaaacttcagtaactttcctcgccagtattttgctctgcggaaaatcttgaagcaacttatcgcagatgtgactttagatcctgagacagctcatcccaacctcgtgctttctgaggaccgtaaatccgtgaaatttgtggagaccagattgcgggatctccccgacaccccacggagattcactttctatccctgcgtgctggccactgagggctttacatcaggcaggcactactgggaagtcgaagtgggtgacaagacgcattgggctgttggcgtgtgcagagattccgtctcccgaaagggggagctcacaccgctgcctgaaaccggctactggagggtgagactatggaacggcgataagtatgctgccactactactccttttactccactgcacataaaagtgaaacctaaacgagtgggcatttttctggattacgaagccggcaccctcagtttttacaacgtgactgacaggtctcatatttacaccttcactgacacattcaccgaaaagctgtggcccttattttacccgggcattcgcgcagggagaaaaaatgccgctcccctgactattaggccaccaaccgattgggagtag

SEQ ID NO: 247651 - DNA, 1467 bp, Artificial Sequence
  derived and/or modified sequence
atggccgagacgtctctcctggaggccggcgctagtgctgccagtacagctgccgccctggagaaccttcaggttgaggccagctgcagtgtgtgcctggagtacctgaaggaacccgtcatcattgaatgtgggcacaacttctgtaaagcgtgcatcacaaggtggtgggaggatttggagagagattttccttgccccgtgtgtagaaaaacttcccgttacagatctcttcgccctaaccggcagttaggttccatggtcgaaatcgctaaacagctgcaggcagtaaagcggaagattcgtgacgagtcactatgcccgcagcaccacgaagcactttctcttttttgctacgaagatcaagaggccgtttgcctgatctgcgctatatcccatacgcaccgagctcatacagtggtgcctctagatgatgcaactcaggagtacaaagaaaaactccagaaatgcctcgagcctcttgagcaaaaattgcaggagatcacgcggtgcaagtccagtgaggagaaaaaacctggcgagttgaaacgcctggttgaatccagacgccagcagattctcagagagtttgaggagttacatcgcaggctagacgaggaacagcaagtgttactaagcagattagaggaggaggagcaggacatcctgcagcgattacgtgagaacgccgctcacctgggcgataaacggagggatctggcccacctcgcagccgaggtggagggcaaatgcctgcaaagcggatttgaaatgctcaaagacgtcaagtccacactggagaaatgtgagaaggttaagaccatggaggttacgtcagtgagtatcgagcttgaaaaaaattttagcaatttcccgaggcagtatttcgctctcagaaagatcctcaaacagctcattgccgatgtgactctggatcccgagaccgcccaccccaacctcgttctgagcgaggaccggaagagtgtgaagtttgtggagacaagattgagagatctgcccgatactcctcgaaggtttacattctatccctgcgtgctggctaccgaaggctttacaagcggacgccattattgggaagtcgaggtgggggataaaacccactgggcagtgggggtatgccgcgattccgtgagtagaaaaggcgagttaactcccctgcctgagaccggctattggcgtgtccgtctctggaatggagataaatatgcagcaactactactccattcaccccattgcacatcaaggtgaaacccaagagggtcgggatcttcctggattacgaagctggcaccctgtccttctacaacgtgacggatcggagccacatatatactttcaccgatacatttacagaaaagttgtggcctctgttctatcctggaatcagggccggccgcaagaatgctgcacctctgactattcgaccacccaccgattgggaatag

SEQ ID NO: 247652 - DNA, 786 bp, Artificial Sequence
  derived and/or modified sequence
atggctgaaacaagccttctggaggccggagcctccgctgctagcactgccgcagctttagagaacctgcaggtcgaagcctcttgctctgtatgcttggagtatctcaaggagccagttattatcgagtgcgggcacaatttctgcaaggcctgcataactcggtggtgggaagatctggagagggactttccgtgccccgtgtgccgcaagacgtctagatacaggagtctccgccccaacaggcaactgggcagtatggtggaaatcgctaaacagcttcaagccgtcaaaagaaagattcgggatgagagcctctgtccccaacaccacgaggctcttagcctgttctgctacgaagatcaggaggccgtgtgcctcatatgcgcgatttctcacactcatcgggcccacactgttgtgcctctggacgatgctacccaagagtacaaggagaaactgcaaaagtgtctagagcctctggaacagaaactgcaggagattacgcgatgcaagtctagcgaggaaaaaaaaccaggcgagctgaagagactcgttgagtcgagaaggcagcagattcttagagagttcgaggagctccaccgaaggctggatgaagaacagcaggtgctgttgagtcggttggaggaggaggaacaggatatcttacagcgtctgagagaaaatgctgctcacttaggagataaaagaagagacctggcccatctggcagctgaggttgagggaaagtgtttgcagagcgggttcgagatgttgaaggtatag

SEQ ID NO: 247653 - DNA, 225 bp, Artificial Sequence
  derived and/or modified sequence
atggccgaaacatccctcctggaagccggggcctcagctgcatctacggccgctgcattggaaaatctgcaggtcgaggcctcttgtagcgtttgtctagagtacctgaaggaacccgtgattatagagtgcggacataacttctgtaaagcctgcataactcggtggtgggaggatctggaaagggactttccctgcccagtgtgccgaaagacgagccgttag

SEQ ID NO: 247654 - DNA, 180 bp, Artificial Sequence
  derived and/or modified sequence
atggccgaaacttcattgctcgaagccggcgcttcagcagccagcacggcggcagcactggaaaatctgcaggtggaagcgtcgtgttctgtgtgcctggagtacctcaaagaacctgtcatcattgagtgcggccacaatttctgtaaagcctgtatcaccaggtggtgggaggattag

SEQ ID NO: 247655 - DNA, 786 bp, Artificial Sequence
  derived and/or modified sequence
atggctgaaactagcctgctcgaagccggtgcatctgcagcctcaactgcagccgcattagagaacctccaggtagaagccagctgttccgtgtgcctggaatatctcaaggagccggtcatcattgagtgcggccacaatttttgcaaggcttgcattacgagatggtgggaagatcttgagagagacttcccctgtcccgtgtgtaggaagactagcagatacaggtctttgagaccaaacaggcagttagggagtatggtggagatagctaaacagttacaggctgtgaaacgaaaaatccgggacgagtccctttgccctcaacatcacgaagcgctgtccctgttctgctacgaagatcaggaagcagtgtgcctgatctgcgccatatcgcatacacatcgagcccacacggtagtaccactggatgatgccacccaggagtataaggaaaagcttcaaaagtgtctggagccccttgagcagaagctccaagagatcactcgctgtaaatcatctgaagagaaaaaacccggtgaactaaaaagacttgtggagtccagaaggcagcaaatcctacgggaattcgaggaattgcacaggcgactggatgaggagcaacaggtcttattgtctcgactagaggaagaagagcaggatatcttgcagagactcagggaaaatgcggcccaccttggagataaacgccgcgacctggcccacctggccgcagaggttgagggaaagtgtctccagagtggctttgagatgctgaaagtgtag

SEQ ID NO: 247656 - DNA, 1467 bp, Artificial Sequence
  derived and/or modified sequence
atggctgaaacaagtttgctggaggcaggagcctcagctgcctcaacagccgctgctctcgagaacctgcaggtcgaggcatcatgctcagtatgtttagaatatctcaaggagcctgtgattattgaatgcggtcacaatttctgcaaggcgtgtattactagatggtgggaggacctggagagagactttccctgcccagtctgcagaaagacttcacgatatcgctccttaagacccaacagacaactgggctccatggtggaaatcgccaaacaactgcaggccgtgaagcgtaaaatacgcgacgaaagtctgtgcccacaacaccacgaggctctgtctctgttctgctacgaggatcaggaggctgtctgccttatctgtgcgatatcacacacccacagggctcacacggtggtgcctctggacgatgccacacaggagtacaaagagaagctgcaaaaatgcctcgaaccacttgagcagaagctccaagagataaccagatgcaaatcgagtgaggagaagaagccaggcgaacttaaacgtctggttgagtcccggcggcagcagatcctccgtgagtttgaggaactccatcggagactagatgaggagcagcaggtgctgctctccagactcgaagaggaagaacaagatatactgcagaggttgcgcgaaaacgcagcccatctcggggacaagcgcagagatctggcgcacctggctgctgaagtggaggggaagtgcttacagagcggcttcgaaatgcttaaggacgttaagtccaccctggagaagtgcgaaaaggtaaagacgatggaggtgacctcggtgtcaatcgagctggagaaaaatttttcaaatttcccacgccaatactttgcattgcgcaaaatactaaaacaactgatcgccgacgtaaccttagatccggaaactgcccatcctaatctggtgctgagcgaagatcgcaaatctgtgaaattcgtggagacacgattacgggacctgccggacacgcccagacgctttacattttacccatgtgttcttgccaccgaaggcttcacgagtggaagacactattgggaagtggaagttggcgacaagacccattgggcagtcggcgtgtgccgtgacagcgtgtctcgaaaaggggaactgaccccgctgcccgagaccggctactggagagtgaggctgtggaatggggataagtatgccgccacaacaaccccattcacacctctgcacatcaaggttaaacctaaaagagtgggtatctttttggattatgaggctggcaccctaagcttctacaatgtcaccgacagatcacacatctacacctttaccgacactttcacagagaaactgtggccactgttttacccgggcattcgagccgggcggaaaaatgccgcaccacttacaatcagacctcctactgactgggaatag

SEQ ID NO: 247657 - DNA, 1467 bp, Artificial Sequence
  derived and/or modified sequence
atggctgagacatctctcctggaagcaggcgctagcgcagcctctactgccgctgccctggagaacctgcaggtggaggcgtcgtgtagtgtgtgcctggaatatctgaaggagccagtgattattgagtgcggccacaatttctgcaaagcatgcataacacgatggtgggaggatctcgaacgggacttcccttgtccagtgtgccggaaaacgagccgctatcgaagtctgaggcccaatcgtcagctggggtccatggtagagattgcaaaacagctgcaggcagtgaagcgaaaaatccgggacgagtcgttgtgtccccaacaccatgaggccctcagcctcttttgctatgaggaccaggaggctgtgtgccttatttgtgccatcagccatacccatcgcgcgcacacagtggtgccacttgatgatgccacccaagagtataaagaaaaattgcagaagtgcctggagcccctggaacaaaagctgcaggagatcacaagatgtaagtcctccgaggagaagaagccaggcgagctgaaaaggctcgtcgaaagccgccgtcagcagattttgagagagttcgaggaattgcataggcgccttgacgaggaacaacaagtgttgctgagccgccttgaagaagaggagcaagacattctgcagcgactgcgggaaaatgctgcacacctcggggacaaacgtcgggatctggcacaccttgccgcggaggtggaggggaagtgccttcaaagtgggtttgagatgctgaaagacgtcaagtctaccttggagaaatgcgagaaggtgaagactatggaggtgacctcagtgagcatcgaactggagaagaactttagcaacttccccaggcagtacttcgcccttcgaaaaatcctcaagcagctgattgcggacgtgactctggaccctgaaacagctcacccaaacctcgtgctgagcgaagaccggaaaagcgtaaagttcgtggagactaggctgagagatctacccgatacacctagacgctttaccttctacccatgtgttctcgcaactgaaggattcactagtgggcgacactattgggaggtcgaggtgggagacaaaacgcactgggccgttggggtgtgtagggactcggtttccagaaaaggagagcttacccccttgcccgagacaggctattggcgcgtccgcctgtggaacggagacaagtatgcggccaccactactcccttcacacctctccatatcaaggtcaaacccaagcgagtggggatattcttggactacgaggccggcacgctttccttctataacgttactgatcgaagtcacatttatactttcaccgataccttcaccgaaaagttatggccgctattctatcctggcattcgcgcgggccgtaagaatgcagcgccattgacaatcagaccccctacagactgggaatag

SEQ ID NO: 247658 - DNA, 786 bp, Artificial Sequence
  derived and/or modified sequence
atggcagaaacctccctgctggaagcaggcgcgtcggccgcttctacagcagcagctttagagaatctacaggtggaagctagctgctccgtgtgcctggaatacctcaaagagcccgtgatcatcgaatgcgggcacaatttctgtaaagcctgcataactcgctggtgggaggacctcgagagggatttcccgtgccccgtgtgcagaaagacctctaggtatcgcagcctacggcccaacaggcagttgggttccatggtcgagatagccaaacaactgcaggctgtcaaaagaaaaatacgagacgaaagcctctgcccgcagcatcacgaggccctctctctattttgctatgaggaccaggaagccgtgtgcctgatttgcgcgatttcacacacacaccgagcccacaccgtggtgccacttgatgatgccacccaggagtataaggagaaacttcagaagtgtcttgagcctcttgaacagaagcttcaggagattaccaggtgcaagtcgagcgaggagaagaagccgggagagctcaagaggctcgtcgagtcccggcgccagcaaatcctgagagaatttgaagagctgcatagacgcttggacgaagaacagcaggtgctgctcagtagattagaggaggaggaacaggatatcctgcaacgccttagggagaatgccgcacacctgggggacaaacggagggacttggcccatttggccgcagaggttgaaggcaaatgcctccagagcggctttgaaatgctgaaggtgtag

SEQ ID NO: 247659 - DNA, 225 bp, Artificial Sequence
  derived and/or modified sequence
atggcagagacttcattgctcgaggctggtgcctccgccgcttccacagcggccgctctagagaatctccaggttgaagcatcgtgctccgtatgcctggaatacttgaaggagccagttattattgaatgtgggcacaacttttgcaaagcttgcattacccgttggtgggaagacctcgagagagactttccctgccccgtgtgcaggaaaacctctaggtag

SEQ ID NO: 247660 - DNA, 1236 bp, Artificial Sequence
  derived and/or modified sequence
atggccgaaacatctcttctggaggccggggcaagcgccgccagcactgccgcagcactggaaaacctgcaggtggaggcctcatgttcagtgtgtctggaatacctgaaggaacccgtgatcatcgagtgcggtcataacttctgtaaggcttgcataactcgctggtgggaagaccttgagcgcgattttccttgtcccgtttgcagaaagaccagccggtatcgctctctgaggcctaacaggcagctaggttccatggtcgagatcgcaaagcagctacaagctgtgaagcgcaaaatccgtgacgagtcactctgtccccagcaccacgaagcgctgagtctcttttgctatgaggaccaagaggcagtctgcttgatatgcgccatttctcatacacaccgagctcacaccgttgtacctctggatgacgccacccaagagtacaaggaaaaactccagaaatgtctggagcccctggagcagaagctgcaggagatcaccagatgcaaatcaagcgaggagaaaaagccaggtgagttgaaaaggctcgtagaaagtagaaggcagcagattctccgggaattcgaggaactgcaccgacgcctggatgaggagcaacaggtgctgctgtcaaggctggaggaggaagaacaggatatccttcagagactccgtgagaatgctgcacacttgggtgacaagcggagggatctggctcacctggccgctgaagtagagggtaaatgcctccagtccggctttgaaatgctgaaacctgtcttgtctgcacgcgaggaatgtgaaaaggtcaagacaatggaagtgactagcgtgtctatcgaactagaaaagaatttcagtaattttccgcgtcagtacttcgccctacggaaaattctgaagcagttaattgccgacgtcaccctggacccagaaaccgcgcacccgaaccttgttctctccgaggatcgtaagtctgtaaagtttgtggaaaccagactgagagatcttcccgatacgccccggcgctttacattctatccttgcgtcctggccaccgagggttttacctctgggcggcactactgggaggtggaagtcggagataaaacccattgggccgtcggcgtatgtcgcgatagcgtgtccaggaagggcggctgcggttacggtatggggactaacatgcagccgccccctcacctgctccctctctgtaccagtcggtag

SEQ ID NO: 247661 - DNA, 1467 bp, Artificial Sequence
  derived and/or modified sequence
atggccgagacttctctgctcgaagctggcgccagtgctgcttcaacagctgctgcactggagaacctacaagttgaagcaagctgctccgtctgcttagagtacctcaaggaacccgtgattatagagtgcggccataatttttgcaaggcatgtattaccaggtggtgggaagacctggagcgggattttccctgcccagtgtgtcggaagacaagtaggtacagatccctccgcccaaaccgccagttaggtagtatggtcgagattgcaaagcagttacaggccgtcaagcgtaagatccgagatgaaagcctgtgcccgcaacaccacgaggctctgtccctgttctgttacgaagatcaggaagcggtgtgcctgatctgtgccattagccacacacacagagctcacactgtagtgccactggacgacgctactcaggaatacaaggaaaagttgcagaaatgtcttgagcccctggaacagaagcttcaggagattactcgctgcaagtcttccgaagaaaagaaaccaggggaactcaaacgattagtggagtcccgcagacagcagattctcagggagttcgaagaactgcacaggaggctggatgaggaacagcaggttctcctgagccgcctggaggaggaagagcaagacatcctccagcgcctccgcgagaacgcagcccacctgggtgataagaggcgggacttagctcacttagccgcagaagtcgagggaaagtgcttacagtctggcttcgagatgctgaaggacgtcaagagcacactggagaagtgcgagaaagtgaagaccatggaggtaacgtccgtctccatcgagttggagaagaacttctctaacttcccacgtcaatactttgccctgcgtaaaatcttgaagcagctgatagccgatgtgacactggacccagagactgcccatcctaacctcgttctatcggaagataggaagtctgtgaaatttgtggagacaaggctcagggatctgcccgacactccacgtcgatttacattttatccatgcgttctggcgaccgagggtttcacttccggcaggcactactgggaggtcgaagtaggagataagacccattgggccgtaggcgtatgtcgcgattctgtcagtcgaaagggagaactaacccctcttcctgagaccggatactggcgcgttagactgtggaacggagacaaatacgctgctacgaccaccccttttacaccactgcatatcaaggtgaaacctaagagagtcggaatcttcctcgattatgaagctggcaccctctcattttacaatgttaccgaccgcagtcacatttacacctttaccgacactttcacagagaaactatggccgttattctaccccggaattagagctgggcgtaagaacgcagctcctctgaccattcggccaccgacagactgggaatag

SEQ ID NO: 247662 - DNA, 786 bp, Artificial Sequence
  derived and/or modified sequence
atggccgagactagccttctggaagcaggtgcctccgccgcctccacagccgcagccttagaaaatttgcaagtggaggccagctgctccgtatgcttagagtacttgaaggagcccgtgattattgaatgcggtcataatttttgcaaggcctgtatcacgcggtggtgggaggacctcgagagagactttccatgtcctgtctgcagaaaaactagtcggtataggagtctgagacccaatagacagcttggctccatggtggagattgccaaacagctgcaggcagtcaaacgaaaaatcagggatgaaagtctctgccctcagcaccatgaggccctgagcctgttctgctatgaagaccaggaggctgtgtgcttgatatgtgctataagtcacacacatagagcacatacagtggtgccactggacgatgctacccaggagtacaaagagaaactccagaagtgtctggagcccctcgaacaaaagctgcaggaaatcactcgttgtaaatcctctgaggagaaaaaacccggtgagttgaaacgtctcgtggaatcccgacggcagcaaatcctgcgcgagttcgaagagttacatcgacgcctcgacgaagaacaacaagtgctgctctcgcggctggaggaagaggagcaggatatcctccaacggctcagagagaacgccgcacatcttggggacaagcgccgggatctcgcccacctggctgcggaagtggaaggtaagtgcctccaatcaggattcgaaatgctgaaagtgtag

SEQ ID NO: 247663 - DNA, 147 bp, Artificial Sequence
  derived and/or modified sequence
atggcagaaactagcctcctggaagcaggggcaagtgcggcctctactgcggccgcacttgaaaaccttcaggtggaggcatcctgctctgtgtgcctggaatacctcaaggaaccagtgatcatcgagtgtggacacaacttttag

SEQ ID NO: 247664 - DNA, 786 bp, Artificial Sequence
  derived and/or modified sequence
atggcagaaaccagtctcctggaggcaggagcttcagccgcgtccactgccgcagctctcgagaacctgcaggtcgaggctagctgcagcgtgtgtcttgagtatctcaaggaaccagtgatcatcgagtgcggccataacttctgcaaggcttgtatcacaaggtggtgggaagaccttgaacgggacttcccctgccccgtgtgccgaaagacctctcgttatagaagtcttagacccaaccgtcagcttgggagcatggtcgaaattgcaaagcagctgcaagccgttaagaggaagatcagagatgaatccttatgccctcagcaccatgaggccctgtcacttttctgttacgaagaccaggaggccgtgtgtctgatctgtgcgatttctcatacgcatcgcgcacatacagttgtgcctctcgacgacgctacccaggaatacaaggaaaagctccaaaaatgcctagagcccctagaacaaaagttacaagagatcacacggtgcaagtcttctgaggagaaaaagcccggggagctcaagcgtctcgtcgagtcccggcgacaacagattttaagagaatttgaagaactacacagacggctggatgaagagcagcaagtcctgcttagtcgcctagaagaagaggagcaggatatactgcaaaggctgcgggaaaatgctgcacatttgggcgacaaaagacgcgatctagcacacctagctgctgaagtggagggcaaatgtctccagagtggttttgagatgctcaaagtttag

SEQ ID NO: 247665 - DNA, 1467 bp, Artificial Sequence
  derived and/or modified sequence
atggccgagacgtcattactcgaagctggcgcgtcagccgcctcaacggctgccgccctcgaaaacctccaggtcgaggcgagttgctccgtgtgcctggaatatctgaaagagcccgtcatcattgaatgcggacataacttctgcaaggcctgcatcacccggtggtgggaggatcttgagcgggactttccttgccctgtgtgtcgcaaaactagcagatatcgaagcctgaggccaaatcgtcagctgggatctatggttgaaatcgccaaacagcttcaggccgtcaagcgaaaaatcagggatgagagtctgtgtccacaacaccacgaggctctgtcccttttctgttacgaggaccaggaggcagtctgcctgatctgtgccatcagccatacgcaccgggcacatacagttgtgcctctggacgatgccacccaggaatacaaggaaaagctgcaaaagtgcttggagcccctagagcagaagctccaagagataaccaggtgtaaatcatccgaagagaagaagcccggcgaactgaaacggctggtggagtcacgcaggcagcagattttgcgagagtttgaggagttgcatcgacgcctagacgaggagcaacaggtattgctcagtagattagaggaggaggaacaggatattctgcaacggcttagagaaaatgcagcccaccttggagacaaaagacgcgatctggcccacctggcggccgaagtggaaggcaagtgtctgcagagcggatttgaaatgctgaaggatgtcaaatccaccctggagaagtgcgagaaagtgaagacaatggaagtaacgtcagtctccatcgaattagaaaagaatttttcaaatttccctcggcagtactttgccctgcgaaagattctcaagcaattgattgccgatgtgactttagaccccgagacagcccatccgaatctggtgctgagcgaggatagaaagagtgtcaaattcgttgagaccaggctccgcgacttacctgataccccaaggagattcacattttacccctgtgtgctcgctactgaaggttttacctccggcaggcactattgggaggtggaggtgggagacaagacacactgggcggtcggagtctgccgagactccgtcagtcgcaaaggggagttaacccccttaccagaaacaggctactggcgcgttcgattgtggaacggggataaatatgcagcgactaccacaccgtttaccccactgcatattaaagtgaagccaaaacgggtaggaatattcttggattacgaggccgggacattgtcgttttacaacgtaacggacagaagtcatatctacacctttactgatactttcacagagaagctctggccactgttctaccctggaattcgggctggtcgtaaaaacgcagcaccactcacaatacgccctccaaccgattgggaatag

SEQ ID NO: 247666 - DNA, 225 bp, Artificial Sequence
  derived and/or modified sequence
atggcagagacctccctactggaagcaggcgctagcgctgccagcactgcagcagctttagaaaatctgcaagtggaagctagttgttctgtatgcctggagtacctgaaagaaccagtcattatcgagtgcgggcacaatttctgcaaagcctgtataacccgttggtgggaagacctggaacgggactttccatgccccgtctgcaggaaaacaagtcgttag

SEQ ID NO: 247667 - DNA, 1467 bp, Artificial Sequence
  derived and/or modified sequence
atggcagagacttcactcctggaagctggggcaagcgccgcgagcaccgccgctgctttagaaaatcttcaggtagaagcctcatgttcagtgtgcctggagtacttgaaagagcccgtgatcattgaatgtggtcataatttctgtaaggcatgtattacacggtggtgggaggacttggagagggacttcccatgcccagtctgtcggaagacatcccgctatcgatctcttcggcccaaccgccagcttggcagtatggtcgagatagccaaacaacttcaagctgtcaagcggaagatcagagacgaatctctgtgcccgcagcaccacgaggcgctttcgctcttttgttatgaggaccaggaggccgtgtgtctgatctgcgccatttctcacacccatcgagcacacactgtggtaccacttgatgacgcaacccaggaatataaggaaaaactccagaagtgtttggagcctctagagcagaagctccaggaaataacaaggtgtaagtcgagcgaagaaaaaaagcccggggaactgaagaggctcgtcgagtcccggcgtcagcagatactccgggaatttgaggaactgcataggcggctggacgaggaacaacaggttcttctgagccggcttgaggaggaagaacaggatattcttcagcgcctgcgggagaacgccgcccacctaggggacaagcgacgagacctggcccatttagccgccgaggtagaaggtaagtgcctgcaatcagggttcgaaatgttaaaggacgttaagagcactctggaaaagtgcgagaaagtgaagactatggaagtaacctctgtgtcaatagaactcgagaagaatttttcaaactttccacgccaatactttgccctgcgaaagatcctgaagcagctgatagccgacgtgacgttggaccctgagacagctcatcctaatctggtcctatccgaggataggaaatctgtgaaatttgtggagacgagattgcgggacttgccagatacaccacgcaggttcaccttctatccctgtgtgctggctacagaagggtttacatcaggaagacactactgggaagtcgaagtcggtgacaagacccattgggctgtcggcgtctgtcgagactccgtgtcaaggaagggtgaattgacgccgctccccgagaccggctactggcgtgtgcgcctctggaatggcgataaatatgcggccacaactacaccgttcacccccttgcacataaaggtgaaacccaagcgagtaggaatattcctggactatgaggccggtaccctgtcgttctacaacgtgacagaccggagtcacatctatacatttacagataccttcactgaaaaactgtggcccctgttttatcctggaattagagctggacgaaagaatgcggcaccgctaacaatccgccctcctacagactgggagtag

SEQ ID NO: 247668 - DNA, 1467 bp, Artificial Sequence
  derived and/or modified sequence
atggctgagacttctttgttggaggccggcgccagtgcggcatctacagccgctgccctggaaaatctccaggtcgaggcgagctgctccgtgtgcctggagtaccttaaagaaccagtgataattgagtgtggacacaatttctgtaaggcctgcatcacccgttggtgggaggacctggagagggactttccatgtccggtctgcagaaaaacgtccaggtacaggtccctgcgacccaataggcagctcgggtcaatggtagagattgccaaacagcttcaagccgtcaaaaggaagatcagggacgaatctctgtgcccacagcaccacgaggcactttccctattttgttatgaggaccaagaagccgtgtgtttaatctgcgctatttcgcatacacaccgtgcccacactgtcgtgccattagacgacgcaacacaggagtataaggagaaactgcagaaatgcctcgagcccctggaacagaaattacaggaaattacacgttgcaagagctcggaggaaaagaagcccggcgagttgaagagattggtggagtcccgacgtcaacaaattttacgggagtttgaggagctacacaggcgattggacgaggagcagcaggtgttgttgagcaggcttgaagaagaagaacaggacattctgcagaggcttcgtgaaaatgccgcgcacctgggagataaaagaagagacctggcccatttagccgcggaggtcgaaggcaaatgcctccaatctgggtttgaaatgctgaaggacgtcaagtctacactggagaagtgcgaaaaagttaagacaatggaagtcaccagtgtatctatagaattagaaaagaacttttccaatttcccaaggcagtactttgcattacgcaagattctcaagcagttaatagccgatgtcacactggatccggaaactgcgcatcccaacttggtgctgagtgaagaccgaaaatccgtgaagttcgtggaaacacggctcagggatcttccagacacccctagaaggtttaccttttatccctgcgtgctggccacagaaggatttacaagtggccggcactactgggaggtggaagtcggcgataaaactcattgggccgtgggggtatgcagggattctgtcagccggaagggggagctcactccccttccagagactgggtactggagggtgaggttgtggaacggggataaatatgcagctaccacaacccccttcacccccctccacatcaaggtaaaacctaaaagggtggggattttcctggactacgaagcaggaacccttagtttctataacgtgaccgaccgctcccatatctatacatttaccgacacttttacagaaaagctttggccattgttctaccccggcatcagagccgggaggaagaatgcagcacccctgactatccggcctccaactgactgggagtag

SEQ ID NO: 247669 - DNA, 435 bp, Artificial Sequence
  derived and/or modified sequence
atggccgagacgtctctgctggaagccggtgcgtctgcagcctctaccgcagcggctctggaaaacctgcaggtcgaagcctcctgctccgtttgcctggagtacctaaaggaacctgtcattattgagtgcggacataacttctgtaaggcttgtattaccaggtggtgggaggacctggagagggatttcccctgtcccgtttgtcgcaagactagccggtataggagtctgcggcccaaccgacaactcggctccatggtcgagattgctaagcagttgcaagcagtcaagcgaaaaattcgggatgagtcactttgtccacaacatcatgaggcccttagcctgttttgttacgaggaccaggaggccgtttgcctaatttgcgctattagccatacccatcgggctcatactgtggtcccactggactag

SEQ ID NO: 247670 - DNA, 435 bp, Artificial Sequence
  derived and/or modified sequence
atggcggaaacctcattactcgaggccggggctagcgcagcgtcgacggcagcagccttggagaacctgcaggtcgaggcctcctgcagcgtgtgtctagaatatttgaaagagccagtgattatcgaatgtggccataatttctgtaaagcttgcattacccgctggtgggaagacctggaacgggacttcccatgcccggtctgtagaaaaacttctagataccggagtctgcgcccaaacagacagctgggctccatggttgaaatcgccaagcaattgcaggccgtcaaaagaaagatccgcgatgagagtctttgcccccaacaccatgaggccctgagcttattctgttatgaagaccaggaggccgtgtgtctcatatgcgccatatcacacacccatcgggcccataccgtagtacccctggattag

SEQ ID NO: 247671 - DNA, 684 bp, Artificial Sequence
  derived and/or modified sequence
tgaactagtcggtatcgctcacttcggcccaaccggcagctggggtcaatggtggagatagccaagcagttacaagcagtgaagcgaaagattagggatgagtcactgtgcccccagcaccatgaagccctgagcctcttttgttatgaggaccaggaagccgtgtgtttaatttgtgccatcagccacactcatcgcgctcacaccgtagtcccactggatgacgccacacaagagtacaaagaaaagctccagaaatgtctcgaaccgctcgagcaaaagttgcaagaaatcacccgatgcaaaagctcagaggaaaagaagcctggagaactgaagcggctggttgaaagcagacggcagcaaatcctgcgagagttcgaggaactgcaccgtagattggacgaggagcaacaagtgcttttgtccaggctggaagaggaagagcaagacattttacaacggctgcgggaaaacgccgcacacctcggtgataagcggagagacctggcacacttggcggccgaagtggaagggaaatgcctccagtccggatttgaaatgttgaaagacgtgaagagtacactggagaaatgcgagaaggtgaaaaccatggaagtcacctccactacaccttgcacgagtctgcattcagaaataaacgataacgtgcgcggccggtag

SEQ ID NO: 247672 - DNA, 147 bp, Artificial Sequence
  derived and/or modified sequence
atggctgaaacctcactattggaggccggcgcttctgccgcgagcaccgcagcagcccttgagaacctccaggtcgaggcgtcttgcagtgtgtgccttgaatatttgaaagaacccgtgatcatagagtgtgggcacaatttctag

SEQ ID NO: 247673 - DNA, 435 bp, Artificial Sequence
  derived and/or modified sequence
atggcggaaacctccctcctggaggccggggccagcgctgcatccactgctgccgctctggaaaacttgcaggtggaagcctcatgctcagtttgcctggaatatttgaaggaaccggtgatcattgagtgcgggcataatttttgcaaagcatgcattacgcgctggtgggaggacctggagcgcgacttcccttgcccagtatgcagaaagacgagcaggtatcgcagtctgcggccaaatcggcagctaggttctatggtggagatcgctaaacaactccaggcggtgaaaagaaagatacgcgatgagtcactatgcccacagcaccacgaagcactgagtcttttttgctacgaagaccaggaagctgtctgcctgatctgcgctatcagccatacacaccgcgctcataccgtcgtaccgctagactag

SEQ ID NO: 247674 - DNA, 1467 bp, Artificial Sequence
  derived and/or modified sequence
atggccgaaacaagtctgttggaggccggagctagcgctgcctctacagctgcagccctcgaaaacctccaggtggaagcatcgtgcagtgtgtgcctggaatatttgaaggaacccgtcataattgagtgtggtcataatttctgcaaagcctgtataacccgctggtgggaggacctcgagagggactttccatgccctgtttgccgcaaaacgagccggtaccgtagcctgcgtccaaaccgccaactcggcagtatggtggagattgctaaacaactacaggcagtcaaacgcaagatcagagacgagtccctgtgtccccaacatcacgaggccctatcactgttttgctacgaagatcaggaggcggtgtgcttaatttgtgctatttcacatacacacagagcacacactgtggtccccctggacgacgcgacacaggagtataaggagaaactccagaagtgtctcgagcctttggagcagaaactccaggaaattaccagatgtaagagctctgaggaaaaaaagcccggcgagctcaaaaggctggtcgagagccgccgccaacagatcctgcgcgaattcgaggagctccataggagactggatgaagagcagcaagttctgttgtcccggttggaagaggaagagcaggatatcctacaaaggctgcgtgaaaacgctgcccaccttggcgataagcgtagagatctcgctcacctcgctgcagaagtcgaaggtaaatgcctgcagtcaggatttgagatgctgaaagatgtgaaatccaccctggaaaagtgtgagaaagtaaaaacaatggaggttacatctgtgtctatcgagcttgaaaagaacttttccaatttcccaaggcagtacttcgcgctgcggaagatattgaaacaattgatagccgatgtgactctggatcccgagacagcgcacccaaacctggtcctgtccgaagacagaaaaagcgtcaaatttgtggagacaaggctgagggacctaccagatacccctagaagattcaccttctacccatgcgtcctagcgactgagggatttacatcaggccggcactactgggaggtcgaagtgggcgacaagacccattgggccgtgggagtctgtagggattcagtatccaggaaaggcgaactaaccccgctgcctgagacaggatattggagggttcgcctgtggaatggcgacaagtatgccgccactacaactccatttacacccctgcacattaaggttaagcccaagagagtaggaatcttcctggactatgaagcaggaactctctcattttacaacgtgaccgatagatcccatatatacaccttcacggacactttcaccgaaaagctatggcctcttttttaccctgggatcagagccggaagaaagaatgctgcccccttgacaatacgtccgcctaccgactgggaatag

SEQ ID NO: 247675 - DNA, 1467 bp, Artificial Sequence
  derived and/or modified sequence
atggctgagacgtcgctgctagaggcaggcgccagtgctgcatccacggctgcggccctagagaatcttcaggttgaggcttcatgtagcgtgtgccttgagtatctgaaagaaccagtgatcatagagtgtggtcacaacttctgtaaagcttgcataacccggtggtgggaggatctggaacgcgatttcccctgcccagtttgtaggaagacctcgagataccgaagtctgcgccctaacagacagctgggcagcatggtcgaaattgcaaagcaactgcaggccgttaagagaaagatcagggacgagtccttatgtccccagcaccacgaagccttatccctgttctgttacgaggatcaggaagcagtgtgtctgatttgtgctatctcgcacactcacagggcgcacacagtcgtgccactggatgatgctacccaggaatacaaggagaaattacagaagtgcctggagccattggaacagaagctccaagagatcacaaggtgcaaatcctccgaagagaaaaagccaggcgaactaaaaaggctcgttgagagtagacgtcagcagattctgcgcgaattcgaggagcttcaccgaaggctcgacgaagagcaacaagttctgttgagcaggctcgaagaggaggaacaggacattctacagagactccgcgagaacgccgcccatttgggggataaacgcagagacttggcgcacctggctgccgaagtggagggaaagtgcctgcagtcaggctttgagatgttgaaacccgtcctctcagctcgtgaggaatgcgagaaagttaagaccatggaagttacatcagttagtattgagctggagaaaaatttttctaacttcccccgccagtattttgcactgcggaaaatcctgaagcaactgatcgccgatgtaacactcgacccagagaccgcacaccccaatctggtgctttccgaggataggaagagtgtgaagttcgtggagacaaggctccgagatcttccagatactccacgcagatttacattctatccttgtgtgcttgctaccgagggtttcacctctggacgacactactgggaggtggaggtaggagataaaacgcactgggcagttggagtctgtagagacagcgtttctcgtaagggagaactgacccccctcccagaaaccggatattggcgcgtaaggctctggaacggagacaagtacgctgcaacgactaccccctttactcccctccatattaaggtgaagccgaagagagtcgggatctttttagattacgaagcagggacattgtcattttataacgttaccgaccggagtcacatttacacgtttacagataccttcacagagaagctgtggcctttattttatccaggcatcagggccggtcgtaagaatgccgctcccctcactatccggccacccacagactgggagtag

SEQ ID NO: 247676 - DNA, 1236 bp, Artificial Sequence
  derived and/or modified sequence
atggcagagacatcactgctggaggccggagctagcgccgcctctactgctgccgcactcgaaaacttgcaggttgaggcgtcttgctcagtctgcctcgaatatctgaaggaacccgtgataatcgagtgcggtcacaacttctgcaaagcctgcattactcgatggtgggaagatctagagcgtgacttcccctgtccagtttgccgaaagacttcccgctatcgctcactacggccaaatcgccagttaggcagcatggtggaaatagcaaaacagctgcaggcagttaagcggaaaatccgcgacgaatcactctgtccacaacaccacgaagcgctgagcttgttttgttatgaggaccaagaggcagtctgtttaatctgtgccatcagccatacacacagagcacatactgtggtgcccctggatgacgcaacacaggagtacaaggaaaaacttcagaagtgtctggaaccccttgagcagaaacttcaggaaatcacacgatgtaagtcgtctgaggagaaaaagccaggcgagctgaaacgtctggttgagtctcgacgacagcagattctgagggaatttgaagaactccatcggcgcctggatgaggagcaacaagtgctgttgagtcgcctcgaagaggaagagcaggacatcctgcaacgcctcagagagaatgcagctcacttgggcgataagcgccgggatctcgctcatctggccgcagaagtggagggaaaatgtctacaatcggggttcgaaatgctgaaaccagtgctgtcagcccgagaagaatgtgaaaaggtgaagactatggaggttacaagcgtgagcatagagcttgaaaaaaacttctccaattttccacgccagtattttgcactgcgcaagatcttaaaacagctgattgccgacgtcacacttgacccagagaccgcacatcccaacctggtgctcagtgaggacagaaaaagcgtgaagtttgtggagacaagactgcgcgacctccctgatacgcccagaagattcactttctatccatgtgtcctcgccacggaagggtttacctctgggaggcactattgggaggtggaggtgggggacaaaactcactgggccgttggagtgtgccgcgactctgtatctagaaagggcggctgcggctacggaatgggaactaacatgcagcccccccctcacctccttcctttgtgcacgagcaggtag

SEQ ID NO: 247677 - DNA, 1467 bp, Artificial Sequence
  derived and/or modified sequence
atggcggagacctctctgctcgaagccggcgccagcgccgcttctacagccgctgccctagagaacctccaagtggaggccagctgttcagtgtgcctggaatacctgaaggaacctgtgatcatagaatgcgggcacaatttttgcaaagcgtgtatcaccagatggtgggaagacctcgagagggacttcccatgtccagtctgtaggaaaacctcccggtataggagtctgcgaccaaaccgccaacttgggagcatggtcgaaatcgccaaacagctgcaggcggtgaagcgcaaaatccgtgatgaatcactttgtcctcaacaccacgaggcgctgtccttgttctgctatgaagaccaggaggcagtatgcctgatttgcgccatttctcatacccaccgagctcataccgtggttccactcgacgacgccacacaggaatacaaagaaaaactgcagaaatgcctggaaccattggagcaaaagctccaggaaatcacccgatgtaaatctagtgaggagaagaagcctggcgaactcaaacgtctggtggaatcccggcgccagcagatcttgcgtgagtttgaggagcttcatcgccgcctcgatgaagaacagcaggttttgctgtcacgtcttgaagaggaagagcaggacattctgcaacgcctcagagaaaatgctgcccatttgggcgacaagaggcgggatctggcacacctcgccgccgaggtggaggggaagtgtcttcagtcaggttttgaaatgctgaaacctgtcctgagcgctagagaggagtgtgagaaagttaaaaccatggaggtgacctccgtgtccatagagctggaaaagaacttttctaatttcccccggcagtactttgctctcagaaagattctgaaacagcttatagccgatgtgaccctcgacccagagacagcacatcctaatctcgttctctcagaggacagaaaaagtgttaagttcgtcgagacacgactaagagacttacctgacacgcccaggcgattcacgttttatccttgcgtgttggcaacggaaggctttactagtggtcgccactattgggaggttgaagttggcgacaaaactcactgggcggtcggagtgtgtcgtgatagtgtatctcggaaaggtgaactgactcctcttccggagacaggatactggcgtgtgcgcttgtggaacggtgataagtacgcagccacaactacccctttcactcctctccacatcaaggtgaaacccaagcgagttgggatctttttggactacgaggctggcacattgagcttctataacgtcacagataggtcacacatctatacatttaccgatacattcactgagaagctctggccccttttttaccccggcatcagggccggcagaaagaatgccgccccgctgaccatccggccccccacagactgggaatag

SEQ ID NO: 247678 - DNA, 1467 bp, Artificial Sequence
  derived and/or modified sequence
atggccgaaacttccttgctggaagcaggtgctagcgccgccagtacggccgctgctctcgagaacctgcaggttgaggcaagttgcagcgtttgtctcgaatacttaaaggagccagtgattatagagtgtggacataatttttgcaaggcctgcatcacccggtggtgggaagatctcgaacgcgatttcccatgcccagtctgtcgtaaaacctcaagatacaggagtttgagaccaaatcgccaacttggctccatggtggaaattgctaagcagctgcaggccgtaaaacgcaagattcgtgacgagtctttatgcccacaacatcatgaagcgctcagcttgttctgctacgaggaccaggaagccgtgtgtctaatttgcgccatttctcacacccaccgcgcgcatactgtcgttcccctcgatgatgccactcaggagtacaaagagaaactgcagaagtgtctggagccattggaacaaaaactccaggaaattacacgttgtaagagctcagaggaaaagaagccaggagagctgaagagactggtagagagccggcggcagcagatcctcagagaattcgaagagttgcacagacgcttagatgaagagcaacaagttttactcagcaggcttgaagaggaggagcaagatattctccagaggctgcgggaaaacgccgcacatttgggagataaaagacgtgacctggcacacttggcggcagaggtggagggcaagtgcctgcaaagcggattcgagatgctaaaaccagtcctttcagccagggaagaatgtgagaaagtcaaaaccatggaggtcaccagcgttagcatagaacttgaaaaaaactttagcaactttccgcggcagtacttcgcattaaggaaaatcctgaaacagctgatagcagatgtcacacttgaccctgagacagcccatccaaatctggtcctgagtgaagatcgcaaatctgtaaagtttgtcgagacccggctgagagatctccctgatacaccacgccggttcaccttctatccctgtgtattggctacggagggcttcacaagtgggcgccactactgggaggtggaggtgggggacaagacgcattgggctgttggagtctgcagggactctgtgtccagaaagggcgaattgacgcccctcccagagacgggttactggcgggtgagactgtggaacggggacaaatacgctgccaccactacacccttcactccattgcatatcaaggtcaagcctaaacgcgttggcatctttctggactatgaggctggaacattatccttttacaatgtgacagataggagccacatttatacatttactgatacttttactgaaaagctgtggccactgttttaccctggaatccgggcaggtaggaagaacgccgcccctctgacgattaggccccccaccgactgggaatag

SEQ ID NO: 247679 - DNA, 1467 bp, Artificial Sequence
  derived and/or modified sequence
atggcagagacctcactgctagaagcgggcgcatccgctgcgagcaccgcagcagctcttgaaaaccttcaagtggaggcttcctgcagcgtatgcctggaatatttaaaagagcctgttattatagaatgcggccataacttctgtaaggcttgtatcaccaggtggtgggaagacctcgagcgcgacttcccatgtcccgtctgtcgcaaaacttcacgctaccggtcactgcgaccaaaccgtcaactgggctcaatggtggagatcgctaagcagctccaggcagtgaagagaaagattagagacgaaagcctgtgtccgcaacaccacgaggcgctttcactattctgctacgaagaccaggaagccgtttgcctgatctgtgccatctcccacactcatagggctcatactgtggtgcctctggatgacgctactcaggagtacaaggaaaagttgcagaagtgccttgagcctttggagcaaaaactgcaggaaatcacaaggtgcaaatcttctgaggagaagaagccaggggaacttaaacgtctggttgaatcgaggcggcaacagatcctgcgcgagtttgaagagttgcatagacggctggacgaggaacagcaggttctgctgtctagacttgaagaagaagagcaagacatcctgcaacggctgagggaaaatgcggcccatctgggcgacaagagacgcgaccttgcccacctcgcggcggaagtggagggtaagtgcctccagagcgggtttgaaatgctcaaaccagtgttgagcgctagggaggagtgcgagaaagttaaaactatggaggtgactagcgtatctatcgagttggaaaagaatttttctaactttccgagacaatacttcgccctacggaaaattttaaaacagctaatagctgatgtgactctggatcctgaaacagcacatcctaacctggtcctgagcgaggaccggaaatccgtgaagtttgttgaaactagattgagagacttacccgatacacccaggcgtttcacattttacccttgtgtgctcgcaactgaggggttcaccagcggcagacactactgggaagtcgaagtgggggacaagacacactgggccgtgggagtttgccgtgactctgtgagcagaaaaggtgagctgacccctctgcccgaaacaggctactggagagtgagactgtggaacggcgataagtatgctgccaccactaccccgttcacgcctcttcacattaaggtgaaaccaaaaagagttggaatctttctggattacgaagctggcactctttccttttataatgtgacggaccgcagtcacatatacacatttaccgacacctttacagaaaaactgtggccgctgttttaccccggcatccgcgcgggtcgcaaaaacgccgcccctcttacaattagacctcccaccgactgggaatag

SEQ ID NO: 247680 - DNA, 1467 bp, Artificial Sequence
  derived and/or modified sequence
atggctgaaaccagtctgcttgaagcaggcgcatccgccgcttcaaccgcagccgctctggagaatttgcaggtcgaagcgagttgctccgtctgtctggagtatctgaaggagcccgtcattattgagtgcggccacaacttctgcaaggcctgcataactaggtggtgggaggatcttgaaagggacttcccatgccctgtgtgccgaaagactagccgatacagatccctgcggccgaacagacagttggggtccatggtggagattgcaaaacagctccaggccgtgaaaaggaaaatccgcgacgagtctctgtgcccccagcatcacgaagcgctcagcctcttctgttatgaagaccaggaggccgtgtgtctcatctgcgccatctcccacacccatagagcacatactgtcgtgccattagatgatgccacgcaggagtacaaggagaaactgcagaagtgtctagagccccttgagcagaaactgcaggagatcaccaggtgtaagagctctgaagagaaaaagcccggagaactgaagcgactcgtggaatcgagacgacagcaaatcctgagagagttcgaggagctgcatagacggttggatgaagaacagcaggttcttttatctcggctggaggaagaggagcaagatatccttcagcggcttcgggaaaatgcagcacacctgggagataagaggagagatttggcgcatctcgcggctgaagtcgaagggaagtgtctgcagtctgggtttgaaatgttaaagcctgtgttatccgcccgggaggaatgtgaaaaagttaagaccatggaagtcacctcggtctctatcgagctggagaaaaacttttccaattttccccgccaatactttgccctgcggaagatcctaaaacagctgattgctgatgtgacattggatccagagacggcccatcccaatctggtactgagcgaagacagaaagtccgttaagttcgtggaaaccaggctacgagacctgccagacactccgcgccgctttacgttctatccatgcgtgttggcaaccgagggcttcacctctgggagacattattgggaggtggaagtaggagacaaaactcactgggccgtgggagtgtgccgggatagtgtgtcacggaagggcgagctcacaccactgccggagacaggatattggagagtgaggctctggaacggggataagtacgctgccaccaccacacccttcacccctctgcacattaaggtgaagcctaagcgtgtcgggatttttctcgactacgaggctggaacgctcagcttctacaatgtgaccgaccgaagtcacatctacacttttacagatacattcaccgagaaactgtggccacttttttatccgggcatccgggccggcaggaagaacgcagccccacttaccatccgccctcctacagattgggagtag

SEQ ID NO: 247681 - DNA, 1236 bp, Artificial Sequence
  derived and/or modified sequence
atggcggagacatctctgcttgaggcgggagcaagcgctgcctccaccgccgctgccctggaaaacttacaggttgaggcctcatgtagcgtctgtctggaatacctaaaagaaccggtgatcattgaatgtggccataacttttgcaaggcttgcatcactcggtggtgggaggacttggagagggactttccttgccccgtgtgtcgcaagacctccagataccggtcattgcgtcctaaccgacagctcggttccatggtggaaattgctaagcagctgcaggccgtgaagcgcaaaattagagacgaatccttgtgcccacaacatcacgaggccctttcactattctgctacgaagaccaggaagctgtttgcctgatttgcgcaatttctcacactcaccgtgcacataccgtggtaccacttgacgatgccactcaagaatacaaggagaagctgcagaaatgtctggaacctctggagcagaagttacaggaaattacccgttgcaagtccagcgaagaaaaaaaacccggagaactgaagcgactcgtggaaagccgccgccagcagattctccgcgagtttgaggagttgcaccgccggctggacgaagagcagcaggtgttgctgtctcgtctggaggaggaggagcaggacatcttgcagcggctccgcgaaaacgccgctcatctgggggataagagacgggacttagctcacctcgccgcagaggtcgagggcaagtgtctacagtccggctttgaaatgctgaagcccgtgctctctgcccgggaagagtgcgaaaaagtcaaaactatggaagtgaccagcgtctcaattgagctggagaagaatttttctaattttcctcggcagtactttgcactgagaaagatcttgaaacaactgattgcagacgttaccctggatcccgagacggctcatcccaacttagttctgagcgaggatcgaaaatcggtgaaattcgtggaaacccggttgcgagatctccctgacaccccaagacgatttaccttttatccgtgcgtgctggccacggagggtttcactagcggtcgtcattactgggaagtcgaggtgggagacaaaactcattgggctgttggggtgtgcagagattctgtcagtaggaagggaggatgcggctatggaatggggaccaacatgcagccccccccacatctgctgcctctgtgtacctccagatag

SEQ ID NO: 247682 - DNA, 1236 bp, Artificial Sequence
  derived and/or modified sequence
atggccgagacaagtctgttggaagctggagcttctgctgctagcacagctgcagcgctagaaaatctgcaggtcgaagcctcttgctccgtctgcctggagtatctgaaggagcctgtcatcatcgagtgcggccacaacttctgtaaggcttgtatcacaaggtggtgggaggacctggaacgcgatttcccctgtcctgtatgtaggaaaacaagtcgatacagaagtcttcgcccaaataggcagctaggctccatggtggaaatcgcgaagcagctgcaggccgttaagagaaaaataagggacgagagcctgtgtccccagcaccacgaagccctaagtctgttctgctacgaagaccaagaggccgtgtgtttgatttgcgccatctcacatacccaccgagcacacacagttgttccactcgatgatgcaacacaggagtataaggagaaactacaaaagtgccttgaacctttggagcagaagttgcaggaaattactcgatgcaaatcttccgaagagaagaaacctggcgagctcaaacgattggttgagtcacgtagacagcaaattcttagggaattcgaggaactgcacaggagactggacgaggagcaacaggttctgctatctagattagaagaggaggagcaggatattctgcagaggctgcgagagaatgctgcccacttgggggacaagagacgcgatctggcgcacctcgcggccgaggtggaaggcaaatgcctccaaagcgggttcgaaatgttgaagcctgtgctctccgcaagagaggaatgtgagaaagtgaagactatggaggtaactagcgtctcgatcgaactcgagaagaatttttctaactttccccgccagtacttcgccctccgaaaaatcctgaagcaactgatagcagatgtcaccttagatccggagactgctcatccaaatctggtgttgtccgaagacagaaaatcagtgaaattcgtcgaaacgagactcagggatctgccagacacgccacggcgctttactttctacccgtgcgtgctggccacagaggggttcacctctgggcgccactactgggaggtcgaggtaggcgataagacccattgggctgtgggtgtttgccgagacagtgtgtcaaggaaaggtggatgcgggtatggcatgggaactaacatgcagcccccacctcatcttctgcctctctgcacttcgagatag

SEQ ID NO: 247683 - DNA, 1236 bp, Artificial Sequence
  derived and/or modified sequence
atggctgagacttccctgctggaagctggggcctccgcagcatccacagctgcagccctggagaatctccaggtggaagcatcgtgtagcgtctgtctcgagtatcttaaagagccggtcatcatagagtgtggacataacttttgcaaagcctgtattactcggtggtgggaggacctggagcgggactttccatgcccggtgtgtaggaagacaagtcgatacagaagtctgagaccaaaccgacagttaggcagcatggtggagattgctaagcagctccaggcagtaaaacgcaagattcgggacgagagcctgtgcccccaacaccacgaggcgttgtcacttttctgttatgaagaccaggaagccgtgtgcctgatctgtgccatcagtcacacacatagagcgcatacagttgtccccctcgacgatgccacccaggagtacaaggaaaaactgcagaaatgccttgagcctttggaacaaaagctacaagaaatcacccgttgtaaatcttccgaggaaaaaaaacccggcgagttgaaaaggctcgttgagagccggcgccaacagattctacgggagtttgaggagctgcacaggcgattggacgaggaacaacaggtgctgctgagtagactcgaggaggaagagcaggacatcttgcaaaggctacgcgagaacgccgcacatctgggggacaagcgtagagaccttgcccacttggccgcagaggtggagggaaaatgtctgcagagcggctttgagatgctcaagccagtgctgtcggccagggaggaatgtgagaaagttaaaactatggaggtgaccagcgtgagcatcgagttggaaaagaactttagtaattttcccagacagtatttcgccctgcgtaagatccttaagcagctgatcgccgacgtgacactcgacccggaaacggctcatcctaatctggttctgagcgaggataggaagagcgttaagtttgtggagacacggctgcgtgacttgcccgacaccccccgccgcttcactttctacccttgcgttctcgcaaccgaggggttcacctccggccgccactactgggaagtagaagtgggtgataaaactcactgggcagtcggcgtatgtagggattcagtctcccggaagggcgggtgcggatacggcatgggcaccaacatgcagcctcccccccatctgctacccctttgtacgtcgaggtag

SEQ ID NO: 247684 - DNA, 1236 bp, Artificial Sequence
  derived and/or modified sequence
atggcagagacatccctgctggaagccggcgcaagcgccgcatctaccgctgctgccttggagaatctgcaggttgaggcttcctgtagcgtgtgtctggagtatcttaaggagcctgtgattatcgagtgtggccataatttctgtaaggcctgtataacccggtggtgggaggacctagagagagatttcccatgtcccgtgtgcagaaaaacatctcgatacagatccctaaggccaaatagacaattgggtagtatggtggagattgcaaagcaactgcaagccgtcaaaagaaagatcagggatgagtcactgtgccctcaacatcacgaggcactctccctgttttgctacgaggaccaggaagccgtgtgtttgatttgcgccatttcccatactcaccgagcccacactgtagtgcctctggacgatgcgactcaagagtacaaagaaaagcttcagaaatgcctcgagcctctcgagcagaagctacaggaaatcacaagatgtaagagctctgaggaaaaaaagccaggcgagcttaagcgactggtagagtctcgcagacagcagatactgagggagttcgaggagctccaccgcaggctcgacgaggagcaacaggtgctgttgtcacggctggaagaagaagagcaggatatcctgcagcggcttagggagaacgcagcccatctcggggacaagaggcgggaccttgcgcacctggccgccgaagtcgaaggtaagtgcctgcagagcggtttcgagatgctgaaaccagtgttaagcgcgcgcgaggaatgcgaaaaagttaagaccatggaggttacatcagtcagcattgaacttgaaaaaaacttctccaatttcccacgccagtatttcgcactccggaagatccttaaacagcttatcgctgacgtgaccctggacccagagaccgcacatccaaatctggtgcttagcgaagacaggaagagcgtcaagtttgtggaaacacgtctacgggatttgccggacactccacggcggttcaccttctatccctgtgtgctggcgaccgaggggttcacgtctggccggcactactgggaagttgaagtgggggataaaactcactgggccgtaggcgtgtgtcgcgattcagtgtctagaaagggcggatgcggatatggtatgggcacaaacatgcagccacctccacatttactgcctctttgtacctcaagatag

SEQ ID NO: 247685 - DNA, 1236 bp, Artificial Sequence
  derived and/or modified sequence
atggccgaaactagtctgctggaagctggcgcttccgctgcgtctaccgccgctgcccttgagaacctacaggtggaggccagctgtagtgtttgtttagagtacctgaaggagccagtcataatcgagtgcggacacaacttttgtaaagcgtgtataactagatggtgggaggacctggagcgggactttccttgtccagtctgccgaaagacctcgcggtaccggagtttaagaccaaacagacagctcggcagtatggtggagattgccaaacagctacaggcagtcaagagaaaaatcagggacgagagcctgtgtcctcagcatcacgaggctctaagcttgttctgctacgaggatcaggaggccgtgtgcctcatttgtgcaattagccacacccatcgagcacataccgtagtgcctttagacgatgcgacacaggagtataaggagaaactacagaagtgtctcgagcctctggagcaaaagctccaggagattactagatgtaaaagctcagaagaaaaaaaaccaggcgagcttaaaaggctggttgagtcaagacgccaacagattctgcgggagtttgaggagctccataggaggttggacgaagagcagcaggtgctcctcagccgcctcgaggaagaagaacaggacattcttcagcgcctgcgcgagaacgctgctcatcttggagacaagcgtcgcgacctggcgcacctggctgcagaagtcgaggggaagtgtttacaatccggcttcgagatgttaaagcctgtcctgtccgcacgtgaagaatgcgagaaggtgaagacaatggaagtgacgtccgtctctatagagctggaaaaaaactttagtaacttccctcgccagtactttgctctgcgaaaaatcctcaagcagctgatcgcagacgttacactcgatcccgagacagcccatccaaacctcgtgctctctgaggatagaaaatccgttaagtttgtggagacacgcctgagggacctgcctgacacaccgaggcgctttactttctatccttgtgtgctggccaccgaaggcttcacatccggccgtcactattgggaagtcgaagtcggcgataaaacacattgggccgtgggcgtgtgtcgagactcagtctcacgaaagggggggtgtggttacggaatgggtaccaatatgcagccacccccccacctgctcccactgtgcacaagccggtag

SEQ ID NO: 247686 - DNA, 1467 bp, Artificial Sequence
  derived and/or modified sequence
atggccgaaacaagtctgttggaggccggcgcctctgcagcctccactgccgctgcccttgagaatctccaggtggaagcctcctgcagcgtatgcctggaatacttgaaagagcctgtcatcattgagtgtggccataatttctgcaaagcttgcattactaggtggtgggaagatctggaacgggatttcccatgccctgtctgtcgcaagactagcagatacagatccctgagacctaatcgtcaactggggagcatggtggagattgctaaacagttacaagccgtgaagcgcaaaatcagagatgagagtctctgtcctcagcatcatgaagcactgagcttgttttgctatgaggatcaggaggccgtctgcctcatttgtgccatttctcacacacatcgtgcacataccgtcgtgcctctggacgacgcgacccaggagtacaaagaaaagctccaaaagtgcttggagcccctcgagcagaaactgcaggaaattactaggtgcaagtcttctgaggagaagaagccaggtgagctgaagagacttgtggaatctcgaaggcagcagatcctccgggagtttgaggagctccatcggagactggatgaggagcagcaggtgctcttgtctcgcctggaggaggaggaacaggatatcttacagcgcctgcgcgaaaatgccgctcaccttggagataagcgcagagacctggcccatctggcagccgaagttgaggggaaatgccttcagtccggcttcgagatgctcaaaccggtgctgagcgcgagggaggagtgtgagaaggtcaagactatggaggtgactagtgtgtctattgagcttgaaaaaaattttagcaattttccacgccagtacttcgcccttcgtaagatactgaaacagctgatcgccgacgtaaccttagatccagagacggcccatcctaatttggtactctcagaagaccggaagtccgttaaatttgtagagacaagactacgcgatctgcctgatactcctagacggttcactttctatccttgcgtgttagcaacagagggtttcacctccggtagacactattgggaagtcgaagtgggagacaagactcactgggccgtgggcgtgtgcagggatagcgtgtctagaaaaggcgaattaactcccctaccagagaccggctactggcgggtacgtttatggaatggcgataagtacgcggctaccactacaccatttacccctctgcacatcaaggttaaacctaagcgtgttggaatcttcttggactacgaggccggaaccttgtccttctataatgtcaccgatcggtctcacatttacacttttacagacacgttcactgagaaactgtggcccctattttaccctggtatccgcgcgggtcggaagaatgcagcccccctgacaatccggcctcctaccgattgggaatag

SEQ ID NO: 247687 - DNA, 1467 bp, Artificial Sequence
  derived and/or modified sequence
atggccgagactagcctacttgaagcgggcgcatccgcagcgtcaactgccgctgccctcgaaaacctccaggtggaagcttcctgcagcgtttgcctagaatatcttaaggagccagtcatcattgagtgcgggcacaatttttgcaaggcttgcattacccgttggtgggaagatctggaacgagacttcccttgtcctgtgtgtcggaaaacttccagataccgctctcttcggcccaaccgccagttgggctctatggtagaaattgccaagcagcttcaggctgtgaagagaaagattagggatgaatcactgtgtccccagcatcacgaggcgctaagtttgttttgttatgaagaccaggaggccgtatgcctgatctgtgctatctctcatactcacagagcccacactgtcgtgcctctggacgacgctactcaggagtataaagagaagctgcagaagtgcctcgaacccctggaacagaagttgcaagagattacccggtgcaaatcctcagaagagaagaagccgggcgagctcaagcgactggtagaaagcaggcggcaacaaatacttcgggagttcgaggagctgcatcggcgactggacgaggagcagcaagtgttgctaagtagactggaagaggaagagcaagatatcttgcagcggctgcgtgagaatgcagcccatttgggggacaaaaggcgcgatcttgctcacttagcagccgaggtggaggggaagtgcctacaatcaggctttgaaatgctgaagccagtgctgtccgcaagggaagagtgcgagaaggtgaagacaatggaggttacatccgtaagtatcgaattggaaaagaatttttctaattttccccgccagtactttgcattgcgtaaaatactcaaacagttgatcgccgatgtgactctggacccggagacggcccatcccaacctggtcctgagcgaggaccgaaaatccgtaaaattcgtggagacccggctgcgcgacctgcctgacacaccaaggcgctttactttctatccttgcgttttggctacagaaggatttacctctgggaggcactactgggaggtagaagtgggtgacaagacacactgggccgtcggagtttgccgagactcagtaagcagaaagggagagttgactcccctgccagagactgggtactggagggtgagactttggaacggggacaagtatgccgcgacaactacaccttttacacctctgcacattaaagtgaagcccaaaagagtcggaatctttctagattacgaggccggtaccctgagcttctataacgtcactgacagatcacatatctacactttcacggacacattcacggagaagctgtggcctctgttctacccgggcattagggctggcaggaaaaacgccgctcctttgactataagacctccgacagattgggaatag

SEQ ID NO: 247688 - DNA, 1467 bp, Artificial Sequence
  derived and/or modified sequence
atggccgagaccagcctgctggaggccggggccagcgctgccagcacagctgctgccctggagaacctgcaggtggaggccagctgcagcgtgtgcctggagtacctgaaggagcctgtgatcattgaatgtggccacaacttctgcaaggcctgcatcacccgctggtgggaggacctggagcgggacttcccctgccctgtgtgcaggaagaccagccgctaccgcagcctgcggcccaaccggcagctgggctccatggtggagatcgccaagcagctgcaggccgtgaagaggaagatcagagatgagagcctgtgcccccagcaccacgaggccctgagcctcttctgctatgaggaccaggaggccgtgtgcctgatctgtgccatcagccacacccaccgggcccacacagtggtgcccctggatgatgccacccaggagtacaaggagaagctgcagaagtgcctggagcccctggagcagaagctgcaggagatcacccgctgcaagagcagcgaggagaagaagccaggagagctgaagaggctggtggagagccggcggcagcagatcctgcgggagtttgaggagctgcaccggcggctggatgaggagcagcaggtgctgctgagccggctggaggaggaggagcaggacatcctgcagaggctgcgggagaatgctgcccacctgggggacaagagaagagacctggcccacctggccgctgaggtggagggcaagtgcctgcagagcggctttgagatgctgaaggatgtgaagagcaccctggagaagtgtgagaaggtgaagaccatggaggtgacctctgtgtccattgagctggagaagaacttcagcaacttcccccggcagtactttgccctgaggaagatcctgaagcagctgattgctgatgtgaccctggaccctgagacagcccaccccaacctggtgctgtctgaggacaggaagtctgtgaagtttgtggagacccggctgcgggacctgcctgacaccccccggcgcttcaccttctacccctgtgtgctggccacagagggcttcaccagcggccgccactactgggaggtggaggtgggggacaagacccactgggccgtgggcgtgtgccgggacagcgtgtccaggaaaggagagctgacccccctgcctgagaccggctactggagggtgcggctgtggaatggagacaagtatgctgccaccaccacccccttcacccccctgcacatcaaggtgaagcccaagagggtgggcatcttcctggactatgaggccggcaccctgtccttctacaacgtgacagacaggagccacatctacaccttcacagacaccttcacagagaagctgtggcccctcttctacccaggcatccgggccggcaggaagaatgctgcccccctgaccatccggcccccaacagactgggagtag

SEQ ID NO: 247689 - DNA, 435 bp, Artificial Sequence
  derived and/or modified sequence
atggccgagaccagcctgctggaggccggggccagcgctgccagcacagctgctgccctggagaacctgcaggtggaggccagctgcagcgtgtgcctggagtacctgaaggagcctgtgatcattgaatgtggccacaacttctgcaaggcctgcatcacccgctggtgggaggacctggagcgggacttcccctgccctgtgtgcaggaagaccagccgctaccgcagcctgcggcccaaccggcagctgggctccatggtggagatcgccaagcagctgcaggccgtgaagaggaagatcagagatgagagcctgtgcccccagcaccacgaggccctgagcctcttctgctatgaggaccaggaggccgtgtgcctgatctgtgccatcagccacacccaccgggcccacacagtggtgcccctggactag

SEQ ID NO: 247690 - DNA, 684 bp, Artificial Sequence
  derived and/or modified sequence
tgaaccagccgctaccgcagcctgcggcccaaccggcagctgggctccatggtggagatcgccaagcagctgcaggccgtgaagaggaagatcagagatgagagcctgtgcccccagcaccacgaggccctgagcctcttctgctatgaggaccaggaggccgtgtgcctgatctgtgccatcagccacacccaccgggcccacacagtggtgcccctggatgatgccacccaggagtacaaggagaagctgcagaagtgcctggagcccctggagcagaagctgcaggagatcacccgctgcaagagcagcgaggagaagaagccaggagagctgaagaggctggtggagagccggcggcagcagatcctgcgggagtttgaggagctgcaccggcggctggatgaggagcagcaggtgctgctgagccggctggaggaggaggagcaggacatcctgcagaggctgcgggagaatgctgcccacctgggggacaagagaagagacctggcccacctggccgctgaggtggagggcaagtgcctgcagagcggctttgagatgctgaaggatgtgaagagcaccctggagaagtgtgagaaggtgaagaccatggaggtgaccagcaccaccccctgcaccagcctgcacagcgagatcaatgacaacgtgcggggccgctag

SEQ ID NO: 247691 - DNA, 225 bp, Artificial Sequence
  derived and/or modified sequence
atggccgagaccagcctgctggaggccggggccagcgctgccagcacagctgctgccctggagaacctgcaggtggaggccagctgcagcgtgtgcctggagtacctgaaggagcctgtgatcattgaatgtggccacaacttctgcaaggcctgcatcacccgctggtgggaggacctggagcgggacttcccctgccctgtgtgcaggaagaccagcaggtag

SEQ ID NO: 247692 - DNA, 147 bp, Artificial Sequence
  derived and/or modified sequence
atggccgagaccagcctgctggaggccggggccagcgctgccagcacagctgctgccctggagaacctgcaggtggaggccagctgcagcgtgtgcctggagtacctgaaggagcctgtgatcattgaatgtggccacaacttctag

SEQ ID NO: 247693 - DNA, 180 bp, Artificial Sequence
  derived and/or modified sequence
atggccgagaccagcctgctggaggccggggccagcgctgccagcacagctgctgccctggagaacctgcaggtggaggccagctgcagcgtgtgcctggagtacctgaaggagcctgtgatcattgaatgtggccacaacttctgcaaggcctgcatcacccgctggtgggaggactag

SEQ ID NO: 247694 - DNA, 786 bp, Artificial Sequence
  derived and/or modified sequence
atggccgagaccagcctgctggaggccggggccagcgctgccagcacagctgctgccctggagaacctgcaggtggaggccagctgcagcgtgtgcctggagtacctgaaggagcctgtgatcattgaatgtggccacaacttctgcaaggcctgcatcacccgctggtgggaggacctggagcgggacttcccctgccctgtgtgcaggaagaccagccgctaccgcagcctgcggcccaaccggcagctgggctccatggtggagatcgccaagcagctgcaggccgtgaagaggaagatcagagatgagagcctgtgcccccagcaccacgaggccctgagcctcttctgctatgaggaccaggaggccgtgtgcctgatctgtgccatcagccacacccaccgggcccacacagtggtgcccctggatgatgccacccaggagtacaaggagaagctgcagaagtgcctggagcccctggagcagaagctgcaggagatcacccgctgcaagagcagcgaggagaagaagccaggagagctgaagaggctggtggagagccggcggcagcagatcctgcgggagtttgaggagctgcaccggcggctggatgaggagcagcaggtgctgctgagccggctggaggaggaggagcaggacatcctgcagaggctgcgggagaatgctgcccacctgggggacaagagaagagacctggcccacctggccgctgaggtggagggcaagtgcctgcagagcggctttgagatgctgaaggtgtag

SEQ ID NO: 247695 - DNA, 1236 bp, Artificial Sequence
  derived and/or modified sequence
atggccgagaccagcctgctggaggccggggccagcgctgccagcacagctgctgccctggagaacctgcaggtggaggccagctgcagcgtgtgcctggagtacctgaaggagcctgtgatcattgaatgtggccacaacttctgcaaggcctgcatcacccgctggtgggaggacctggagcgggacttcccctgccctgtgtgcaggaagaccagccgctaccgcagcctgcggcccaaccggcagctgggctccatggtggagatcgccaagcagctgcaggccgtgaagaggaagatcagagatgagagcctgtgcccccagcaccacgaggccctgagcctcttctgctatgaggaccaggaggccgtgtgcctgatctgtgccatcagccacacccaccgggcccacacagtggtgcccctggatgatgccacccaggagtacaaggagaagctgcagaagtgcctggagcccctggagcagaagctgcaggagatcacccgctgcaagagcagcgaggagaagaagccaggagagctgaagaggctggtggagagccggcggcagcagatcctgcgggagtttgaggagctgcaccggcggctggatgaggagcagcaggtgctgctgagccggctggaggaggaggagcaggacatcctgcagaggctgcgggagaatgctgcccacctgggggacaagagaagagacctggcccacctggccgctgaggtggagggcaagtgcctgcagagcggctttgagatgctgaagcctgtgctgagcgcccgggaggagtgtgagaaggtgaagaccatggaggtgacctctgtgtccattgagctggagaagaacttcagcaacttcccccggcagtactttgccctgaggaagatcctgaagcagctgattgctgatgtgaccctggaccctgagacagcccaccccaacctggtgctgtctgaggacaggaagtctgtgaagtttgtggagacccggctgcgggacctgcctgacaccccccggcgcttcaccttctacccctgtgtgctggccacagagggcttcaccagcggccgccactactgggaggtggaggtgggggacaagacccactgggccgtgggcgtgtgccgggacagcgtgtccaggaaaggaggctgcggctacggcatgggcaccaacatgcagcccccaccccacctgctgcccctgtgcaccagcaggtag

SEQ ID NO: 247696 - DNA, 1467 bp, Artificial Sequence
  derived and/or modified sequence
atggccgagaccagcctgctggaggccggggccagcgctgccagcacagctgctgccctggagaacctgcaggtggaggccagctgcagcgtgtgcctggagtacctgaaggagcctgtgatcattgaatgtggccacaacttctgcaaggcctgcatcacccgctggtgggaggacctggagcgggacttcccctgccctgtgtgcaggaagaccagccgctaccgcagcctgcggcccaaccggcagctgggctccatggtggagatcgccaagcagctgcaggccgtgaagaggaagatcagagatgagagcctgtgcccccagcaccacgaggccctgagcctcttctgctatgaggaccaggaggccgtgtgcctgatctgtgccatcagccacacccaccgggcccacacagtggtgcccctggatgatgccacccaggagtacaaggagaagctgcagaagtgcctggagcccctggagcagaagctgcaggagatcacccgctgcaagagcagcgaggagaagaagccaggagagctgaagaggctggtggagagccggcggcagcagatcctgcgggagtttgaggagctgcaccggcggctggatgaggagcagcaggtgctgctgagccggctggaggaggaggagcaggacatcctgcagaggctgcgggagaatgctgcccacctgggggacaagagaagagacctggcccacctggccgctgaggtggagggcaagtgcctgcagagcggctttgagatgctgaagcctgtgctgagcgcccgggaggagtgtgagaaggtgaagaccatggaggtgacctctgtgtccattgagctggagaagaacttcagcaacttcccccggcagtactttgccctgaggaagatcctgaagcagctgattgctgatgtgaccctggaccctgagacagcccaccccaacctggtgctgtctgaggacaggaagtctgtgaagtttgtggagacccggctgcgggacctgcctgacaccccccggcgcttcaccttctacccctgtgtgctggccacagagggcttcaccagcggccgccactactgggaggtggaggtgggggacaagacccactgggccgtgggcgtgtgccgggacagcgtgtccaggaaaggagagctgacccccctgcctgagaccggctactggagggtgcggctgtggaatggagacaagtatgctgccaccaccacccccttcacccccctgcacatcaaggtgaagcccaagagggtgggcatcttcctggactatgaggccggcaccctgtccttctacaacgtgacagacaggagccacatctacaccttcacagacaccttcacagagaagctgtggcccctcttctacccaggcatccgggccggcaggaagaatgctgcccccctgaccatccggcccccaacagactgggagtag

SEQ ID NO: 247697 - DNA, 1467 bp, Artificial Sequence
  derived and/or modified sequence
atggccgagaccagcctgctggaggccggcgccagcgccgccagcacagcagccgctctcgaaaatctccaggtggaggccagttgctcagtctgtttggagtatttgaaagaaccagtgattattgaatgtggccacaacttctgtaaggcttgtatcacaagatggtgggaggaccttgagagggactttccttgccctgtctgtcgcaaaacgagcaggtatagatcactcaggccaaacagacagcttgggtcaatggtcgagatcgctaagcagctgcaagcagtgaaacgaaagattcgagacgagtcactgtgcccccagcatcacgaggccctgtcacttttctgttatgaagatcaggaagcggtgtgcctgatttgcgccatctcgcacacccatcgggctcacacagtagtgcctctggacgatgccacacaagaatataaagagaaactccagaagtgcctggaaccgctcgaacaaaagcttcaggagattacccgttgtaagtccagcgaggaaaaaaaaccgggagagctgaaaaggctggttgaaagtaggaggcagcagattctgagagaattcgaagagctgcacagacgcctagacgaagaacagcaggtgctgttgagccggctggaagaagaagagcaggacatcctgcagcgtctccgagagaacgcggcccatcttggagacaagcggcgagatctggctcacttggcagccgaagttgagggcaaatgtcttcagtccgggtttgagatgctgaaggatgtgaagagtactctggaaaaatgtgaaaaggtcaagacgatggaggtgacatccgtgtcaatagaattggagaagaacttttccaatttccccaggcagtactttgccttgcgcaagattctgaaacagcttatcgccgatgttacacttgacccagagacagcgcaccctaatctggttttatcggaagatcggaagtctgtgaaatttgtcgaaactagactgcgtgatctgccagacactccccgccggtttacattttacccctgcgttttagcaaccgagggcttcacgtccggacggcattactgggaggtggaagtcggcgataagacacactgggccgtgggagtttgtcgagacagcgtgtcccgcaagggcgagctcactcccttacctgaaaccggatactggcgggtacgtctgtggaatggcgacaagtatgctgcgactactacaccgtttaccccgctgcacatcaaggtgaaaccaaagcgggtcgggatatttctggattacgaggcaggcacgctgtcattttataacgtcacagaccggagccacatatacactttcaccgatactttcaccgagaagctttggcccctattctaccccggaatccgagcagggcggaaaaacgccgcgcccctgacaattcggcctccgacagactgggaatag

SEQ ID NO: 247698 - DNA, 1467 bp, Artificial Sequence
  derived and/or modified sequence
atggccgagaccagcctgctggaggccggcgccagcgccgccagcacggctgcagccttggaaaatctccaggtagaggctagttgctctgtctgcttggagtacctcaaggaacctgtgattatagagtgtggacacaatttttgtaaagcatgcataacacggtggtgggaagatttggagagggattttccctgtccagtgtgtcgaaagacatccagatatcgtagtctccgcccgaaccgccaattgggcagcatggtcgaaatcgcgaagcagctgcaggcggtgaagcgaaaaatccgtgacgagagtctgtgcccccaacatcacgaggcactaagtctattttgctacgaagaccaggaggccgtttgcctcatatgcgctatttcgcacacccaccgagcccatactgtggtacccttggatgacgcaacacaggagtataaggagaaattgcagaagtgcctcgaacccctggagcagaagctgcaggagattactagatgtaagtcttctgaagagaaaaaacccggcgaattgaagagactcgttgaatcccgccggcagcagatcttgcgagaatttgaggagttacaccgccgactggacgaggaacagcaggtgctgctgtcaagactcgaagaggaggagcaggacatcctccaaaggctgagggagaacgctgctcacctgggtgataagaggcgggacttggcccatctcgccgccgaggtcgaaggcaaatgtcttcagagtggattcgaaatgctcaaggatgttaagtctaccctggagaaatgcgagaaagtcaaaacaatggaggtcaccagcgtatcaattgagttggagaagaatttttctaactttcctaggcagtactttgcgctccggaaaatactcaagcagttgattgctgacgttaccttggatcctgaaactgctcatcctaacctggttttgagtgaggaccggaagtctgtcaagtttgttgagacaaggctgagagatctccctgacacaccaaggcggttcacgttctacccctgcgtactggctaccgagggttttacgtctggtcggcattactgggaggtggaggtgggagataagacacattgggctgttggcgtctgccgggactctgtgagccggaaaggagagctgaccccactcccggagaccggctactggcgcgtgcgattgtggaatggcgacaaatatgcagctacaacgacccccttcactcctcttcacattaaggtgaagcctaagcgggtggggatttttctggattatgaggctggcacattgtctttttacaacgtcaccgatcggagccatatttacacattcacagacacatttacagagaagctgtggcctcttttctaccctggaatccgggcgggccggaaaaatgccgcgccactcaccatcaggccccccacagactgggagtag

SEQ ID NO: 247699 - DNA, 1467 bp, Artificial Sequence
  derived and/or modified sequence
atggccgagaccagcctgctggaggccggcgccagcgccgccagcactgctgctgccctggagaacctgcaggttgaagcctcctgttcggtctgtttggagtacctgaaagaacccgtcataatcgaatgcgggcacaatttctgcaaggcttgcataactcgctggtgggaagatttggaacgcgactttccctgccctgtatgtcgcaagacgagccgataccggagcctgaggcccaatcgacagctcgggagcatggtagagatcgcaaaacaactgcaggcagtgaaaagaaagatccgcgacgagtccctgtgccctcaacaccacgaggccttgtccctgttctgctacgaggatcaagaggccgtttgcctgatctgcgcaatttcacacacccatcgcgcgcataccgtcgtgccattagacgacgcgacacaggagtataaagaaaaattacagaagtgtctggagcccctggaacaaaaattgcaggagatcacaaggtgcaagtcttcggaagagaaaaaacctggcgagctcaagcgactcgtggaatccaggcgccaacaaatactgagggagtttgaggaactccacagaagactggacgaggaacagcaggtgctgctgtccagactggaggaggaggaacaggatattctccagcggctcagggaaaacgccgcccacctgggcgacaagcgcagggacctggcccatctggccgctgaagtagaaggtaaatgtttacagtccgggtttgagatgctcaaggatgtcaagtcaaccctggagaagtgcgagaaggtgaagactatggaggtaactagcgtttccatcgagttggaaaagaattttagtaacttcccacgccagtacttcgcacttcgcaaaattctcaagcagttaattgcagatgttacacttgacccagaaacagctcatcctaacttggtgctgtctgaggacaggaagtccgtgaagtttgtggagactagactgcgcgatctgcccgacaccccgcggcggtttaccttttacccctgcgtgctggctactgaaggatttaccagcgggaggcactactgggaggtcgaagtcggagataagactcactgggccgtgggagtttgccgagactctgtgtccaggaaaggcgagctgacacctctcccagagaccggctactggagagtgcgcctttggaatggcgacaaatacgctgccaccactacgccattcacccccctgcatatcaaggtcaagcccaagagggtgggcatcttcctcgactatgaggcgggtacattatcattctataatgtcaccgataggagtcatatatacacatttactgacacgttcacagagaagctttggcctttattttacccgggcattcgggcaggccggaagaatgctgccccattaacgatccggcctccaactgactgggaatag

SEQ ID NO: 247700 - DNA, 1467 bp, Artificial Sequence
  derived and/or modified sequence
atggccgagaccagcctgctggaggccggcgccagcgccgccagcacggctgccgcacttgaaaatctgcaggtggaggcttcctgctctgtatgtttggaatacttaaaagagcctgtcatcatcgaatgcggccacaacttctgtaaggcctgtattacaaggtggtgggaagacctcgaaagagactttccttgtcctgtatgccgcaagacatcgcgatatcgcagtttacggcctaacagacaactaggaagtatggtagaaatagctaaacagctccaggccgtaaagcgtaagattcgggacgagagcctctgtccacaacatcatgaggctctgagccttttctgttacgaggatcaggaggccgtgtgtctcatctgtgctatcagccatactcatagagcgcacactgtcgtgcctctagacgacgctacacaggagtacaaggagaaattgcaaaagtgcctcgaacctttagagcagaagctgcaggagatcacacgatgtaagtcttcggaggaaaagaagccgggggagttaaagagactcgttgagtccaggagacagcaaatattacgcgaattcgaggaactgcacagaaggctggacgaggagcagcaggtgctactttctaggctggaggaggaggagcaggatatccttcagagactccgtgagaacgccgcccacttaggcgataagagaagggacctggcacacttggctgccgaagtggaaggtaaatgcctccagtcgggcttcgaaatgctaaaggatgtcaaaagcacgctggagaaatgtgaaaaggttaaaactatggaagtgactagcgtgtcgattgagcttgagaagaatttctccaattttccccgccagtactttgctcttagaaaaatattaaaacagctgattgcagatgtcacattggacccagagacagcccaccccaacctggtcctttccgaggaccgcaagtctgttaagtttgtggagacccgcttacgagatttaccagatacccccagacggttcacgttttatccttgcgtgctcgcaaccgagggatttacatctggccggcactattgggaggtagaggtgggcgacaaaacacactgggccgtgggggtgtgccgggactcggtgagcaggaagggagagctaaccccactgcccgaaaccgggtattggcgcgtgcggctgtggaacggcgacaagtatgctgccacaaccaccccttttacaccccttcacatcaaagttaaacccaagagggtggggatcttcctggactacgaggctggcacattatctttctataacgtcactgatagatcccatatttacacgtttacagacacgttcaccgagaagctatggcccctgttctatcctggaatcagggccggcaggaagaatgccgctcctctgacaatccggccacctacagactgggaatag

SEQ ID NO: 247701 - DNA, 1467 bp, Artificial Sequence
  derived and/or modified sequence
atggccgagaccagcctgctggaggccggcgccagcgccgccagcaccgccgctgctttggagaatctgcaggttgaggcttcttgtagcgtctgcttggaatatcttaaggaacctgttatcatcgagtgcggtcacaatttctgtaaggcatgcattactcgctggtgggaggatttggaacgagacttcccttgtccagtgtgcaggaagacctcgagatatcgtagtctacgcccaaaccgccagctagggtctatggttgaaattgccaagcagctacaggcagtcaagaggaagatcagagacgaaagtttgtgtcctcaacaccacgaagccctgtcccttttttgctatgaggatcaggaggcagtctgtctcatctgtgccatatcccatacacaccgagcacatacagtggtacctttggacgatgccacccaggagtataaggaaaagctgcagaaatgtctagagccactggaacagaaactgcaagagattacacgctgtaaatcttccgaagagaaaaagcctggcgaattgaaaagattggtggagtcccgtaggcagcagatattaagggagtttgaagagctccatcgccggctggatgaggagcagcaggtgctgctcagcaggctggaagaagaggagcaggatattcttcagcgtctgagggagaatgcagcccacctcggagataaacgacgggacctcgcccatttagccgcagaagtggagggaaaatgtttacagagcggtttcgagatgttgaaagacgttaaatctacactcgagaaatgcgagaaagtgaagacaatggaggtgacctcagtgtctatcgaattggagaagaacttcagcaattttcctcgacagtacttcgctctgcgcaagatccttaaacagttaatcgcagacgtgaccttggaccccgaaaccgctcatccaaatctggtgctatccgaagatcgcaaatctgtgaagttcgtcgagactagactgagggatctccccgataccccgaggagattcaccttttatccgtgcgtacttgccaccgaaggctttacctcgggcaggcactattgggaggtggaagtcggagacaagactcattgggcagtcggggtgtgtcgcgattctgtgtctcggaagggggagttaactccattacccgagacaggttactggagggtgcgtctgtggaatggagacaaatatgctgccacgaccacaccattcactcccttacatatcaaagtgaagccgaagagggtcgggatcttcttggactacgaggccgggaccctctccttctataacgtgacggacaggtcccatatatacacttttactgacaccttcacggagaaactctggccattgttctatccagggattcgtgcgggccggaagaacgctgctcccctcaccattcgccctcccacggattgggagtag

SEQ ID NO: 247702 - DNA, 1467 bp, Artificial Sequence
  derived and/or modified sequence
atggccgagaccagcctgctggaggccggcgccagcgccgccagcacggctgccgcgttggagaatctccaggtagaggcctcctgttctgtgtgccttgaatacctgaaagaacccgtcatcattgaatgtggccataatttctgcaaggcgtgcatcacgcgatggtgggaggacctcgagagggatttcccctgtcctgtgtgcaggaagacgagtaggtaccggagtctcagaccaaatcggcagctaggtagcatggtggagatagccaagcagctccaggcggtgaagcgtaaaatccgcgacgagtcactatgccctcagcaccatgaagcgctatccttgttctgctatgaggatcaggaagccgtgtgcctgatctgtgctatcagtcatactcacagagcccatacggtcgtgccgctggatgacgccacacaggaatacaaagaaaaactgcagaagtgcctggaaccactggagcagaagctgcaggaaatcactaggtgcaagagctccgaggagaagaaacctggtgaactgaagaggttggttgagtctagacgacagcagattttgagagagtttgaagagctccatcgtagattagatgaagagcaacaggtcttactgagccgacttgaggaggaggaacaggacatcctccagaggctgcgggaaaatgcggcccatctgggagacaaacgcagagacttagcgcatttggcggccgaagtggaaggaaagtgtcttcagtctggatttgaaatgctcaaggatgtcaaaagcacgctggagaaatgcgagaaggttaagactatggaagttacctctgtctccattgaactggagaaaaatttttccaattttccgaggcaatactttgcacttcgcaagatccttaaacagcttatagctgacgtgacactggaccctgagactgcccatcctaacctcgtactgtcagaggatcggaagtccgtcaagttcgtggagacaaggctacgcgacttgccagacacccctaggcgctttactttctacccctgtgtccttgctaccgagggcttcacttcagggagacactactgggaggtcgaggtgggagataaaacccactgggcggtaggggtctgtcgcgatagcgtgagccgtaagggtgagctgaccccgttaccggaaaccggctattggcgggtgcggctctggaatggagacaagtatgcggccactacaaccccttttacccccctgcatattaaggtaaaacctaaaagagttggcatcttcctcgactacgaagcaggtacgttgagcttctataatgtgacagacagaagccatatctatacttttaccgacaccttcacggagaaactgtggcccctgttctaccccggtatccgcgctggacgaaagaatgcagcccccttgactatcaggcctccaacggactgggagtag

SEQ ID NO: 247703 - DNA, 435 bp, Artificial Sequence
  derived and/or modified sequence
atggccgagaccagcctgctggaggccggcgccagcgccgccagcaccgccgcagctctggaaaatctccaggtcgaggcatcctgctctgtttgtctggagtatctcaaggaacctgtgattattgagtgtggacataacttttgtaaggcatgcattacgcgatggtgggaagacctggagagagatttcccttgcccagtgtgccggaagacttccagatacaggagtcttagaccaaatagacagttggggtctatggtcgagattgccaagcagctgcaagcagttaagcggaagattcgagatgaatctctgtgtccacagcaccacgaagctctttccctgttctgctatgaggatcaggaggctgtgtgtctgatttgcgcgatctcccacacacatcgagcacacacagtcgtcccactcgactag

SEQ ID NO: 247704 - DNA, 684 bp, Artificial Sequence
  derived and/or modified sequence
tgaaccagccggtaccggagcctgcggcccaaccggcagctgggctcgatggtggaaattgccaagcagttgcaggccgttaagaggaagattcgggatgaatctctctgcccccagcatcatgaagcactgtcccttttctgttatgaagatcaggaggccgtctgcctcatttgcgcaatctctcatacacatcgggcccacacggtggtgcccctggatgacgctactcaggaatacaaggagaaactgcagaaatgtctggagcccctcgagcagaaacttcaggagattactaggtgtaagtcctcagaagagaagaagccaggtgaacttaaacgactggtggaatcacggaggcaacagatcctacgcgagttcgaagaacttcaccgcaggttggatgaggaacaacaggttttactgtcacgtctggaggaggaggagcaggatatcctacaacgcctgagagagaatgctgcccacctgggcgacaagagaagagacctagcacaccttgcggcagaggtggagggaaaatgtctgcagtcaggttttgagatgctgaaggatgtaaaatccacgctggaaaaatgcgaaaaagtgaagaccatggaggtgactagcacgacaccctgcaccagtctacacagcgagatcaacgacaacgtgcgcggtcggtag

SEQ ID NO: 247705 - DNA, 225 bp, Artificial Sequence
  derived and/or modified sequence
atggccgagaccagcctgctggaggccggcgccagcgccgccagcaccgctgctgccctggaaaaccttcaggtcgaagcctcttgtagtgtgtgcctagaatatctgaaggaacccgtgatcattgagtgtggtcataatttctgcaaggcgtgtattactagatggtgggaagatctagagcgcgacttcccatgccccgtgtgccgcaaaacttcgcgatag

SEQ ID NO: 247706 - DNA, 1467 bp, Artificial Sequence
  derived and/or modified sequence
atggccgagaccagcctgctggaggccggcgccagcgccgccagcactgcagccgctttagagaaccttcaggttgaagctagctgttctgtctgtctagaatacttgaaggaaccggtgattattgaatgtggccataacttttgcaaggcctgtattacgaggtggtgggaggacctcgagagggatttcccctgcccagtatgtcggaagacctcgagatacaggagcttaagacccaaccggcagcttggcagtatggtggagatcgctaagcagttgcaggctgtgaagagaaaaatccgtgatgagtctttgtgcccacaacatcacgaagcactgagtctattctgttatgaagaccaagaggccgtctgtctgatctgcgctattagtcatacacatagggctcacacagtggtgcctctggatgacgcgacccaggagtacaaggagaaattgcagaagtgcctggaacctctggagcagaaactgcaagagattaccaggtgtaagtccagcgaggaaaaaaagcctggtgagcttaagcggcttgtcgaatccaggaggcagcagatacttagggagtttgaggagctacacaggaggctggatgaagagcagcaggttttattgtctagacttgaggaggaggagcaggatattctgcaacgcttgagagaaaatgcggcccacctgggcgataaacgccgggatctagcccatctggctgcagaggttgagggtaagtgcctccagtccgggtttgagatgttaaaggacgtcaagtctaccctggagaaatgtgagaaggttaaaacgatggaggtgacctccgttagcatcgagttagaaaagaacttttctaatttccccagacagtattttgccctccggaaaattctcaaacagttaattgccgatgtgacactggatcctgagacagcccaccctaacctggtgctctcagaagataggaaatctgtgaaatttgtcgagacacggctgagggatcttcctgacacgcccaggagatttactttttatccctgcgtcctcgcaacagaaggttttactagcgggagacattactgggaagttgaggttggcgacaagactcactgggccgtgggcgtgtgtagagactcagtgagtcgtaagggggaattgacacctttaccagaaactggctactggcgtgttcgcttatggaacggggacaagtatgctgcaacaaccacgccttttacgccactgcacattaaggtaaagcccaaacgcgtgggaatctttctcgactatgaggccgggaccctatccttctataacgtgaccgacaggagtcatatctacaccttcaccgacacctttaccgaaaagctgtggccattgttctatcccggtattagagccggtcggaaaaacgccgcaccactcaccattcgcccccccactgactgggaatag

SEQ ID NO: 247707 - DNA, 435 bp, Artificial Sequence
  derived and/or modified sequence
atggccgagaccagcctgctggaggccggcgccagcgccgccagcacagcagctgctttggagaatctgcaagtggaggcgagctgttcagtctgcctcgaataccttaaagagccagtcatcatagagtgtggacataatttttgtaaagcgtgtattacccggtggtgggaggatttagagcgcgattttccttgcccagtttgtcggaagacgtccagatacaggtcacttaggcctaaccgtcaactgggttccatggtagagatagcaaaacagctgcaggctgtgaagagaaagataagagacgagagcctctgcccccaacatcatgaggccctctccctcttttgctacgaggaccaggaagccgtgtgcctcatctgtgcgattagccacacgcaccgcgcgcatactgtggtgcccctagactag

SEQ ID NO: 247708 - DNA, 225 bp, Artificial Sequence
  derived and/or modified sequence
atggccgagaccagcctgctggaggccggcgccagcgccgccagcaccgctgctgccctagagaaccttcaggtggaggcctcatgcagtgtgtgtttggagtatctcaaggagccggtcattattgaatgtggccacaacttttgcaaggcttgtatcactcggtggtgggaggacttggagagagatttcccctgtcccgtgtgtcggaagacaagcagatag

SEQ ID NO: 247709 - DNA, 147 bp, Artificial Sequence
  derived and/or modified sequence
atggccgagaccagcctgctggaggccggcgccagcgccgccagcactgctgccgcgctggaaaatctgcaggttgaggcctcttgttccgtgtgtctggagtatctaaaggaaccggtcatcattgagtgcgggcacaacttttag

SEQ ID NO: 247710 - DNA, 1467 bp, Artificial Sequence
  derived and/or modified sequence
atggccgagaccagcctgctggaggccggcgccagcgccgccagcaccgccgccgcactggaaaacttgcaggtggaggccagttgcagcgtgtgcctggaatacctgaaggaaccagtaattattgagtgcgggcataacttctgcaaggcttgcatcaccaggtggtgggaagacctcgaacgtgattttccctgcccagtctgtcgcaaaacatctcggtatcgtagcttgagacctaatcgacagctcggcagcatggtggaaatagctaagcagcttcaggcagttaaaaggaaaattagagatgagtcattgtgtccacaacaccacgaggccttgtcgctgttttgttatgaggatcaagaagcggtatgcctcatttgcgccatttctcatacccatcgggcccatactgttgttcccctggacgacgctacgcaagagtacaaagaaaagctgcagaaatgtctcgagcctctcgagcaaaagcttcaggagataactaggtgtaagtccagcgaagagaagaagcccggggaactgaagagactggtggaatccaggcggcagcaaatacttcgagagttcgaagagctgcacagacgcctagatgaggagcagcaagtactattgtcacgccttgaggaagaggagcaagacattctgcagaggctgcgggagaatgctgcccacctgggcgacaagaggagagaccttgcccacctggcagctgaggtggaagggaagtgtttacagtctggctttgagatgcttaaggatgtcaagtctactctggaaaagtgtgaaaaggtcaagactatggaagtgacttccgtgtcaattgagctggagaagaattttagtaattttccccgccagtactttgccctcaggaaaatcctgaagcagttgattgccgatgttactttagaccccgagaccgcacatcccaatctagttcttagtgaagatcgcaaatctgtgaaatttgtggagacaagactccgggaccttcctgatacaccccgccggttcactttctatccatgcgtgctggccacagagggttttacttccgggaggcactactgggaagtcgaagtaggggataagacccattgggccgtgggggtgtgtagggacagcgtttctcgcaagggagagctaacgccactgcccgagactgggtattggcgggtgcggctgtggaacggtgacaaatatgccgccacgactacccccttcaccccgctccacataaaagtcaagccaaagcgggttggaatcttcttggattatgaagcagggacactgtctttctacaacgtgactgatcggagtcatatctacactttcacagatactttcactgagaagttgtggccactcttctacccagggattcgcgccgggaggaagaacgctgcaccacttaccataagacctcctaccgattgggagtag

SEQ ID NO: 247711 - DNA, 684 bp, Artificial Sequence
  derived and/or modified sequence
tgaaccagccggtaccggagcctgcggcccaaccggcagctgggctcaatggttgagatcgccaaacagctgcaggcagtgaaaaggaagatcagagacgagtcactttgtccccagcaccatgaggctctctcactgttttgctacgaggaccaagaagctgtttgcctgatttgtgcaatcagccacactcaccgggcccataccgtggttccattggatgacgcaacacaggaatataaggagaagcttcagaagtgtctcgaacccctggagcaaaagctgcaggagatcactcggtgtaagtcctccgaagagaagaagcctggggagctaaagcggctcgttgagtctaggaggcagcaaattctaagggagtttgaggagctacaccgacggctggatgaggaacagcaagttctactctctcggctggaggaggaggagcaagacatcttgcagagattgagagagaacgccgcacacctgggggacaaacgacgggaccttgcccatctggcagccgaagtggagggcaagtgcttgcagtcaggttttgagatgcttaaagatgtgaagtccacactggaaaagtgtgaaaaggttaagactatggaggtgacgtccaccacgccatgcacctcattacatagcgagatcaacgataatgtgaggggccgatag

SEQ ID NO: 247712 - DNA, 147 bp, Artificial Sequence
  derived and/or modified sequence
atggccgagaccagcctgctggaggccggcgccagcgccgccagcacagccgcggcactggaaaatctccaggtcgaggccagctgtagcgtgtgtctggagtacctgaaggagcctgtgattattgaatgcgggcacaacttttag

SEQ ID NO: 247713 - DNA, 147 bp, Artificial Sequence
  derived and/or modified sequence
atggccgagaccagcctgctggaggccggcgccagcgccgccagcacagccgccgcattggagaatttacaagtcgaagccagctgctccgtgtgtctggagtatctcaaggaacctgtgattatcgagtgtgggcataatttctag

SEQ ID NO: 247714 - DNA, 180 bp, Artificial Sequence
  derived and/or modified sequence
atggccgagaccagcctgctggaggccggcgccagcgccgccagcacagctgctgcgctggaaaacctgcaggtggaggcctcatgttccgtctgccttgaatatctcaaggaacccgttataatcgagtgcggccataacttctgtaaggcatgcatcactaggtggtgggaggattag

SEQ ID NO: 247715 - DNA, 180 bp, Artificial Sequence
  derived and/or modified sequence
atggccgagaccagcctgctggaggccggcgccagcgccgccagcacagccgcggcattagaaaacctgcaggttgaagcgagttgttctgtgtgcctggagtacttaaaagaacctgtcatcatcgagtgtggtcataacttttgtaaggcttgtattactcggtggtgggaggactag

SEQ ID NO: 247716 - DNA, 435 bp, Artificial Sequence
  derived and/or modified sequence
atggccgagaccagcctgctggaggccggcgccagcgccgccagcaccgccgccgcccttgaaaacctgcaggtggaggcgtcttgttcggtttgtttggaatatttaaaggagcctgtcattatcgaatgtggacacaatttttgtaaagcttgtattacgaggtggtgggaggacttggaacgcgatttcccctgtccagtctgccggaaaacttctcgatatagaagcctcagacctaataggcagttaggatctatggtggaaatagctaagcagttgcaggccgtgaaaaggaagatcagagatgagtcgctgtgtccacagcaccacgaggctctctctctcttttgttatgaagatcaggaagccgtttgtctgatctgcgcaatcagccacacacacagggctcacaccgtggtccctcttgactag

SEQ ID NO: 247717 - DNA, 684 bp, Artificial Sequence
  derived and/or modified sequence
tgaaccagccggtaccggagcctgcggcccaaccggcagctgggctccatggtagaaatcgcaaaacaactgcaggcggtcaagcggaaaataagggacgagtctttgtgcccccagcaccacgaggcattaagtctgttttgctatgaggatcaggaggccgtctgcctgatttgcgccatcagccacacccaccgcgctcacacagtggtgcccctggacgacgccacccaggaatacaaggagaagctccaaaaatgtttggagcctttagagcagaaactgcaggagataacaagatgtaagtccagtgaagagaagaaaccaggcgagttaaagaggctcgtggaaagcaggagacagcaaattctacgggaattcgaagaacttcacagacgactggacgaagagcagcaagtgctgctgagccgtttagaggaagaagagcaggatatcctgcagcgtcttagagaaaatgcggcacatctgggtgataagcgccgtgatttagcccatctggccgccgaagtcgagggaaagtgtctgcagtccggattcgaaatgctgaaggatgtgaaaagtaccctggagaaatgcgaaaaagtgaagactatggaagtcacgtccactacaccatgtacctcactgcactcagagatcaatgacaacgtacggggaagatag

SEQ ID NO: 247718 - DNA, 684 bp, Artificial Sequence
  derived and/or modified sequence
tgaaccagccggtaccggagcctgcggcccaaccggcagctgggctctatggtggaaatagcgaagcaactacaagctgtcaagagaaaaatcagagatgagagcctatgccctcagcaccacgaagccctgagccttttctgctatgaagaccaggaagctgtctgcctgatatgcgccatatcccatacacacagagctcacaccgttgtcccgctggatgacgccactcaagaatacaaagagaagctgcaaaagtgtttggagccccttgagcagaagcttcaggagattacacgatgcaaaagctctgaggagaaaaagcccggagaactcaaacgcctggtggaaagccgaagacagcagatactgagggagttcgaggagctgcaccggcgactggatgaggagcagcaagtgcttctaagccggttggaggaagaagaacaggatattctacagagactcagggagaatgccgctcacttgggggacaagagacgcgatctggctcatcttgccgcggaggtcgagggaaaatgtctgcagtctggcttcgaaatgctgaaagatgtcaaaagtaccctcgagaaatgtgagaaggtaaaaacaatggaggtcacaagcaccactccctgcacgtcattgcatagcgagattaacgacaacgtgcgcggtcggtag

SEQ ID NO: 247719 - DNA, 147 bp, Artificial Sequence
  derived and/or modified sequence
atggccgagaccagcctgctggaggccggcgccagcgccgccagcactgccgccgccctcgagaatttacaggtggaggctagttgctccgtctgtctcgaatatctgaaagagcctgtcatcatcgagtgtggccataacttctag

SEQ ID NO: 247720 - DNA, 225 bp, Artificial Sequence
  derived and/or modified sequence
atggccgagaccagcctgctggaggccggcgccagcgccgccagcaccgccgccgccctcgaaaacctacaggtggaggcctcatgttcggtctgtctggagtaccttaaagaaccagtgattatcgaatgtggacataacttttgtaaggcctgtattaccagatggtgggaagacttggagagggatttcccctgcccggtctgccgcaagaccagccggtag

SEQ ID NO: 247721 - DNA, 180 bp, Artificial Sequence
  derived and/or modified sequence
atggccgagaccagcctgctggaggccggcgccagcgccgccagcacagccgctgcattagagaatctccaggtggaggccagctgttcagtttgcctggagtacctaaaagagcccgtcattatcgagtgcggccacaacttctgtaaagcgtgtattacccgctggtgggaggattag

SEQ ID NO: 247722 - DNA, 147 bp, Artificial Sequence
  derived and/or modified sequence
atggccgagaccagcctgctggaggccggcgccagcgccgccagcaccgctgctgcacttgaaaacctgcaggtggaggcttcgtgttccgtgtgccttgagtacttgaaggagccagtcatcatagagtgcggccataacttctag

SEQ ID NO: 247723 - DNA, 786 bp, Artificial Sequence
  derived and/or modified sequence
atggccgagaccagcctgctggaggccggcgccagcgccgccagcacagcggcagccctggaaaatctgcaagtggaggccagttgcagcgtatgcctggagtatcttaaagagccggtaattatcgaatgcggacataatttttgtaaggcatgcattacacgctggtgggaggatctagagcgagatttcccatgtcccgtatgccgtaagactagcaggtatcggtctttacggcccaatcggcaactcggctccatggtggagatcgccaaacagctacaagcagtgaaacgcaaaatccgggacgaatccctgtgcccccaacaccatgaggccctcagtctgttctgttacgaagaccaggaagcggtctgccttatctgtgcaatctctcacacacatagagcgcatacagttgtgcccctggacgacgccacccaagaatacaaggaaaaactgcaaaagtgcctggagccgctggagcagaagcttcaggagattacccgatgcaagagctcagaagagaagaaacctggagagctgaaaaggcttgtggaatctagaaggcaacagatacttcgggagtttgaggagttgcaccgcaggctggacgaggagcagcaggttctgctcagtaggttagaagaggaggaacaggatattcttcagcgcctgcgggaaaacgccgctcatctgggtgataagagaagggatctcgctcacttggctgctgaagtcgaaggtaagtgtctgcagagcggcttcgaaatgctcaaagtttag

SEQ ID NO: 247724 - DNA, 180 bp, Artificial Sequence
  derived and/or modified sequence
atggccgagaccagcctgctggaggccggcgccagcgccgccagcaccgctgctgccctggaaaatctgcaggtggaggccagttgctccgtctgtctagaatatcttaaagagcccgtcatcattgagtgtggtcataatttctgcaaggcgtgcattacacgatggtgggaggactag

SEQ ID NO: 247725 - DNA, 435 bp, Artificial Sequence
  derived and/or modified sequence
atggccgagaccagcctgctggaggccggcgccagcgccgccagcaccgccgctgcgctagagaatctacaagtcgaggccagttgcagtgtctgtcttgaatacctcaaggagcctgtcattatcgaatgcggccataacttttgtaaagcatgcattaccagatggtgggaagatctggaacgcgattttccctgtcccgtgtgcaggaagacctctcggtatcggtcactgcgcccaaataggcagcttgggagcatggtggaaatcgccaagcagctgcaagcagtgaagagaaagatcagagatgagtctctgtgcccccagcaccacgaggctttgagtcttttctgctacgaggaccaggaggcagtgtgcctgatctgtgcaatctctcacacacacagggctcacaccgtggtcccactcgattag

SEQ ID NO: 247726 - DNA, 1467 bp, Artificial Sequence
  derived and/or modified sequence
atggccgagaccagcctgctggaggccggcgccagcgccgccagcacagcggccgcattagagaatctccaggttgaggcctcttgtagcgtgtgtctcgaatacctgaaagaacccgttattatcgaatgtggacacaatttctgcaaggcttgcatcactcggtggtgggaggatctggagagagatttcccatgtccggtctgccgcaagacttccaggtacagaagtctcagaccaaacagacaattgggttcgatggtggagatagccaagcagttgcaggcagtgaagcgcaagattcgcgatgaaagcctgtgccctcagcaccatgaggcactgagtctcttctgttatgaggaccaggaggcggtatgtctgatatgtgccatttctcatacccaccgcgcccatactgtagtgccgctggatgatgccacgcaagagtacaaggaaaagctacagaagtgcctggaaccgctggagcagaagcttcaagaaataactcggtgcaaatcttctgaggaaaagaagcctggggaattgaagagattagtcgaaagccgaagacagcaaattctgcgggagtttgaggaactacatcggagattggatgaggagcagcaagttttgctctcccgtctcgaggaagaggaacaggatatcctccagaggctgcgggaaaatgcagcacacttgggcgataagaggagagatctcgcacacttggctgctgaggtcgaggggaaatgtctgcaatcaggttttgagatgctgaaggacgtgaagtctaccctggaaaaatgcgagaaagttaagaccatggaggtgaccagcgtttctattgaactggagaaaaatttctcgaattttccgagacaatattttgcactgcgcaagatcctcaagcagctgattgcagacgtcactctggatccggaaacagctcatcccaacctcgtgctcagcgaagatcgaaagtccgtcaagtttgtggagacgcgactgcgagacctaccagatactcctcgcaggtttactttttacccatgtgttcttgctactgaaggcttcactagcggtagacactattgggaagtggaggtgggcgacaaaacccactgggcagtgggagtctgcagggacagtgtgtcccgcaagggggaactgactcccctccccgagacagggtattggcgagtgagattgtggaacggcgacaaatacgccgccactaccacacccttcacccccttgcacataaaggttaaaccgaagcgggttgggatatttttggattacgaagctggtacacttagcttctataatgtgaccgaccgcagtcacatctacacgtttacggacaccttcaccgaaaaactctggcccctgttttaccctggtattcgggccgggaggaaaaatgctgcccctctgactattagaccccccaccgattgggagtag

SEQ ID NO: 247727 - DNA, 1467 bp, Artificial Sequence
  derived and/or modified sequence
atggccgagaccagcctgctggaggccggcgccagcgccgccagcacagccgccgccctggagaacttacaagtcgaggcttcatgttcagtgtgtctggaatacctgaaagaacctgttattattgaatgtggtcacaatttttgcaaggcatgcatcacaagatggtgggaagacctggaaagagacttcccatgtccggtctgcaggaagactagcaggtacaggtccctgcgtcctaaccgccagctgggcagcatggtggaaattgccaaacagctgcaagctgtcaaaagaaagatccgcgacgagtctctctgcccacagcaccacgaagcattgtccctcttctgctatgaggatcaggaagccgtgtgcctcatatgcgccattagccacactcatagagcccacaccgttgtgccactcgatgatgctactcaagagtacaaggagaagcttcaaaagtgcctggaaccactggagcagaagctccaggaaattactcggtgcaagtcgtccgaggagaaaaagcctggggaactcaagcgactcgtggaatcacgccgccagcagattctgagggagttcgaggagctgcatcgccgattggatgaagagcagcaggttctgctctctaggctggaggaagaagagcaggacatcttgcagcgcctgagggagaacgccgctcacctgggcgacaagcgtcgggacctcgcccacctggcagcagaggtggaagggaagtgcttgcagtccggattcgaaatgctcaaggatgtgaaaagtacacttgaaaaatgtgagaaggtaaagactatggaggtcacctccgtatccattgagttggagaaaaacttctcaaattttcctcgccagtactttgcactgaggaaaatcctgaaacaacttattgccgatgtgacgttggatccagagacagcccacccaaatcttgtcctgtcagaagacagaaagagtgttaagttcgtcgagaccagactgcgggatttgcctgacactccacggaggttcacattttatccatgcgtacttgccacagaggggtttactagcggtcgtcactattgggaagtagaagtgggggataagacgcactgggcagtcggtgtgtgcagggattctgtctcccggaaaggtgagttgacacctttaccagagacaggttattggagggtccggctgtggaatggtgacaaatacgcggctacaaccactccttttacaccgctccatattaaggtgaagccaaaaagggtcggcatctttttagactatgaggcaggtacgctttctttctacaacgtgacggaccgatcccacatttatacattcactgacacattcacagagaaactgtggccactgttctatccaggaatccgggctggaaggaagaatgctgctccacttactattaggcctcctacagactgggagtag

SEQ ID NO: 247728 - DNA, 786 bp, Artificial Sequence
  derived and/or modified sequence
atggccgagaccagcctgctggaggccggcgccagcgccgccagcacagccgcagctctcgagaacctgcaggtagaggcctcttgtagcgtgtgcctcgaatacctgaaagaacctgtaataatcgagtgtgggcataatttctgcaaagcctgcatcaccaggtggtgggaagatctggaaagagatttcccctgtcctgtgtgtcggaagacttcaagataccgctccctacggccaaacaggcagctgggaagtatggtggaaatcgccaaacagttacaggccgtgaagaggaaaatcagggatgaaagtctctgcccgcaacaccacgaagctctatctctgttctgctatgaagaccaggaggccgtatgtctgatctgcgcaatctcccatactcacagggcccacacggtcgttcccctagacgatgcgacccaagagtacaaagagaagctgcagaagtgcctggagccattggaacaaaagttgcaagaaattactcgttgtaagtcctcagaggagaagaaacccggcgaactgaaaaggctggtcgagtctagaaggcagcagattctcagggagtttgaggagctgcaccggaggttggacgaagagcagcaggttttgctgagccgcttagaggaggaggagcaggatattctacagcgacttcgggagaacgcagctcatttgggcgataagagaagagatctagcgcacttagccgcggaagtcgaaggcaagtgtctgcagagcggctttgaaatgttgaaggtttag

SEQ ID NO: 247729 - DNA, 1467 bp, Artificial Sequence
  derived and/or modified sequence
atggccgagaccagcctgctggaggccggcgccagcgccgccagcacagcagcagcactcgaaaacttgcaggttgaagccagctgctcagtgtgtttggagtacctgaaggagccagtcataattgagtgtggacataatttttgcaaggcgtgtattactcggtggtgggaagacttagaacgggatttcccttgtccagtgtgtcggaaaacttctcgctatcgctcattaaggcccaacagacagttggggtcaatggttgaaatcgccaagcagctgcaggcagtcaagcgcaaaattagagacgaatccctctgtccccagcatcatgaggctttaagcctcttctgctatgaggatcaagaagctgtttgccttatttgcgcaattagccatacccaccgagcccacactgtcgttccactagacgacgccacacaggagtataaagaaaagcttcagaaatgcctggagccactggagcagaagttacaggagatcacacgatgcaagtcgagcgaagagaaaaagccgggagagcttaagcggctcgtggagtcaagacgccagcagattctgcgggagtttgaggaactacaccggaggctcgacgaggaacagcaggttctactttctcgccttgaggaggaggaacaggacattttacagcgcttacgggagaacgcagctcaccttggcgacaaacgcagagatctggcccacctggctgctgaggtcgagggtaaatgtttacagtccgggtttgagatgcttaaggacgtgaaatctacacttgagaagtgtgagaaggtcaagactatggaggtgacctctgtctcaatcgagctggaaaagaacttctcgaactttccccgacagtactttgcacttagaaagatcctgaaacagctcattgcagacgtcaccctcgacccagagaccgcccatcctaacctggtgctcagcgaggaccgcaagtccgtgaaatttgtggaaacacgattgcgcgacctgcctgatacaccaagaagatttacgttctatccgtgcgtgctcgcgactgagggtttcacttcaggccgacattactgggaggtcgaggtcggagacaagacacactgggctgtaggcgtttgcagggactccgtcagtcgaaaaggcgaactcactcccctgcccgaaacaggttactggcgggtacggctgtggaacggtgacaaatatgctgctactactactccgtttactccactccacattaaagttaagccaaagcgggtcgggatcttcctcgactatgaggccggaacgctttccttttacaacgttactgacagatcccatatctacacatttacagatactttcactgaaaagctgtggcctctgttctatccagggattagagctggaaggaaaaatgcggccccactcaccatccggccccctaccgactgggagtag

SEQ ID NO: 247730 - DNA, 180 bp, Artificial Sequence
  derived and/or modified sequence
atggccgagaccagcctgctggaggccggcgccagcgccgccagcacagccgccgcactggaaaatctgcaggtggaggcttcatgttccgtctgcctggaatatcttaaggagcccgtgatcatagagtgtgggcacaacttctgcaaagcctgtattacaagatggtgggaggactag

SEQ ID NO: 247731 - DNA, 180 bp, Artificial Sequence
  derived and/or modified sequence
atggccgagaccagcctgctggaggccggcgccagcgccgccagcactgcagctgccctggagaatttacaagtggaggctagctgctccgtgtgcctggagtacctgaaagagcccgtaatcattgagtgtgggcacaatttttgtaaagcctgtatcacacgttggtgggaggattag

SEQ ID NO: 247732 - DNA, 684 bp, Artificial Sequence
  derived and/or modified sequence
tgaaccagccggtaccggagcctgcggcccaaccggcagctgggctctatggtggagatagccaagcagctccaagccgttaaacgcaagattagggacgagagcttgtgtccgcaacaccacgaggccctttcactgttttgctacgaggaccaggaagccgtgtgcttaatctgtgccatcagccatacgcacagagctcacacagttgtgcccctcgatgacgctacccaggagtataaagagaaattgcaaaaatgtctggagcccttggagcagaaactgcaggagattacccgatgtaaaagtagcgaagagaagaaacccggcgagctgaaacgactagtcgaatctcgcagacaacagatattgcgtgagttcgaggagctgcacaggcggcttgacgaggaacagcaggtgctgctgtcccgtctggaagaggaagagcaagacattctgcagcgccttagggagaacgcagctcatctcggagacaagcgcagggatctggcccatctcgccgctgaggtggaggggaaatgcctgcagtcggggtttgagatgctcaaggatgtgaagagcaccctcgagaagtgcgagaaggtcaaaaccatggaggtcacttcaacaaccccgtgtacaagcctccatagcgagattaatgacaatgttcggggcagatag

SEQ ID NO: 247733 - DNA, 1467 bp, Artificial Sequence
  derived and/or modified sequence
atggccgagaccagcctgctggaggccggcgccagcgccgccagcacagccgcagccctcgaaaacctacaggtagaggcaagctgttccgtgtgcctcgagtacctgaaggaacccgtgatcattgaatgtggtcataacttctgtaaagcgtgtataacccgttggtgggaggatcttgagagagacttcccgtgccctgtctgtcgaaaaactagtaggtacaggtcactcagacctaatcgccagctgggaagtatggtggaaattgctaagcaacttcaggccgtgaagcgcaagattagagatgagtctctgtgtcctcagcaccacgaagccctcagtctgttctgctacgaggatcaggaagccgtgtgccttatctgcgccatctcccatacccacagggcacataccgtggtacccttggacgacgcgacgcaagaatacaaggagaagctgcagaaatgcctcgaaccactcgaacagaagctccaggaaattaccagatgtaagagcagcgaggaaaagaaacctggagaactgaaacggctcgtggagagcagacggcaacagatcctgcgggaatttgaggaacttcacaggcggttggatgaggagcaacaggttctgttatcccggctcgaggaggaggaacaggacatactgcagcgcctacgcgagaatgctgcacacctcggggacaagagacgggatctcgctcacctggccgccgaagtggagggaaaatgcctacagagtggatttgaaatgttgaaggatgtaaaatccacccttgaaaagtgtgagaaggttaaaactatggaggttacaagcgtgtcgatcgagctagaaaaaaatttcagtaatttcccccggcaatattttgccttaagaaagatcctgaaacagcttatagcagacgtgactctcgatcccgagacagcccacccgaatcttgtgttaagtgaggaccgcaaatccgttaaattcgtggagactcgcctcagggatctgccggacaccccccgcaggttcacattctacccttgcgtgttggcaacagagggcttcacgtctggccgccattactgggaggtcgaggtgggggacaagactcattgggctgtcggtgtgtgtcgcgacagcgttagccgtaagggcgagttgacacccttgcccgagacggggtactggcgggtccgcttatggaacggtgataaatatgccgctactacgactcccttcactccactgcacatcaaagtgaaaccaaaaagggtggggatcttcttggactatgaagccggcacattatccttctataatgttaccgacagatcccatatttatacgttcactgacactttcaccgagaagctgtggcctttgttctaccctggaatccgggctggcagaaagaacgccgccccactgacaatacggccccccacggattgggagtag

SEQ ID NO: 247734 - DNA, 225 bp, Artificial Sequence
  derived and/or modified sequence
atggccgagaccagcctgctggaggccggcgccagcgccgccagcactgctgctgcattggaaaacttacaggttgaggctagctgctcagtatgcttggagtatctgaaggagccggtgatcatagagtgcggtcataacttctgtaaagcctgtattacacgatggtgggaagacctagaaagggatttcccgtgccccgtgtgtaggaagacatcccgctag

SEQ ID NO: 247735 - DNA, 684 bp, Artificial Sequence
  derived and/or modified sequence
tgaaccagccggtaccggagcctgcggcccaaccggcagctgggcagtatggtggagattgctaagcagctacaggctgtaaagaggaagatcagggacgagagcttgtgtccgcaacaccacgaggcactttcgctgttttgttacgaagatcaggaagctgtgtgtcttatatgtgctatttcccatacccacagagcccacactgttgtgccgttggacgacgccacacaagagtacaaagagaaattacagaagtgcctggaaccccttgaacagaagctgcaggagatcaccaggtgcaaaagcagcgaggaaaaaaagccaggagagctgaagcggctcgtggagagcagacgccagcagattctcagggagttcgaggagctccacaggaggctggatgaggaacagcaggtgctccttagccggttggaggaggaagagcaagatatcctgcagagattgagagagaatgccgctcatttgggagacaaacgtagggatctcgcacatttggcagctgaagtagagggcaagtgcttgcagagcggtttcgagatgctcaaagatgtgaagagcaccctcgagaagtgcgaaaaagtcaagactatggaagtgacatccactaccccctgcacttcgctccacagtgagattaatgacaatgtccgcggtagatag

SEQ ID NO: 247736 - DNA, 1467 bp, Artificial Sequence
  derived and/or modified sequence
atggccgagaccagcctgctggaggccggcgccagcgccgccagcacggcggctgccctggaaaacctgcaggtagaggctagctgttctgtgtgtttggaatacctcaaagagccagtcattattgagtgtggacataatttctgcaaggcatgtatcactaggtggtgggaggacctggaacgcgacttcccttgtccagtgtgcagaaaaacctctagatatagaagtcttagaccaaaccggcagctgggcagcatggtagagatcgccaagcagctccaggctgtgaagagaaagatcagggatgagagtttatgtccccaacatcatgaagcattgtccctgttctgctacgaagatcaggaggctgtgtgccttatttgcgctatctctcacacccacagagcgcatactgtggtgcccctggatgacgcaacccaggagtacaaagaaaaactccagaaatgtctggaaccactcgaacaaaaactccaggagataacaagatgtaaaagttccgaagagaagaagcccggcgaattaaagcgtttggtggaaagcaggcgtcagcagatcttacgtgagtttgaggaattacacagaaggttggacgaagaacaacaggttttgctctctcgcctggaggaagaagagcaagatatcctccagaggctccgagagaacgcggcccacctgggggataagaggagggacctggcccacctggcagctgaagtcgagggcaagtgcttacagtctgggtttgaaatgctgaaggacgtcaagagcactctcgaaaagtgcgaaaaggtcaaaacaatggaagttacctctgtgtccattgaactcgaaaaaaatttctcgaattttcctaggcagtattttgcacttagaaaaatcttgaagcaactgatagccgacgtcaccctggatcctgaaaccgctcatccaaaccttgtgctttctgaggatcggaaaagcgtgaaatttgttgagacccggctgcgggaccttccagacacccccaggcgcttcactttttatccatgcgtgctggcaactgagggcttcacaagcggacggcattactgggaggtagaagtcggcgataagacccattgggctgtcggcgtgtgtagggattcagtgtcccggaagggggaactgactccacttcctgagaccggttattggagagtccggctctggaatggcgacaagtacgctgccactaccaccccattcaccccattgcacattaaggtgaagcctaagcgggttggcatctttctcgattatgaggcaggaaccctctccttctacaacgtcaccgacagaagtcatatctacacgttcacagatactttcacggaaaagctctggcccctgttctacccgggcatcagggctgggagaaaaaacgcagctccactcactatccggcctcccaccgattgggagtag

SEQ ID NO: 247737 - DNA, 1467 bp, Artificial Sequence
  derived and/or modified sequence
atggccgagaccagcctgctggaggccggcgccagcgccgccagcacagccgccgccttggagaacttgcaagtggaggcgtcgtgcagcgtgtgtctcgaatatctgaaagagccggtgatcatcgagtgcggtcacaatttctgtaaggcgtgcatcactcggtggtgggaggatctggagcgggatttcccctgtcccgtgtgtcgtaaaacctccagatacaggtcacttaggcctaaccgccagctgggctcgatggtggagatcgcaaagcagcttcaggctgtcaagagaaaaattagagacgagtccctgtgtcctcagcatcacgaagccctgtccctcttctgttacgaggaccaggaggccgtttgtctgatttgtgccatatcccacacccatagagctcacaccgtggtgcctttagatgacgccacacaggagtataaggaaaaactgcagaaatgtctggagcccctggaacagaagctgcaggaaatcacaagatgtaaatcgtcagaggaaaagaagcccggcgagctgaagcggctcgtcgagtcaaggcgacagcagattctgcgggagtttgaggaactccaccgaagactggacgaggaacaacaggttctgctgtccagactcgaagaggaggagcaggacatacttcagagattacgcgagaatgctgcccaccttggggacaagcgcagggacctcgcccacctggccgccgaggttgagggcaagtgtctgcagagcggctttgaaatgcttaaggatgtcaagtctacactggaaaagtgtgaaaaggtgaagacaatggaagttacttcagttagcattgaactcgagaagaactttagcaatttccctcgtcaatacttcgcacttagaaaaattttaaaacagttaatcgccgacgttacattggaccctgagactgcccatcctaatctcgtgctctccgaggatcgaaaatcagttaaattcgtcgagacacggctgagagacctcccggatactcctcgaagattcactttctacccatgcgttcttgccacagaaggcttcacatcaggaagacactattgggaggtcgaggtaggggataaaacccactgggctgtgggggtatgcagggattctgtatcacgcaagggcgagctcacccccttgcccgagacaggatattggcgggtgcggttgtggaacggtgataagtatgccgcgactaccacaccgtttactcctctacacataaaagtgaagccgaagagggtcggaattttcttagattacgaggcgggaacactctctttttataatgtgactgatcgaagtcatatatacacatttacagatacttttactgagaaactgtggccccttttctatccaggaattcgggccggacgaaagaacgctgcaccacttacaatcagaccccctacagattgggaatag

SEQ ID NO: 247738 - DNA, 786 bp, Artificial Sequence
  derived and/or modified sequence
atggccgagaccagcctgctggaggccggcgccagcgccgccagcacggcagctgccctggaaaaccttcaggttgaggcctcctgcagcgtctgcctggagtatctcaaggaaccagtaataatcgaatgcggccataacttttgtaaagcatgcattactcgttggtgggaggatcttgagcgggactttccttgcccagtttgcaggaagaccagccgatatcggtctctccggcctaatcgccaattaggatcgatggttgagatcgccaagcagctgcaggcagtcaagagaaaaatccgtgatgagtctctgtgtccacagcatcacgaggccctctcgctcttttgttatgaagaccaggaggccgtgtgtctgatctgtgctatttcacacacgcaccgagcacatactgttgtcccactcgacgatgcaacccaggagtacaaagaaaagttgcagaagtgtttggagccgcttgaacaaaaactgcaggagataacccgctgtaagtcctcagaggagaagaaaccgggggagctgaagagactcgtggagtcgcgccgtcagcaaattcttcgagaatttgaggagctgcataggcgacttgacgaagagcagcaagtgctgttgtctcgactggaggaagaggaacaggacattttacagcgcctccgcgagaacgccgctcacttaggcgacaagaggagggacctggcccatctggccgcagaggtcgaaggcaaatgcctgcagtccggtttcgagatgctgaaggtgtag

SEQ ID NO: 247739 - DNA, 225 bp, Artificial Sequence
  derived and/or modified sequence
atggccgagaccagcctgctggaggccggcgccagcgccgccagcactgcagctgccctagagaatctgcaggttgaggcttcctgcagcgtatgtctcgaatatctcaaggaacctgtaatcattgagtgtggccataacttttgtaaggcctgtattaccaggtggtgggaggatctagaaagggatttcccgtgccccgtgtgcagaaagacctctcgatag

SEQ ID NO: 247740 - DNA, 180 bp, Artificial Sequence
  derived and/or modified sequence
atggccgagaccagcctgctggaggccggcgccagcgccgccagcactgccgctgcactcgagaacctacaagtggaggcaagctgctccgtctgtctcgagtacctgaaggagccagtcattatcgagtgtggtcataacttttgcaaggcctgtattacccgatggtgggaggactag

SEQ ID NO: 247741 - DNA, 786 bp, Artificial Sequence
  derived and/or modified sequence
atggccgagaccagcctgctggaggccggcgccagcgccgccagcactgccgccgcccttgagaacctgcaggtggaagcctcttgctcagtttgccttgagtacctgaaggagccagtcattatcgagtgcggtcataatttctgcaaggcttgcattacacgctggtgggaagatctggaaagggacttcccatgtcctgtgtgcagaaaaacctcccggtacagatcccttcgcccgaatcgccagctgggaagtatggtggaaatcgcaaagcagttacaggctgtcaaaagaaagatccgagatgagtctctgtgtccacaacaccatgaagccctgagtctgttctgctacgaggatcaagaggctgtttgtctgatttgcgccatctcccacacacatagggcacacacagtggtgccactcgacgacgcaacccaggaatacaaagagaaacttcagaagtgtctggaacctctggagcaaaagctccaggagattacccggtgtaaaagctccgaagagaaaaagccaggagaactgaagagactggtggaatctcgccggcagcagatcctgcgcgagttcgaagaactacataggcgtttggacgaagaacagcaggtgctcctttcaagacttgaggaagaagaacaggacatcctccagaggctgcgggagaatgcagctcacctgggtgacaagcggcgggatctggcccacctggctgcggaagtggaggggaagtgtctgcagagtggcttcgagatgttgaaagtctag

SEQ ID NO: 247742 - DNA, 1467 bp, Artificial Sequence
  derived and/or modified sequence
atggccgagaccagcctgctggaggccggcgccagcgccgccagcaccgccgctgctttggagaacctgcaggtcgaggccagttgttcagtgtgcctggagtacctgaaagaacccgtgatcattgagtgcggacataacttttgtaaggcctgcattacccgctggtgggaagatctggagagagatttcccttgccctgtatgtcggaagactagccggtacagaagcctgcggccaaatagacagctggggtcgatggttgagattgcaaaacagttgcaggctgtcaaaagaaagatcagagacgaatcactgtgcccacagcatcatgaagctctgagcttgttttgctacgaagatcaagaagccgtttgtctgatctgcgccatcagtcacacccacagggctcatacagtggtacccctggacgatgccactcaagaatacaaggagaaactacagaagtgcctcgaacctctcgagcagaagctacaagaaatcacccgatgcaagtctagcgaggagaaaaaaccaggggagctgaagcggctggttgagtcacggaggcagcagattctgagagaattcgaggaactccaccgacgcttagacgaagagcagcaggtcctcctgtctagactcgaggaggaagaacaggacattctccagaggcttcgcgagaacgctgcccatttgggcgataagcgccgcgacctagcccatctggccgccgaagttgagggcaaatgccttcaatctggtttcgaaatgctcaaggatgtcaagagcactttggagaaatgtgagaaggttaagactatggaagttacctctgtcagcatcgagctggagaagaattttagcaatttcccgaggcaatacttcgccctgcgcaaaatattgaaacagctcattgccgacgtgactttagaccccgagaccgcccaccctaacctcgtactatcagaagacagaaagtccgtgaagtttgtggaaactcggctcagagatttgcccgatacaccaaggagattcacattttacccttgtgtgctggcaacagaaggctttacctcgggcaggcactattgggaagtggaagtcggggataagacacattgggccgtgggcgtctgccgcgattccgtgagtcgcaagggagaattgacaccattgcctgagaccggatactggagagtgcgtctgtggaacggcgacaaatacgccgcaactaccacaccatttacgccccttcacatcaaagtgaaacctaaacgggttggtattttcctggactacgaagccggaacactctccttttataacgtgacagacaggagccacatttacacctttactgatacatttacagagaagttgtggcctctcttctaccctgggatcagggcggggcgcaaaaatgctgcaccactgaccattcggccccccaccgactgggagtag

SEQ ID NO: 247743 - DNA, 1467 bp, Artificial Sequence
  derived and/or modified sequence
atggccgagaccagcctgctggaggccggcgccagcgccgccagcaccgccgctgcactggagaatctgcaggtggaggcctcatgttcagtgtgcctggagtacctgaaagagcctgtgattatagagtgtggacataacttctgcaaagcgtgtataacacgatggtgggaagatcttgagcgtgacttcccatgcccagtctgcaggaagacatcccgttataggtccctgcggcccaacagacagctcggctcaatggtcgaaatcgcgaaacagcttcaggccgtgaaaaggaaaatcagagacgaatctttatgtcctcagcatcacgaagcactgagcttattttgctacgaagatcaggaggctgtctgccttatctgtgccataagtcacacccacagggcacatacagtggtgccattggacgatgcaactcaggaatacaaggagaagctacagaaatgtttggaacctctggagcagaaacttcaagagataacaagatgcaaaagttccgaggagaagaaaccaggagagttaaaaaggctagtggagtctagaaggcaacagatcttgcgggagttcgaagaactccaccggagactggatgaagagcaacaggttctgctgtcccggctcgaagaagaggagcaagacatcctgcagcgcctccgcgaaaacgctgcccacctgggagataaacgccgggacctggctcatctggctgcagaggttgagggtaagtgcctgcaaagtgggttcgaaatgctcaaagatgtgaagtctactctagagaaatgcgagaaggtgaaaaccatggaggtgacctcagtgagcattgagctagagaagaacttctctaacttcccaagacagtatttcgcactgaggaagatattgaaacaactcattgccgacgtgaccctagaccctgagacagcacatcccaatcttgttctttccgaagaccgcaaatctgtaaaattcgtcgagactcgcttgcgggacttgccggataccccacggcggtttacattctacccctgcgttcttgccaccgaaggtttcacttccggacggcattattgggaggtggaggtcggcgacaaaacgcattgggccgtgggtgtctgcagggatagcgtgagccgcaagggtgaactcacgcccttacccgagacaggatattggcgggtgagattatggaatggagataagtacgccgccaccacaactccatttaccccccttcacattaaagttaagcccaaacgggtggggatttttctggattacgaggcaggcactcttagcttctataatgtaactgaccgttctcacatttatacattcacggacactttcacggaaaagctgtggccactattttatcctggaataagggccggacggaagaacgcagctccactgactattagacccccaactgactgggaatag

SEQ ID NO: 247744 - DNA, 786 bp, Artificial Sequence
  derived and/or modified sequence
atggccgagaccagcctgctggaggccggcgccagcgccgccagcacggcggcagccctagagaacctgcaagtggaggcatcatgttctgtatgtttagagtacctaaaagagccagtcatcatcgagtgtggccacaacttctgtaaagcatgtattaccagatggtgggaagacctggagcgcgattttccttgtcccgtgtgccgaaaaaccagcagatatagaagcctgcgtcctaacagacagcttggatcaatggtggaaattgcaaaacaactccaggccgtgaaacgcaaaattagagacgagtctctatgtcctcagcaccatgaggctctgagtttgttctgctatgaggatcaggaggccgtttgcttgatttgtgccataagccatacgcacagagcccacactgtcgtcccactggatgatgctacccaagaatacaaggaaaaactccagaaatgtttggagcctttagagcagaaattgcaggaaattacacggtgcaaaagcagtgaagagaaaaaaccaggcgagctgaagagacttgttgagtcaagacgtcaacagattttacgcgaattcgaggagctacataggcgccttgatgaagaacagcaagtcctgttaagcaggctggaggaggaggaacaagacatccttcagagactacgtgaaaatgcagctcacctaggggataagagacgtgatcttgcacatctggccgcagaggtggagggcaagtgcctgcagtcaggctttgagatgctgaaggtgtag

SEQ ID NO: 247745 - DNA, 225 bp, Artificial Sequence
  derived and/or modified sequence
atggccgagaccagcctgctggaggccggcgccagcgccgccagcaccgccgcggccctggaaaatttacaagtggaggcgtcttgcagtgtgtgtctggagtacttgaaggaaccagtgataatcgagtgtggacataatttttgtaaggcttgcattacaaggtggtgggaggacctcgagagagactttccatgtcccgtgtgccggaagactagtcgctag

SEQ ID NO: 247746 - DNA, 1236 bp, Artificial Sequence
  derived and/or modified sequence
atggccgagaccagcctgctggaggccggcgccagcgccgccagcactgccgccgccctggagaacctgcaggtagaggcctcttgtagtgtgtgccttgaatatctgaaagaaccagttataatagaatgcgggcataatttctgcaaagcctgcataacacgctggtgggaggatctggaacgagatttcccttgcccagtatgcaggaaaacttctcggtatagatctctgagaccaaaccgccaactagggtcaatggttgaaatagccaagcagctccaagccgttaaaagaaaaataagagacgaatcgctatgcccgcagcatcatgaagcactgtccctattctgttacgaagatcaggaggcagtgtgtttaatctgtgctatcagccacacacaccgtgcccacacagtagtaccactggacgatgccacccaggaatataaggaaaagctgcagaaatgtttggaacctctggaacaaaagctgcaggagatcaccagatgcaagtcttctgaagaaaagaagccaggggaactcaaaaggctggtggaaagcaggaggcagcagattctcagagaatttgaggaactccataggcgtttagacgaggaacagcaagttcttcttagtaggctagaagaggaggaacaagatattttacagaggctgagagagaacgctgcgcacctgggtgataagagacgggatctggctcaccttgcagccgaagtcgaaggaaagtgtttacagtctggctttgaaatgctcaagcccgtcctatctgcacgcgaggaatgcgagaaagtgaagactatggaggtgacttctgtatccatcgaactcgagaagaattttagcaactttccgaggcagtacttcgccctccgaaaaatcctcaaacaactcatagcggatgtgacgctagatccagagaccgctcacccaaatttggttctttcggaggaccggaaatctgtgaagtttgtcgagacccgtctacgcgacttgccagacacgcctcggagattcactttctacccctgtgtcctggcaacagagggcttcacttcaggccggcactactgggaggttgaagtcggggacaagactcactgggctgtgggcgtgtgtcgggactccgtgagcaggaaggggggctgtggatatggcatgggcacaaatatgcagcctccccctcacttattgccgctgtgtacatctcggtag

SEQ ID NO: 247747 - DNA, 1467 bp, Artificial Sequence
  derived and/or modified sequence
atggccgagaccagcctgctggaggccggcgccagcgccgccagcacagcagcagcgctcgaaaatctacaagtagaggcatcctgcagcgtgtgcttagaatatcttaaagagccggtgatcatcgaatgcgggcataacttttgcaaagcttgtatcactcgatggtgggaggatttggaaagagacttcccttgccccgtgtgccgtaaaacgtcacgatacaggtccctcagaccaaacaggcaactgggctcaatggtcgaaatcgccaagcaattacaggctgtgaagaggaaaatccgcgacgagagcttgtgtcctcaacatcacgaggctctgtcactgttctgttacgaggatcaggaagccgtatgtctaatatgcgccatctcacatacacatagggcccacaccgtggtgcctctggatgatgcaacacaagaatacaaggagaagctgcaaaaatgcctggaacctctggagcagaaactgcaagaaattacccgatgcaagagctctgaggaaaaaaagcccggggagctgaaacgcctggtggagtcacgtaggcagcagatcctgagagagttcgaagaacttcaccgccggctagacgaagagcaacaggtactgctgagccgactggaggaggaggagcaggacattctccagagactacgagagaatgccgctcatctcggagataaacgacgagacctggctcacctagccgcagaagtggagggaaagtgtctacagtcaggcttcgagatgttaaaagacgttaagtctactctggagaaatgcgaaaaagtgaaaactatggaggtcacctccgtgagtatcgagctagaaaaaaacttctctaacttcccacggcagtacttcgccctccggaagatactgaaacaactgattgctgacgtgacactcgaccctgagactgcgcatccaaacctggtgttgagcgaggacaggaaatctgtcaaatttgtagagacacgcttacgcgacctcccagatacaccgaggagatttaccttctatccctgcgtcttggctacggagggctttacttccggccgccattattgggaggtggaggttggggataagacacattgggcagtgggcgtttgtagagattccgtgtctaggaagggtgaattaacacctctccctgagactgggtactggcgcgtcaggctttggaatggcgacaagtacgccgccaccaccaccccatttacccccctgcacatcaaagtcaagcccaagcgggtgggcatctttctggattacgaagccggcacattatcattttacaatgtgaccgaccggagccacatttatacatttactgacaccttcacagagaagctgtggcctctgttctatcctgggattcgcgccggtagaaaaaatgcggccccccttacaatcagaccccctactgattgggagtag

SEQ ID NO: 247748 - DNA, 786 bp, Artificial Sequence
  derived and/or modified sequence
atggccgagaccagcctgctggaggccggcgccagcgccgccagcacggcagccgctctggagaatttgcaggtggaggcatcttgttctgtgtgcttggagtacctaaaggagccggttatcatagaatgtgggcacaacttctgtaaggcatgtataactcgttggtgggaagacctagagcgcgacttcccatgcccggtctgtaggaagaccagtcggtatcgctctctccgccctaatcggcaattaggcagcatggtggaaatcgctaagcagcttcaggctgtgaaaagaaagattcgggatgagagcctctgtccacaacatcacgaggctctttcactattttgctatgaggaccaagaggcagtatgcctgatctgtgccatcagccatacgcaccgcgcccatacggtcgttccactcgatgacgccacgcaggaatacaaggagaagctacagaagtgtctggagcctcttgaacagaaactgcaggaaattacgagatgcaaatcttctgaagaaaaaaagcctggggaattgaaaagactagttgagagccggaggcagcaaattctgagagagtttgaagagctgcaccggcgtttggatgaggaacaacaagtgctgctaagcaggctcgaggaagaggaacaggatattctgcagcggctacgggagaatgctgcgcatctcggcgacaagcggagagaccttgcccatctagcggcagaagtagagggaaaatgcctacagagcggttttgaaatgcttaaggtgtag

SEQ ID NO: 247749 - DNA, 147 bp, Artificial Sequence
  derived and/or modified sequence
atggccgagaccagcctgctggaggccggcgccagcgccgccagcacggccgctgcactggaaaacctgcaggtggaggcttcatgcagcgtgtgcctggaatatctgaaagagccagttatcatagaatgtggacataacttttag

SEQ ID NO: 247750 - DNA, 786 bp, Artificial Sequence
  derived and/or modified sequence
atggccgagaccagcctgctggaggccggcgccagcgccgccagcacagccgcagcactggagaacttgcaggttgaagcatcttgctctgtttgcctggagtacttgaaagagcccgtgatcattgagtgcggccataatttttgcaaggcctgtatcacccggtggtgggaagacctggagagggacttcccatgtcccgtgtgtagaaagacctcgagatatcggtcactcaggccaaatcgccaactggggtctatggtggaaatcgcgaaacagctgcaggctgttaagcgcaagatcagagacgaatcactctgcccccagcaccacgaggccttgagcctgttctgttacgaggatcaggaggctgtgtgtttaatctgcgcaatctctcatacgcatagggcccacactgttgtgccactggacgatgccacacaggaatataaagagaaactccaaaagtgtttggagccgctcgagcagaagctgcaggagatcacccgatgtaagtcaagcgaagagaaaaagcccggcgagctgaagcgcttggtagagagtcggcggcagcaaatactccgggaatttgaagaattgcatagaaggctagacgaggaacaacaggtgctgctgagcaggcttgaggaggaggagcaggatatccttcagaggttgagagagaacgccgcccatctcggcgacaaacgaagagatctggcccaccttgctgccgaggtcgagggaaaatgcctgcagtcagggtttgaaatgttgaaggtatag

SEQ ID NO: 247751 - DNA, 1467 bp, Artificial Sequence
  derived and/or modified sequence
atggccgagaccagcctgctggaggccggcgccagcgccgccagcactgctgccgccctggagaacctgcaggtggaggccagttgttccgtatgtttggaatacttgaaagagcccgtcataattgagtgtggtcataatttctgcaaggcatgcatcacccgctggtgggaggatctggaacgcgattttccctgccccgtttgccggaagacaagccgctatcggtcgcttagacctaacaggcaactgggaagcatggtggaaatcgctaagcagttacaagccgtaaagagaaagattcgagatgagagcctgtgtcctcagcatcatgaggcccttagcctgttttgctatgaggatcaggaggccgtgtgcctcatctgtgcaatatctcacacacaccgcgcccataccgttgtccctctcgatgatgccacacaggaatataaggagaaactccagaaatgcctggaaccactggaacaaaagctgcaggaaataactaggtgcaaatcctccgaagagaagaaacctggggagctgaagcgtttggttgagtcacggcgtcagcaaatcctgcgcgaatttgaagagctccacaggcggctcgatgaggagcagcaagtgctgctctcacgactggaagaggaggagcaggatattctgcaacgcctgagggaaaatgcagcccatctgggtgataagcgtcgagatttggcacacctggccgctgaggttgagggcaagtgcctgcagtctggattcgaaatgctcaaggatgtaaaaagtactttggaaaaatgtgagaaggtgaagaccatggaggtgacaagtgtgagtatcgagttggagaagaacttcagcaacttcccacgccagtactttgcgctgagaaagatcctgaagcaactcatagccgatgtgacgttggaccccgaaaccgcccatccaaatctagtgctttcagaagatagaaagtccgtgaagttcgtggaaactcggctgagggatctgccagacaccccacgcagattcacgttctatccatgcgtgctcgcgactgagggtttcacgtccgggcgacactactgggaagttgaagtcggcgacaaaacacattgggctgtgggtgtgtgcagggactccgtttctcgcaagggtgaactgacccctctgccagagaccgggtattggagggtacggctgtggaatggtgacaaatatgccgctaccaccactccgttcacacctctacacattaaggttaagccaaagcgtgtgggtattttcctagattacgaggctgggactctgtctttttataatgtgaccgatagatcacatatttacacgttcactgacacatttaccgagaagctatggcctctgttttaccctggaatcagggccgggcgcaagaatgctgccccactgacaatcagacctccaaccgactgggaatag

SEQ ID NO: 247752 - DNA, 225 bp, Artificial Sequence
  derived and/or modified sequence
atggccgagaccagcctgctggaggccggcgccagcgccgccagcaccgctgcagcactcgagaatctccaggttgaggccagctgcagtgtttgcctcgaatacctcaaagagcccgtaatcatagagtgcggacacaacttctgtaaggcttgcatcactcgctggtgggaagacctagaacgagatttcccttgtccagtctgcagaaagacaagcaggtag

SEQ ID NO: 247753 - DNA, 1467 bp, Artificial Sequence
  derived and/or modified sequence
atggccgagaccagcctgctggaggccggcgccagcgccgccagcacagcggcggcacttgagaaccttcaagtagaggcaagctgttccgtttgcttagagtacctcaaggaacccgtgattatcgagtgtggacacaacttctgtaaagcttgtattacgagatggtgggaagacttggaaagagactttccttgcccagtctgcaggaagacctctcgctaccgcagtttgcgccccaataggcagctgggcagtatggtcgagattgcgaaacaactgcaggcagtgaagagaaagattcgcgacgagtcattatgcccacagcatcatgaagccttgtcccttttttgctatgaggatcaggaagcggtatgtctgatttgcgccatttctcatactcacagggctcataccgtggtccctcttgacgacgccacccaagagtataaggagaagctccagaagtgtctggaaccactggagcagaaacttcaggagataacacggtgtaagagtagtgaagagaagaagcccggtgaactgaaacgtctggtagagtctcgcagacagcagatcctgagggaattcgaggagcttcatcgccggctggacgaggagcagcaagtactccttagccgcctggaggaggaagaacaggatatcttacagcgcctgcgagaaaatgcagctcacctcggcgataaacgccgcgatttggcacacctcgcggcagaagtagagggcaagtgtttgcagagtggcttcgaaatgctcaaagatgtgaagtccactctcgagaagtgcgagaaagtgaagacaatggaagtgacatcagtcagcattgagttggaaaagaacttttcaaatttccctaggcagtactttgcccttcggaagattctgaaacaacttattgccgacgttactttagacccagaaaccgcccaccccaacctcgtcctgtctgaagatagaaagagcgtaaagtttgtggagactagactccgagacctgcctgataccccccgccgcttcaccttttacccctgtgtacttgccaccgagggttttacaagcggccgacattactgggaggtggaggtcggcgataaaacgcattgggctgtgggggtgtgccgggattctgtctctcgaaagggagagctaactcccctgcccgagacaggttactggagggtgaggctttggaatggagacaagtatgccgcaaccaccaccccgtttactcccctgcatataaaggtgaaacctaaaagggttgggatctttcttgactatgaggccggcacactgtctttctacaacgtcacagaccggtcccatatctataccttcactgacactttcacagagaagctttggcctttgttctatcctggcatccgggccggaaggaaaaacgccgcccccctgacaatccggcctccaactgactgggaatag

SEQ ID NO: 247754 - DNA, 1467 bp, Artificial Sequence
  derived and/or modified sequence
atggccgagaccagcctgctggaggccggcgccagcgccgccagcacagccgcagcccttgagaaccttcaggtcgaggcaagctgctcagtgtgcctcgagtaccttaaagaaccagtgattatcgaatgtggccataatttttgtaaggcctgtattacaagatggtgggaagacctagagagagacttcccgtgccctgtgtgcaggaaaacctctagataccgctcacttaggccaaatcgccagttaggttctatggtggagatagcaaagcagctgcaggctgtgaagcgtaaaatcagggacgagtccctctgtccccagcaccacgaggctttgtccctcttctgctacgaggaccaggaagcagtttgtctgatctgcgccatctcccacacacatcgggcccatactgtagtgccactcgatgacgccactcaggagtacaaggagaaactgcagaagtgccttgagccgttagaacagaaattgcaggaaatcacacgctgtaagagttctgaggagaagaagccgggtgagctcaaaaggttagtcgagtcccgacgccaacagatcctgagagagttcgaggagttacaccggagactagatgaggagcaacaggtgctgctgtcccgtctcgaggaggaagagcaggacatcttgcaaaggttgagggagaacgccgcgcacctgggggacaaaagacgtgatcttgcgcacttggctgccgaggtggagggcaagtgcttgcagtcgggcttcgaaatgcttaaggacgtgaagtctactttggagaaatgcgagaaggttaaaactatggaagtgacgagcgtaagcattgaattagagaagaacttttcaaacttcccccgccaatattttgcactgcgcaagattctcaaacagcttatcgctgacgtcactctggacccggaaacagctcatccgaacttggtgctgagcgaagaccgcaaatccgtcaagttcgtggaaaccagactgcgggaccttcccgacacaccgaggagattcaccttttatccctgtgttctggctaccgaaggatttacttctggacggcactattgggaggtcgaagttggagataaaactcattgggctgtaggggtgtgcagagatagtgtcagccggaagggtgagctgaccccactcccagagactggatactggagagtgcggctgtggaatggcgacaaatatgcggcaacaaccaccccattcacacccctgcacattaaggtgaaacccaaacgcgtgggcattttcctggattatgaagccggcacactctccttttacaatgtcaccgacagaagtcacatttacaccttcacggacacttttacggagaaattatggccactcttctaccctggcattcgcgctggcagaaaaaacgctgctcccttgacaatcagaccacctaccgactgggagtag

SEQ ID NO: 247755 - DNA, 435 bp, Artificial Sequence
  derived and/or modified sequence
atggccgagaccagcctgctggaggccggcgccagcgccgccagcacagcggcagcgctggaaaacctacaggtcgaggcctcctgttccgtgtgcctggaataccttaaagaacccgtaatcattgagtgcgggcacaatttctgtaaggcgtgcatcactcggtggtgggaggacttggaacgggacttcccgtgccctgtgtgtagaaagacttcgcggtaccggagcctgagaccaaatagacagcttggctctatggtagaaatcgcgaagcaacttcaagccgtgaaacgcaagatacgcgacgaaagtttatgccctcagcatcacgaagccctgtcgctgttttgctacgaagatcaggaggccgtgtgtctcatttgtgcaatctctcatacacaccgtgcacacaccgtggtgcctctcgattag

SEQ ID NO: 247756 - DNA, 435 bp, Artificial Sequence
  derived and/or modified sequence
atggccgagaccagcctgctggaggccggcgccagcgccgccagcactgccgcagccctcgaaaacctgcaggttgaggccagctgcagcgtgtgcctggagtacctaaaagagccagtaatcatcgaatgcggccataatttttgcaaagcctgcattacgcggtggtgggaggatctagagcgggacttcccctgccccgtgtgtaggaagacgtcacggtataggagtctaagacctaacagacaactggggtctatggtggaaatcgccaaacagctgcaagccgtgaaaagaaaaattcgcgacgagagcctctgccctcaacaccacgaggccctgagccttttctgctatgaagatcaggaagctgtatgtctgatttgtgcaatcagtcatacccaccgggctcacacggtcgtcccactggactag

SEQ ID NO: 247757 - DNA, 684 bp, Artificial Sequence
  derived and/or modified sequence
tgaaccagccggtaccggagcctgcggcccaaccggcagctgggcagcatggtggaaatagctaaacagcttcaggccgtgaagcgcaagatcagggatgagtcactgtgcccacagcatcacgaagctctgagcctgttttgttacgaggatcaggaagcagtttgcctgatttgcgctatttcacatacacacagggctcatactgtggtgccacttgatgatgctacacaagaatacaaagagaagctacagaagtgcctagagcccctggagcagaagctccaggaaataacacgctgcaaatctagcgaagagaagaagccaggggagctcaagagactagtcgagagccgccgccagcaaattcttcgcgagtttgaagaactgcatagacgcctggatgaggagcagcaggtcctgttatcgcggctcgaagaggaagaacaggacattctgcagagacttcgcgagaatgcagctcacttgggggacaaacgtcgggatctggctcacctcgcagcagaagtggagggtaaatgtctccagtcagggttcgagatgctcaaagacgtgaagtccacactcgagaagtgcgagaaagtcaagaccatggaagtgacatctactaccccttgcacatctctgcattctgaaattaatgataatgtccgtggacggtag

SEQ ID NO: 247758 - DNA, 147 bp, Artificial Sequence
  derived and/or modified sequence
atggccgagaccagcctgctggaggccggcgccagcgccgccagcacggcggctgcactcgagaatctgcaggttgaagcctcttgttccgtgtgcttggaatatttgaaagagcctgtgattatcgagtgcggccacaacttctag

SEQ ID NO: 247759 - DNA, 435 bp, Artificial Sequence
  derived and/or modified sequence
atggccgagaccagcctgctggaggccggcgccagcgccgccagcacagccgccgcactggaaaacttacaggtcgaagcttcttgttctgtttgtctcgaatacctgaaagagcccgtgattatcgagtgtggacacaacttttgtaaagcatgcatcacaagatggtgggaagaccttgagcgggacttcccctgccctgtttgtcggaaaacctccagataccgatcactgaggcccaacagacagctgggatccatggtcgagatcgccaagcagttacaggcagtcaagaggaaaatccgggacgagagcctctgcccgcagcatcacgaggctcttagcttgttctgttatgaagatcaggaggccgtctgcttgatctgcgccattagccacactcaccgtgcacatactgttgtgccactcgactag

SEQ ID NO: 247760 - DNA, 1467 bp, Artificial Sequence
  derived and/or modified sequence
atggccgagaccagcctgctggaggccggcgccagcgccgccagcactgctgctgctctggaaaacctgcaggttgaagcttcgtgttctgtctgcctcgagtacctgaaagaacctgtgatcatcgagtgcggccataatttctgtaaagcttgtattacaaggtggtgggaggacctcgaacgcgattttccgtgccctgtgtgtaggaagacctccagatataggtccctccggccaaatagacagcttggctcgatggtcgaaattgccaagcaactccaggctgtcaaacgcaaaataagagatgagtctctgtgtccacaacaccacgaggcactgagtctcttctgttatgaagatcaggaggccgtctgcctgatctgcgctatttcacatactcatcgggcacacacagtagtccccctagacgacgccacccaggagtacaaggagaaattgcagaaatgcctcgagcctcttgaacaaaagcttcaggaaataacacggtgcaaatcatccgaagaaaagaagccaggtgagttaaagcgtctggtcgaatcgcgtcgacagcagatactccgagagtttgaagaactgcatagaagactggacgaagagcaacaggtgctgctgagtagactggaagaagaagagcaggacattctgcagcgcctgagagaaaatgctgctcacttaggcgataagcgccgcgacctagcgcacttggcagccgaggtggaggggaagtgcctgcaatctggctttgagatgctgaaggatgtgaaatccacccttgaaaagtgcgaaaaggtgaagactatggaagttacatcagtgagtattgaacttgagaaaaacttttccaacttcccccgacagtactttgctctgagaaaaattctcaagcagttaattgcagacgttacacttgatccggaaactgcccaccctaacctcgtgctgagtgaggatcgaaagtccgtcaagttcgtggagacccgactgcgggacctgcccgacacaccaaggaggttcacattttatccctgtgttctagccacggaaggtttcactagcgggcgccattattgggaggtcgaggtgggggacaaaacacattgggcggttggcgtgtgccgtgattccgtcagccgcaaaggcgagttaactccattgccagagaccgggtactggcgtgttagattatggaacggtgacaagtatgccgcaactactaccccttttacaccactgcacatcaaagtgaagcccaagagggtagggatcttcctcgattatgaagcagggacactgagcttctacaatgtgaccgacagaagtcacatatacacatttactgacaccttcaccgagaagttgtggcccctgttttacccgggtatccgggctgggcgaaagaacgcagctcctctgaccatccgccccccaacagactgggagtag

SEQ ID NO: 247761 - DNA, 1467 bp, Artificial Sequence
  derived and/or modified sequence
atggccgagaccagcctgctggaggccggcgccagcgccgccagcaccgccgctgctttagaaaatcttcaagttgaggcctcatgctccgtgtgtctggagtatctgaaggaaccggtgatcattgagtgtggccataatttttgtaaggcatgtatcacccgctggtgggaggacctcgaaagggacttcccttgccctgtgtgcaggaagacatctaggtatcggtccttgcgaccaaaccgacagctcggatctatggtggaaatagccaagcagctgcaagcagtgaagaggaagataagggacgagtcgctgtgtccccagcatcacgaggcactgtcactcttctgctacgaggatcaagaggcggtgtgcctgatatgtgctatctcccacacccatcgtgctcatactgtggtgcctctggatgacgctacgcaggagtataaagagaagcttcaaaagtgcttggaacctctggaacagaaactgcaagaaatcaccagatgtaaatcaagcgaagaaaaaaaacctggggagctgaagagactggtggagtctaggagacagcagatcctgcgggagttcgaagaacttcataggcgcctggacgaagagcagcaggttcttctgagccggctcgaggaggaagagcaagacattcttcagcgtttgcgggaaaatgctgcccacctgggagataagcggcgggatctggcacacttggccgccgaggtcgagggaaaatgtcttcaaagtgggtttgaaatgttgaagccagtgttgtctgcacgcgaggagtgtgagaaggtcaaaactatggaagtgacctcagtctctattgagctcgagaagaacttcagcaactttccgagacagtacttcgctctgcgcaagatcttaaagcagctgatcgctgacgtgaccctcgatccagaaacagcccatcctaatttagtattgtctgaggaccgcaaatcagtcaaatttgtggagactagacttcgggacttaccagatacccctcggaggttcacgttttacccctgtgtgttagccacagaggggtttacatctgggagacactactgggaagtggaggtgggcgacaaaactcactgggccgtaggcgtttgccgggacagtgtgtccagaaaaggagagctcacacccctgcctgaaacaggatactggagagttagattgtggaacggcgataagtatgccgccactacaactcctttcacccccctgcacataaaggttaagcccaaacgggtcggaatatttttggattacgaagccggaacactcagtttctataacgtgacggaccgttctcacatctatacttttacagatacctttactgagaagctttggcctttattctaccctgggatccgtgctggccgtaagaacgccgctccactaaccatcaggcccccaacagattgggagtag

SEQ ID NO: 247762 - DNA, 1236 bp, Artificial Sequence
  derived and/or modified sequence
atggccgagaccagcctgctggaggccggcgccagcgccgccagcacagcagccgccttagagaacctgcaggtagaggccagttgctccgtatgcctggagtacttgaaagagccagtgataatcgagtgtggtcataacttttgcaaagcttgtattacccggtggtgggaggatcttgagcgcgattttccgtgccccgtctgccggaagacatcaaggtatcgttcactacgtcctaatcgacagctgggatccatggtggaaatcgccaagcagttgcaggcagtgaagagaaaaatccgagatgagagcctgtgtccccagcaccatgaagctctgtctctgttctgttatgaggaccaggaagcagtttgtctgatttgcgccatcagccatacacatagagcccacactgtcgtccccctggacgacgctacccaggagtataaagaaaagctgcagaagtgcttggagcctttggagcagaagcttcaggaaatcacaagatgcaagagctcagaagagaaaaaacctggggagctaaaacgcctcgttgagtctcgcaggcagcaaatcttaagagagttcgaggaactgcataggagattagatgaagaacaacaggttctactgtcccgccttgaagaagaggagcaggacattctgcagcggcttcgggagaacgcagcgcacctgggagataagaggcgggatcttgcacacctcgctgccgaagtggagggaaagtgcctacagagcggatttgagatgctgaaaccagtcctctctgcccgggaggagtgcgaaaaggtcaagaccatggaagtgacatccgtatccattgaactggaaaaaaatttctctaacttccctcgtcagtattttgctctcaggaaaatcctaaaacagctcattgctgacgtgacactcgatccggagacggctcatccgaacctggtactttcagaggatcgaaagagcgtgaaatttgtcgagacaaggttacgcgatctccctgacaccccaaggcgattcaccttctatccttgtgtgctggccacagagggatttacgagtggaagacactattgggaagttgaggttggggataaaactcactgggccgtaggtgtgtgcagggactcggtctcacggaaggggggttgcggctacggtatgggaacgaacatgcagcccccccctcatttattgccactgtgcacctcaaggtag

SEQ ID NO: 247763 - DNA, 1467 bp, Artificial Sequence
  derived and/or modified sequence
atggccgagaccagcctgctggaggccggcgccagcgccgccagcaccgcggccgcccttgagaatctacaggtggaagcctcgtgcagtgtttgcctcgaataccttaaggaacctgtcattatcgaatgtggacacaacttctgtaaggcttgcattacccgatggtgggaggacctggagcgggatttcccttgccccgtgtgtcggaagaccagcagatacaggtcccttaggccgaataggcagctaggttctatggttgaaattgcaaagcagctccaagcggttaaaaggaagattcgagacgaatctttgtgtcctcagcaccacgaggcgctgagtctgttttgctacgaagaccaggaggctgtgtgtctgatttgcgctatcagccatactcatagggcgcacaccgtagtgccactggacgacgcaactcaggaatacaaagagaaactgcagaagtgtctggagcctttggagcaaaagttacaggagatcactcgctgtaaaagtagcgaagaaaaaaagcctggcgagctaaagagactggtggagagcaggagacagcagatcctgagggaattcgaagagctccaccggaggctggatgaagagcagcaggtgctgttatccagactcgaggaggaggagcaagacattctgcagcggcttagggagaacgcagcacacctcggagacaagcgaagagatctggcccacctcgcggccgaggtagaaggaaagtgcctgcagtcaggattcgaaatgctgaagcccgtgttaagcgcccgagaagagtgtgaaaaagtcaagacaatggaggtcactagtgtctccatcgagttagagaaaaatttctccaattttccccggcagtattttgctctgcgcaagatcctgaagcagctgatagcggacgttacactcgacccagaaacggcgcaccccaaccttgtcctcagtgaggatcgcaagagcgtgaaatttgtggaaactaggcttcgagacttgcctgacacccctcggcggtttacattctatccgtgcgtactggcaacagagggctttacgtccggaagacactattgggaggtggaggtcggtgacaaaacacactgggctgtcggggtctgccgggatagcgtgtcacgcaaaggagagcttaccccgctccccgaaacggggtactggcgcgtcaggctgtggaacggggataagtacgcggctactacaactccatttactcctctgcatataaaggtcaagcccaagagagtcggcattttcctagattatgaggccggcacactaagtttttacaacgtgaccgacaggagtcatatctacacatttaccgataccttcactgaaaagctttggcccctgttttatcctggcattagagccgggaggaaaaacgccgcaccactgaccattcgcccacccacagactgggaatag

SEQ ID NO: 247764 - DNA, 1467 bp, Artificial Sequence
  derived and/or modified sequence
atggccgagaccagcctgctggaggccggcgccagcgccgccagcactgctgcggcactggaaaaccttcaagtcgaagctagttgctcagtgtgtttagaataccttaaggagcccgtcataattgaatgtggacataatttttgcaaagcatgcatcacaagatggtgggaggacctcgaaagggactttccgtgcccggtctgtcgtaagacctctcgctaccgatcacttaggcctaataggcagctgggctctatggtggagatcgcaaagcagctgcaggccgtgaaaaggaaaattcgtgacgagtctctgtgtccacagcatcacgaggctctctcgctcttttgctatgaggatcaggaagcagtatgcctcatatgcgcgatctcacacactcaccgcgcgcataccgtggttcctcttgatgacgccacacaggaatataaagagaagctccaaaagtgtttagagcctcttgagcagaagctccaggagataaccagatgcaaatccagcgaggaaaaaaagccaggagaactaaagagactggtggagagtcgaaggcagcaaatactcagagagtttgaggaacttcaccgcaggctcgacgaggagcagcaggtactcctctcacggcttgaagaagaagagcaagatatcctgcaaagactgagggaaaatgccgcacacctgggcgacaagcgtagagacttagcacacctggctgctgaggtggaaggaaaatgcctgcagagcggatttgaaatgttaaagccagtcctgtcggcccgcgaggaatgtgaaaaggtgaaaactatggaggtgactagtgtcagcattgaactcgaaaagaacttttcaaacttcccccgtcagtattttgctttgcggaaaatccttaaacaattgattgcggacgtgactctcgatcctgagacagctcacccaaatctggtactctccgaggaccgaaagtcagtcaaattcgttgagacccggttgcgggatctgccggatacacccagacgttttactttctatccatgcgtactcgcgacagaggggtttaccagtggacgtcactactgggaggtcgaggtcggggataaaactcattgggcagtgggggtctgtcgagattctgtgagccgaaagggagagttaaccccgctgcctgagacaggatactggcgggtccgcctttggaatggcgacaaatacgccgccactacgactccttttaccccactgcacatcaaggtgaagcctaagcgggttggaatcttcttggactacgaggcaggcacgctctcattctacaatgtgactgaccggtcccacatctacaccttcacagatactttcactgaaaagctctggcccctcttctatcccggaattcgtgccgggaggaagaatgcagcccctctgactatcagacctcctaccgattgggaatag

SEQ ID NO: 247765 - DNA, 1467 bp, Artificial Sequence
  derived and/or modified sequence
atggccgagaccagcctgctggaggccggcgccagcgccgccagcaccgcagccgcactggagaacctccaggtcgaggccagttgttcagtgtgcttggaatatctgaaggagccagtcatcattgagtgtggccacaacttttgcaaggcctgcataacacggtggtgggaggatctggaacgtgacttcccctgccctgtgtgccggaaaacatcgcgctatcggagtttgcgcccaaacaggcagctggggtcaatggtcgaaatcgcaaagcagctgcaggcagtgaagaggaaaattcgagatgagagcttgtgcccccaacaccacgaagctctgagcctgttctgttatgaggaccaggaagccgtgtgcctaatttgtgccatcagccacacacaccgggcacacacagtggtacccctggatgacgccacacaggagtacaaggagaagctccagaaatgcctggaacctcttgaacagaaactgcaggagatcacccggtgtaaaagctcagaggagaagaagccgggggaactgaaacggctcgtggaatctaggcgccaacaaattttacgtgaatttgaggaactgcaccgcagactggatgaagaacaacaggttcttctctctaggctggaagaagaggagcaggatattctgcagagattgcgcgaaaacgcggcacatctgggcgataagaggcgagacctggctcacctcgctgccgaggtcgaaggcaaatgtctgcagagcgggttcgagatgctcaaacctgtgctgtccgctcgagaagagtgtgaaaaagtgaagaccatggaggtgacatccgtgtccattgaactcgagaaaaacttctccaacttccctcgacagtatttcgctctccgtaagattctgaagcagcttattgcagacgtgactttggacccagaaaccgcccaccccaacctcgttttgtcagaggatagaaaaagtgtcaagttcgtggagacccggttgagggatctgcctgacacaccacgccggtttaccttttatccttgcgtgctcgcgactgaaggctttacaagcgggcgccactattgggaggttgaagtcggagataagacacactgggctgtcggtgtttgtagggacagtgtgagcagaaaaggcgagttaacaccccttccagagacggggtattggagggtcaggctctggaacggagacaaatacgctgccaccaccacacctttcacccccctgcacattaaggtgaagcctaagagggtcggtattttccttgactatgaggctggaacactgagcttctataacgtgaccgaccgcagccacatctatacttttacagacacgttcacggaaaagctgtggccactattctatcctggcatccgggcgggccgaaaaaacgctgcccccctcaccattcgcccacctactgattgggagtag

SEQ ID NO: 247766 - DNA, 1467 bp, Artificial Sequence
  derived and/or modified sequence
atggccgagaccagcctgctggaggccggcgccagcgccgccagcactgctgccgcgttagaaaatttgcaggtcgaagcatcttgttcagtgtgtttagagtatctcaaagaacccgtgatcatcgagtgcgggcataatttctgcaaagcatgcattaccagatggtgggaggatctcgagagagattttccttgtcctgtctgccgaaagaccagtagataccgcagcttgcgacctaaccggcaacttggctctatggtggagatcgccaagcagcttcaggccgttaagaggaaaatcagggacgaatccttgtgcccccaacaccacgaagccctgtccctgttttgttatgaggatcaggaggctgtctgcctgatctgtgcgatatcacatactcatagagcgcacaccgttgttcccctagacgatgctacacaggagtacaaggagaagctgcagaagtgccttgagcccctggaacagaaattacaggagattacgagatgcaagtcttctgaagagaaaaaaccaggcgaactcaagcgactggtggagtcccggcgccagcaaatactgcgggagtttgaggagttgcataggaggcttgatgaggagcagcaggtcctgctgtctcgccttgaagaagaggagcaagacattctgcagcgattgcgagagaatgccgcgcacctcggagataaacgcagagacttagcgcacttggcggcagaagtcgaggggaagtgcttgcagtctggttttgaaatgcttaaaccagtgttgtcagctcgggaagagtgcgaaaaagttaaaacaatggaggtcacgtctgtgagcatcgaactggaaaagaacttttctaatttccctaggcagtacttcgcgctcaggaaaatcctgaagcaactcattgccgatgtcaccctggatcccgagacggcccatcctaatcttgtgctgtcagaagacagaaaatccgtgaagttcgtggagactcggctgagagacttgcctgatacaccacgccggttcaccttctacccctgtgtcctggccacagaaggctttacttcaggcagacattactgggaggtcgaggtcggtgataagactcattgggcagtgggggtgtgtcgggattccgtaagcaggaagggagagctcacacctctccccgaaacgggttactggcgagtgcggctgtggaacggggacaagtacgccgctaccaccacaccatttaccccacttcacataaaggtcaagccaaagagggtcggtatatttctcgactacgaagcaggtacgctttccttctataacgtgaccgacagatcccacatttacacattcacagatacttttacggagaagctttggccattgttctaccccggcattcgcgctggccggaagaacgctgccccgctcacaatcaggcctcccaccgactgggagtag

SEQ ID NO: 247767 - DNA, 1236 bp, Artificial Sequence
  derived and/or modified sequence
atggccgagaccagcctgctggaggccggcgccagcgccgccagcacagctgccgccctggagaacctccaggttgaggccagttgctccgtctgtctcgaatacttgaaggagccggtgattatagaatgtggccacaatttttgcaaggcttgtatcacccgctggtgggaggacctggaacgcgactttccttgccctgtatgtagaaagacgtccaggtaccgatccctccggccgaatcgacagcttggatccatggtagaaattgccaagcagttacaggctgtcaagagaaagatccgcgatgagtctttgtgtccccaacatcatgaagccctgtctctcttttgctacgaagatcaagaagccgtgtgtctgatatgtgcaatctcacacacgcatagggctcatactgttgtgccactcgatgatgccacgcaggagtataaggagaagctgcaaaaatgtcttgagcccctggagcagaaactgcaggagataacgcgatgtaagtcaagtgaagaaaaaaaaccaggggaactgaagcgcctggtcgaaagcagacgccagcagattcttcgggagttcgaagagctgcaccggcgcctggatgaggagcagcaggtactgctgtctaggctcgaggaagaggagcaggatatactgcaaaggctgcgggaaaatgcagctcacctcggagataaacgtcgcgaccttgcccacctcgctgcagaagtcgaaggcaagtgtctccagtctggattcgagatgctgaagccagtcctgtccgcccgcgaggaatgtgagaaggtgaaaactatggaggtcacaagcgtctctattgagctggagaagaactttagcaacttccctagacagtacttcgcactcaggaagatcctgaagcagttaatcgcggacgtaaccctcgatccggagacggctcatccaaatcttgtgctaagtgaggatcgcaagtctgtcaaattcgtagagacacgccttagggacctacctgataccccacgcagatttaccttctacccctgcgttctcgcaacagaaggcttcacgtcaggccgccactattgggaggtcgaggtgggcgataagacacactgggctgtgggagtctgcagagattccgtcagccgtaagggagggtgtgggtatgggatgggcactaacatgcagccccctccacacctcctccctctatgtacctctcggtag

SEQ ID NO: 247768 - DNA, 1236 bp, Artificial Sequence
  derived and/or modified sequence
atggccgagaccagcctgctggaggccggcgccagcgccgccagcacagccgccgctctggaaaatcttcaggtggaagcctcatgcagcgtttgtcttgagtacctgaaggagccagtgatcattgaatgtggtcacaacttctgcaaggcttgtatcacccgatggtgggaggacctcgagagagacttcccctgccccgtctgcagaaagacctcccgatatcggagcctgaggccaaacagacagctgggtagtatggtagaaatcgcaaagcagctccaggccgtcaaacgcaaaattagagacgagtcactttgccctcaacaccatgaggcattaagcctgttttgctacgaggatcaagaggctgtctgcctgatctgcgccatctcgcacacacaccgggcacacaccgttgtgcctctggatgacgcgacgcaggagtacaaggaaaagctgcaaaagtgcctggagcccttggaacagaaactccaggagatcacacggtgtaaatcgagtgaggagaagaagcccggagaattgaagaggttggtcgaaagtagaaggcaacagatactcagagagttcgaggaactccatcggaggctggatgaggagcagcaggttttgctgtccagacttgaagaggaggagcaagatatcctgcagcgcctgagggagaacgctgctcatctaggtgataagcggcgggatctcgcacacctggccgccgaggtcgaaggcaaatgcctgcagtccggttttgagatgctcaaaccagtgctaagcgcgcgagaagaatgcgagaaagtaaaaacaatggaagtgacatctgtaagcattgaacttgagaaaaactttagtaactttcctcgccagtacttcgcccttcgaaagatactgaaacagctcattgcagatgtgaccctagatcctgagaccgctcaccctaatctggtcttatccgaggatcggaagtcagttaagtttgttgaaacccgtctgcgagaccttccggacacgccacgccgattcacattttacccttgcgtgctggcgaccgaggggttcacatcagggcggcattattgggaggtggaggtaggagataaaacccactgggcagtcggagtttgtcgggactctgtgagcaggaaaggcggatgtggctacggcatggggaccaacatgcagccaccgccgcatctgctgcctttgtgcaccagcaggtag

SEQ ID NO: 247769 - DNA, 1236 bp, Artificial Sequence
  derived and/or modified sequence
atggccgagaccagcctgctggaggccggcgccagcgccgccagcacagcagcagccctcgagaatcttcaggtggaggcttcatgctctgtgtgcttggagtatcttaaggagccagtgatcatagagtgcggtcacaacttctgtaaggcttgcatcacacgttggtgggaggatcttgaacgcgatttcccttgcccggtgtgccgcaagacttcacggtataggtccctccggccaaaccgccagctgggttcaatggtggaaattgcaaagcaacttcaggctgttaagcgcaaaattcgcgatgaatccttatgccctcagcatcacgaggctctgtcactgttctgctacgaagaccaggaggcggtctgtttgatttgcgccatttcacacactcaccgggctcacaccgtcgtcccattagatgatgctactcaagagtacaaggagaaactacagaaatgtctggagcctctcgagcagaagctgcaggaaatcactcgatgtaagtcttccgaggaaaaaaaaccaggagagctgaaaaggctggtggagagcagacgccagcagatattgcgagagttcgaagagctgcacagacgactcgacgaggagcaacaagtactactgtcaaggttggaagaggaagagcaagatatacttcaacggctcagagaaaacgcggcccatttgggagataagcggagagatttagcccatctggctgcagaggttgaggggaaatgtttgcagagcggcttcgagatgctcaagcctgtgctgtcagccagagaagaatgtgaaaaggttaagactatggaggtgaccagcgtgagcattgaactggagaagaattttagcaatttcccaagacaatattttgccttgaggaaaatcttgaagcagctgattgctgatgtgacacttgaccctgaaaccgcccacccaaacctcgtcctgtctgaggatcgcaaatccgtgaagtttgtggaaacgaggctgcgcgaccttccagacacacccaggcgttttacattctacccttgtgtcctcgccaccgagggttttactagcgggcgacactactgggaggtggaggtaggggataaaacccactgggccgtgggcgtgtgccgagacagcgtgagccgaaagggaggttgtggctacggaatgggtaccaacatgcaaccacccccccatctccttccactgtgcacctcgagatag

SEQ ID NO: 247770 - DNA, 1236 bp, Artificial Sequence
  derived and/or modified sequence
atggccgagaccagcctgctggaggccggcgccagcgccgccagcactgctgctgcgctggaaaacctgcaagtcgaggcctcatgttcagtttgtttggaatatctgaaagaaccagtgatcattgagtgcggccataacttctgtaaggcatgcatcacgcggtggtgggaggatctcgaacgtgattttccatgccccgtctgcagaaagacttctcgctatcgctcgcttagacccaatcggcagcttgggtctatggtagaaatcgcaaaacagctgcaggccgtgaaacgtaagatcagggatgagtctttatgtcctcagcaccacgaggccctgagtcttttctgttacgaggaccaggaggccgtctgtctcatctgcgcgatctcccatacccacagagctcacactgtagtgccgctagatgacgcaacccaagaatacaaggaaaaattgcagaagtgcctggagcctctagagcaaaagcttcaggaaataacccgctgtaagtcctctgaggaaaagaagcccggggagctcaaacgacttgtggagagcaggcggcaacaaattttacgcgagtttgaggaactgcatagacgccttgatgaggagcagcaggtcctgctgagtaggctggaggaggaggaacaggacatactccaacgcctgagggagaacgccgcccacctgggagataaaaggcgcgacctggcccatttggccgctgaggtagaaggaaaatgcctacagtccggttttgagatgttgaaacccgtgctgtccgcacgcgaggagtgtgaaaaggttaagaccatggaagtgacgagcgtgtctattgagttagagaagaacttttccaatttcccaaggcagtacttcgccctgagaaagatccttaagcagctcatcgcagacgtcacactggatcctgagacagctcaccccaacctcgttctcagtgaggataggaagtctgtaaagttcgtggagacacgcttgcgcgatcttcctgatactccccgacggtttacattctatccttgcgtgctggcaactgagggcttcactagtggcagacactactgggaagtggaagttggggataaaacgcattgggccgtgggagtgtgcagagatagcgtgtccagaaaggggggttgtggctacggaatgggaacgaacatgcagccccctccacacctgttgcctctgtgcacatctcgctag

SEQ ID NO: 247771 - DNA, 1236 bp, Artificial Sequence
  derived and/or modified sequence
atggccgagaccagcctgctggaggccggcgccagcgccgccagcacagctgctgcactggaaaatttgcaggtggaggcgagttgctcggtttgcctagagtatctcaaagagcccgtcataatagagtgcggacacaacttttgcaaggcatgcatcaccaggtggtgggaggatctcgaacgggactttccatgccccgtctgccgtaaaactagtcgatatagaagtctacgacccaacagacagcttggttcaatggtggaaattgccaaacagctgcaggccgtgaaaaggaaaatccgtgatgagtccctgtgtccacagcatcatgaagctctgtccttgttttgttacgaagatcaggaggccgtttgcctcatttgtgccatcagccacacccacagggcgcataccgtggtcccactagatgacgcgacacaggaatacaaagagaagctgcaaaaatgcctcgagcccctggaacagaagctgcaggagataaccagatgtaagtctagtgaggagaaaaaacccggagagcttaagaggctggtcgagtcacggcggcagcagattctgcgagagttcgaggagctccacaggcgcctggacgaagaacagcaggtgctgctctccagactggaagaggaggagcaggatatccttcaaagacttcgggagaacgctgcacatctgggggataagcgccgggaccttgctcatctggctgctgaagttgaagggaagtgtctgcagtccggtttcgagatgttgaagcctgtgctgtccgccagggaggagtgcgaaaaggtgaaaactatggaggttacttctgtttccattgaattggagaaaaatttttctaactttccaaggcagtactttgcattgagaaaaattctgaagcaattgattgccgatgttactctcgatcctgaaactgcccatcccaacctcgtgctgagtgaagaccgcaaaagcgtaaaattcgtggagaccaggttgcgcgatctacccgacacaccacggagattcaccttctacccctgcgtcctagctacggaggggtttactagcggcaggcattactgggaggtcgaagtaggtgacaaaactcattgggcagtcggagtgtgtagagacagcgtgtcacgaaaaggcggatgcggctacggaatgggcacaaacatgcagccacccccacacctgcttccgctgtgtacatctaggtag

SEQ ID NO: 247772 - DNA, 1467 bp, Artificial Sequence
  derived and/or modified sequence
atggccgagaccagcctgctggaggccggcgccagcgccgccagcactgccgcagctctggagaacttacaggttgaagccagctgctccgtctgcctggagtatctcaaagaacccgttattattgaatgtgggcacaacttttgtaaggcctgtattactaggtggtgggaagatctggaaagggacttcccctgtccagtgtgtcgaaagacaagcagataccgctccctccgacctaatagacagttgggctccatggtcgagattgctaaacagttgcaagctgtcaagaggaaaataagagacgaatctctctgccctcagcaccacgaggccttgtcgcttttctgctacgaagatcaggaggccgtgtgcctaatttgtgccattagccatacacatcgggcccatacggtcgtgcctcttgacgacgccacccaggagtataaggaaaaactgcagaagtgcctggagcctttggagcagaaactgcaggaaatcacaagatgtaaaagctcagaggagaaaaagccaggcgagcttaaacggctagttgagtctagaaggcagcagatcctgagagaatttgaagagctccatcgccgtctcgacgaggaacaacaggtgctcctgtctcggctggaggaagaagaacaggacattctccagagactgagagagaatgctgctcacttgggtgacaagcgcagggacctcgcccatcttgcagctgaggtggaaggaaaatgtctgcaatccggctttgagatgttgaaaccggtcctctccgcccgcgaggagtgcgagaaggtgaaaaccatggaggtgactagtgtgtcaatagagctggaaaagaacttcagcaactttccccgccaatatttcgccctgcgcaagatcttaaaacaactcattgccgacgtgacgcttgacccagagacggcgcaccctaatctggttctgtcagaagatcggaaatcagttaagttcgtggagaccaggctgagagacctgcctgataccccgcggagattcacattctatccgtgcgtcttggctacagaggggtttacctcaggacgacactattgggaggtggaggtgggggacaagacacactgggctgtcggtgtgtgtagagattctgtgtcaaggaagggagaactcacacccctaccggagactgggtattggagagtccgtctatggaatggcgataagtatgctgccaccacaaccccttttacaccgctgcacatcaaagttaagccaaagagagtagggatcttcctagactatgaggccgggacattgagtttttacaacgtgactgacagatcacatatatatacattcaccgacacattcacagaaaaactgtggcctcttttttaccctggtatccgagctgggcgaaaaaacgctgctccactgacgattaggcctccaaccgattgggagtag

SEQ ID NO: 247773 - DNA, 1467 bp, Artificial Sequence
  derived and/or modified sequence
atggccgagaccagcctgctggaggccggcgccagcgccgccagcacggctgccgctctggaaaacctacaggtcgaagcaagctgtagtgtttgcctggagtacttaaaagagcccgtcatcattgaatgcgggcacaacttctgtaaagcttgcataacccggtggtgggaggacctggaacgggattttccttgtcccgtgtgccgcaagacctcccggtaccgctcgttgcgccctaacagacagctgggttctatggtggaaatcgctaaacaattgcaggccgttaagcgaaagatccgcgacgaaagtctctgtccccagcaccacgaggccctgtccctcttttgttatgaggaccaggaagctgtctgcctgatctgcgcaatttcacacactcatagagctcataccgtagtgccactggatgatgccacgcaggaatataaggagaagctgcaaaaatgtctggagcctcttgagcagaagctccaagagattacccgatgtaagtcctcagaggagaaaaagccaggtgagctgaagcgcctagttgagagccgccgtcaacagattttaagagagttcgaggaactgcataggaggctggatgaagaacagcaagtgctcctctcccggctggaggaagaggagcaagatatcctccaacggctgcgagagaatgccgcgcacttgggtgataagaggcgagatctggcccatttggccgctgaagttgaaggcaaatgtctccaatcgggctttgaaatgctgaagcctgtgctgtcggcaagggaggaatgtgagaaagtgaaaacgatggaagttaccagcgtgtcgatcgagttggagaagaatttctctaactttccacgccagtattttgcattacgcaaaattctcaaacagctgattgctgacgtgaccctggatcctgaaacggcacatccaaatcttgttctcagcgaagaccggaaatcagtaaagtttgttgagacgcggctcagggatctgcccgacacaccgaggcgtttcactttctatccgtgcgtgttggccacagaaggatttacctcaggtagacactattgggaagtggaggtaggggacaagactcactgggccgtgggggtgtgcagggattccgtctcgcgaaagggggagctgacacctctgccagaaacgggctattggcgggtgaggctttggaatggggataagtacgccgctacgactaccccattcacccccctgcacatcaaagttaagccgaagagagttggcattttccttgactacgaggctgggacgcttagtttttacaatgtgaccgacaggtctcacatttatacattcacagatacattcacagaaaagctgtggcccctgttctaccctgggattagagccggtcgtaagaacgcagcccctctgacgatccgtccaccaacagactgggagtag

SEQ ID NO: 247774 - DNA, 1467 bp, Artificial Sequence
  derived and/or modified sequence
atggccgaaacgagtttgctcgaggcgggagcctcagccgcaagcacagccgcagcccttgagaaccttcaggttgaagcatcctgttctgtctgtcttgaatacctcaaagaacccgtgattatagagtgtggccacaacttttgtaaagcatgtatcacaaggtggtgggaagacctcgaaagggatttcccctgtcccgtgtgccgtaagacaagtaggtaccggtctttgcgccctaataggcaactgggctcaatggtcgagatagccaaacagcttcaggccgtcaagcgaaaaattcgggatgaatctctgtgccctcagcaccacgaggctttaagcttattttgctatgaggatcaggaggccgtttgtctcatctgtgccatttctcacacacatcgcgcacatacggtggtaccgttagacgacgcaacacaggaatacaaggaaaagcttcagaaatgtttggaacccctggaacagaaactgcaggaaatcacacgctgcaaaagtagtgaagaaaaaaagcctggcgagcttaagcggctggttgagtcacggagacaacagattctccgagaatttgaggagctgcaccgtcgactggacgaagaacaacaggttttgctttctcgactggaagaggaagagcaggatatcctacagaggctgagggagaatgccgcacatcttggcgacaagcggcgagatcttgcccacctcgctgccgaggtggaggggaaatgcctgcagagcggatttgaaatgctgaaagacgtgaaatcaaccctggaaaagtgcgaaaaagtgaagacaatggaggtgacatcagtgtccattgagcttgaaaagaactttagtaatttcccaaggcagtacttcgcattaaggaaaattctgaagcaactcatagctgacgtcacattagatcccgaaacggcacacccgaacctggttctaagcgaggacaggaagagtgttaaattcgtggagacacgcctcagagatctgccggataccccgaggcggttcacattttacccatgtgtgctggccacggaaggcttcactagcggtcgccattattgggaggtcgaggttggggacaaaacacactgggctgtaggcgtctgtagagattccgtgtctagaaaaggcgagctgacaccactccctgaaaccggctattggagggtccggctgtggaacggggataaatatgcagcgaccacaaccccattcacaccactacacatcaaagtaaagccaaaacgcgtgggtatttttctggactatgaggccggtaccttaagtttctataatgtgacagatcgatcccacatctatacttttactgatacctttactgaaaaactctggccactcttttaccctggtatcagggcaggcagaaaaaatgccgcacctctgaccatacggcctcctaccgattgggaatag

SEQ ID NO: 247775 - DNA, 1467 bp, Artificial Sequence
  derived and/or modified sequence
atggctgaaacctctttactcgaggcaggagcctccgctgcctcaactgcagctgcactggagaacctccaggtggaggcctcgtgttccgtgtgccttgagtacctgaaagaacccgtgatcatcgaatgtgggcacaacttctgcaaggcttgtatcactagatggtgggaggacctggaacgtgacttcccctgcccagtctgtaggaaaacttccagatatagatcactgcgaccaaaccgacagctgggatcaatggttgagatcgcaaaacagctccaggccgtgaagcgcaaaatccgggacgagagtttatgtccacagcaccatgaagctttatctctgttttgctatgaggatcaggaggcagtttgcttaatttgcgcaatcagccatacacacagggcccacactgttgtacccctggacgatgccactcaggagtataaagaaaaactgcaaaaatgtttggagcccctggaacaaaagttgcaggagataacccggtgtaagtcaagtgaggagaagaagccgggagaactcaagcgattagtggagagcagaaggcagcagattcttagggagttcgaagagctgcatagaaggctggatgaagaacagcaggtcctcttatcccgactagaagaagaggagcaagacatcctccagcgtctacgggagaacgctgcacacctgggggacaagcgccgtgacctggcacatctggcagcggaggtggagggcaagtgtttgcaaagcggattcgagatgctgaaggacgtaaagtcaactctcgaaaagtgtgagaaagtaaagacaatggaggtcacctcagtatccatagagctggagaagaacttctcgaacttccccagacagtattttgcactccgcaagattcttaagcagctgatcgcagatgtgaccctcgaccctgaaaccgcccatccgaatctcgttctgtctgaggaccgaaaatctgtcaagtttgtcgaaacgcgtctgcgcgacctgcccgacaccccaaggcgattcactttctacccatgcgtgttagccacagaggggttcacgtctgggcgacactattgggaagttgaggtgggcgacaaaacccactgggctgtgggtgtgtgccgcgattccgtgagcaggaaaggcgaactgacacccctcccagagaccggctactggcgagtgagattgtggaacggcgataaatatgccgcaactactacgccatttacacccctgcatattaaagtgaaaccaaagagggtgggaatttttctggattatgaagctggtacactctcattttacaatgtcacggatagaagccatatttacacctttactgacacttttaccgagaagctctggccacttttctatcccggaatcagggccggaaggaaaaacgcagcaccactaaccatcaggcctcctacggattgggagtag

SEQ ID NO: 247776 - DNA, 1467 bp, Artificial Sequence
  derived and/or modified sequence
atggcagaaacatcactcctggaagctggggcatccgcagcctccaccgctgctgctctcgaaaatctgcaagtcgaagctagttgctccgtttgtttagaatacctgaaggaaccggttataatcgagtgtgggcataatttttgtaaagcctgcatcactcgttggtgggaggacctcgagagggatttcccttgtcctgtgtgtcgcaagaccagccggtatagatccctgcggccaaacaggcaactggggagtatggtcgagatcgcaaagcagctccaggccgttaaacggaagataagagatgagtctctttgtccacagcaccacgaggccctttccttgttctgttatgaggaccaggaggcagtatgcttgatctgtgcaatctcacacactcacagggcccacacggtcgtccccctcgacgacgccacccaggaatacaaggaaaagctgcagaaatgtctggagccactggagcagaagttgcaggagattacccggtgtaagtcatctgaggaaaaaaagccaggtgaactgaagagactggtggagtctcggcgtcagcagatcctgcgagagtttgaggaactgcaccggcgactggatgaggagcaacaggtcctgttatctaggctggaggaggaagaacaagacatcctgcagaggctgcgcgagaacgccgcacacctgggggacaaacgcagggatttagcccacttggccgcagaggttgaaggcaaatgtttacagtccggttttgaaatgctgaaagatgtcaaaagcacactcgagaaatgtgagaaggtgaaaaccatggaagtaacatccgtatctatcgagctggaaaagaacttcagcaattttcctaggcagtattttgcactgcgcaagattcttaagcaactcatcgccgatgtgacgctggatcccgagacagcacatccaaatttggtgctgagcgaagacagaaagtccgtgaagttcgtagaaaccaggctgagagacctgccagacaccccaaggaggtttaccttctatccctgcgtgcttgcgaccgagggattcacaagtggacggcattattgggaggtcgaggtgggtgacaaaacacattgggcagtgggagtgtgtcgagatagcgtctccaggaaaggggagctgaccccgcttcctgagactggctactggcgtgttaggctgtggaatggcgataagtatgccgctacaactaccccttttactcctctccacataaaggttaagccaaagagggtggggattttcctcgactacgaagccggtaccttgagcttttacaacgttaccgatcgatctcatatttacacattcaccgacacattcacagaaaaactgtggcctttattctatccagggatccgggcaggtaggaagaacgccgctcccttgactattcggcctcccacagactgggagtag

SEQ ID NO: 247777 - DNA, 1467 bp, Artificial Sequence
  derived and/or modified sequence
atggcagagacatcactcctggaagctggcgctagcgccgctagtacagcagccgctctggagaacctgcaggtggaagcctcttgcagcgtgtgtcttgagtatttgaaagagccggtgatcattgagtgcgggcacaacttttgtaaggcttgtatcactcggtggtgggaagatcttgaaagagactttccatgccccgtgtgtaggaaaacaagccgttaccgctcattacgtccgaacagacaattgggatcaatggtcgagattgcaaaacagctgcaagccgtcaagaggaaaattcgcgacgaaagtttgtgcccacagcatcacgaggcgctttccttattctgttacgaagaccaggaggccgtgtgtctcatttgcgccatatctcatacacaccgggcacacactgtggtgccactggatgatgccactcaggaatacaaggaaaagctgcagaagtgcctcgagcccctagaacaaaagctgcaggaaatcacaagatgcaaatcttccgaggagaaaaagccaggcgaactgaaacgactggttgaaagccggaggcagcagatcttaagggaattcgaggagctgcaccggaggctggacgaagagcagcaggttctattgtctcgacttgaagaggaagaacaggacatactccagaggctaagagagaatgcagcccacctgggggataagcggcgagatttagcacacttggctgcagaggtagaggggaagtgcctgcagtccggcttcgagatgctgaaggatgtgaaaagcaccctggagaagtgtgagaaagttaagactatggaggttactagcgtgagcatcgaactggaaaaaaatttctcaaacttcccaagacagtactttgctctgaggaagatcttaaagcagctgatcgcggacgtgacactcgatccagagaccgcccacccaaatctggttctgtcagaagatcgaaaatctgttaagttcgttgaaactcgcctgcgcgatttgccagacacccccaggcggttcaccttctacccatgcgtgctcgcaacagagggtttcacatcaggtaggcactactgggaagtggaggtaggggacaagacacactgggcagttggtgtgtgtagagattcagtcagtcgaaagggagaattgactccactgcctgaaaccggctattggcgcgtgcggctctggaatggagataagtacgcagctacaactactccgtttacaccactgcatatcaaggtgaagcccaagagggtaggcatctttctggactacgaggctggtactctgtctttctataatgtcaccgatagatcacatatctataccttcaccgatacctttacagaaaagctgtggccacttttctatccgggaatccgcgctggacgaaagaacgccgctccactaactatccgccctccaaccgattgggaatag

SEQ ID NO: 247778 - DNA, 1467 bp, Artificial Sequence
  derived and/or modified sequence
atggcagaaacctctcttttagaggccggtgcctccgcagccagcactgctgcagcccttgaaaacctccaggtggaggcttcttgctcagtctgcttggagtaccttaaagagccggtaatcattgaatgcggtcataatttctgcaaggcctgtattacccgttggtgggaagatttggagagggatttcccgtgccctgtgtgcagaaaaacatcacgatatcggagcctgcgcccaaaccggcagttaggatcgatggtggagatcgctaaacagctacaggctgtgaagagaaagattcgagatgagtctctgtgtccgcagcatcatgaggccctcagtcttttctgctacgaggaccaggaggccgtgtgtctgatctgcgctattagccatacccaccgcgctcacactgtggtacccctggacgatgctacccaggaatacaaggaaaagttgcagaagtgcctcgagccactcgagcagaaactgcaagagatcacccgctgcaaaagctctgaggagaagaaaccaggtgagcttaagagactcgtcgaatctagaagacagcagatccttcgcgaatttgaagagctgcacaggaggctcgatgaggagcaacaggtgttactgtctcgccttgaggaagaggaacaggatattttgcagcgcctgagggagaacgccgcacatctaggcgataaacgcagagacttggctcatttggctgcagaggtcgaaggcaagtgtctgcagtccggattcgagatgctgaaggatgtaaaatcaacacttgaaaagtgtgagaaggtgaagactatggaagtgacatccgtcagcatagagctcgagaagaacttctcaaattttccaaggcagtattttgcactgaggaagatcctcaagcagcttattgccgacgtgaccctagatccagaaaccgctcatcctaatctggtgctctccgaagacagaaaatcagtaaaattcgtagaaacaagactccgggatttgcctgacaccccccgaagattcacattctatccctgcgtgctggcaacagaagggtttacatcagggcgacattattgggaagtagaggtgggcgacaagacgcattgggccgtcggggtgtgtcgtgactctgttagtcgcaagggagagctgacgcctctccctgaaaccggctactggagagtaagactctggaatggcgacaagtatgccgctactacaactccctttactcctctgcatatcaaggtcaagcctaagcgagtaggtatctttcttgactatgaagcagggaccctgtctttttataacgtcactgaccgcagtcatatttacacgtttacagatactttcacagagaaactctggccgctgttttatccaggcattagagcgggacggaaaaacgccgcacccctgacaattcggcctcctactgattgggaatag

SEQ ID NO: 247779 - DNA, 1467 bp, Artificial Sequence
  derived and/or modified sequence
atggcagagacttcccttctggaggctggagcatctgcagccagtacagccgcagccctggagaacctgcaggtcgaggcatcctgttccgtgtgtctggagtacctgaaggagcccgtcatcatcgaatgcgggcataacttctgcaaggcatgcatcactcggtggtgggaggacctagagcgggactttccgtgccctgtgtgcagaaaaacttcccgttatcgcagtttgcggccaaaccgtcagctcggttcaatggtagaaatagccaagcaattgcaggccgtcaaaaggaaaataagggacgagtcactgtgcccacagcaccatgaggccctgagcctgttttgctatgaagatcaggaggccgtgtgtctcatatgcgccatttctcacactcaccgagcccacacagttgtccctttagacgacgccacacaggagtataaggagaaactgcagaagtgtctcgaaccccttgagcagaaacttcaggagatcaccaggtgtaagtccagcgaggagaagaagccgggtgagcttaaacgcctggtggagagccggagacagcagattttaagagagttcgaggagttgcaccggaggctggatgaggaacagcaagtgctgctttctcggttagaggaagaagaacaggatatcttacagcgactgcgcgaaaacgccgctcaccttggtgacaagagacgagatctggcccacctcgctgctgaggtggaaggtaagtgtcttcagtctggctttgagatgcttaaagacgtgaaaagcactctggagaagtgtgagaaagtcaagacaatggaagtgactagcgtgtccattgaactagaaaaaaacttcagtaattttcccagacagtactttgcattgaggaagattttgaaacagcttatcgccgatgtcaccctagatccagaaaccgcgcatccgaacctggtcctgtcagaagatcggaagtcagtgaaattcgtggagactagactcagagatctgcccgacacgccacgtagattcaccttttacccatgtgtgcttgcaaccgagggtttcacgtctggtcgccactattgggaggtggaagtgggagacaagacccactgggccgtgggagtctgcagagacagcgtgtccagaaaaggggaactgactcctctgccagagacagggtactggcgcgtgcgactgtggaacggggacaagtacgccgcaactacaacacccttcacacccctgcacatcaaggtgaaaccgaagcgcgttggtatcttcctcgattatgaagccggaacgctgtctttctacaatgtgacagataggagtcatatatatacttttaccgataccttcaccgaaaaactatggcctcttttttaccctggcattcgtgccggacgaaagaacgcagcacccctgacaattaggcctccaactgactgggaatag

SEQ ID NO: 247780 - DNA, 435 bp, Artificial Sequence
  derived and/or modified sequence
atggccgaaacatcactgctcgaggcaggtgcctccgcagcttccaccgcagctgctttagaaaacttgcaagtggaggcgtcatgttccgtgtgtttggaatatctgaaggagcccgtgataattgagtgcggccataatttctgcaaagcgtgtataaccagatggtgggaagacctggagcgcgattttccatgtcccgtctgcaggaaaacatcgcggtatcggtcacttcgaccaaatcggcagctcggaagtatggtcgaaattgccaagcagctccaggctgtgaagaggaagatccgcgatgagtctctgtgcccgcagcatcatgaggcactcagcctcttctgctatgaggaccaagaagccgtttgtcttatctgcgccattagccacacccacagggctcacactgtggttcctttagactag

SEQ ID NO: 247781 - DNA, 684 bp, Artificial Sequence
  derived and/or modified sequence
taaacgtctcgttatagatctctaaggcctaaccgccagttgggtagcatggtagagatcgcaaaacaactacaggccgtcaaaaggaaaatccgggatgaatctctttgtccccaacatcatgaagctctttcactgttttgctacgaggaccaggaggccgtgtgcctgatctgtgcaatatcccacactcacagggcacatactgtcgtgccgctcgacgacgccacacaggaatataaggaaaaactccagaaatgtctcgagcctctcgaacagaaacttcaggagataacacgctgtaaaagctcagaggaaaagaagcctggggaactaaagcgtctggtggagtcccgtcgccaacagattctcagggaatttgaggagctgcataggcgcttagatgaagagcagcaggtgctgctgtctcggctggaggaagaagagcaggacatcttgcagaggctaagggaaaacgcagcacacctgggcgacaaaagaagggatctcgcacatttagcagctgaggttgaaggtaagtgcttgcagagtggcttcgagatgctgaaggatgttaagagcacactcgaaaaatgtgagaaggtgaaaaccatggaggtcacatctacaaccccctgtactagtcttcactccgagattaatgacaacgtgcggggtcgctag

SEQ ID NO: 247782 - DNA, 225 bp, Artificial Sequence
  derived and/or modified sequence
atggctgaaacctcactgctggaggctggagcatccgcagccagtaccgcggctgccctcgaaaatctgcaggttgaagcctcatgcagtgtatgcctggagtacctgaaggaacctgtgatcattgagtgcggccacaacttctgcaaagcatgtataactcggtggtgggaagatctggagagggacttcccctgtccagtgtgcagaaaaacttctcgatag

SEQ ID NO: 247783 - DNA, 1467 bp, Artificial Sequence
  derived and/or modified sequence
atggcagagacctctctgttagaggcaggggctagcgccgcaagcacagccgctgccctggaaaacctgcaagtcgaggctagttgcagcgtgtgcttagaatatttgaaggagcccgtgatcatcgaatgtggtcacaatttctgcaaggcctgtataacacgttggtgggaggatcttgagagagatttcccatgtcccgtctgccgtaagacctccagatacagaagtttaaggcccaatagacagctggggagcatggtggagatagcaaaacagctgcaggcagttaagaggaagatccgggatgaaagcttgtgtccgcagcaccacgaggctctgtcactgttttgttacgaggaccaggaggcagtatgcctcatatgcgccatttcccatacccatagagctcatacagtggtcccactggacgatgccacccaggaatataaagagaagcttcagaagtgtctggaacccctggaacagaagttgcaggaaattactagatgcaagtccagcgaggaaaaaaaaccaggagagcttaagagactggtggagagccggagacagcagatcctacgggaatttgaagaactccatcgcagactagatgaggaacagcaggtgctcctcagccggttggaagaggaagaacaggacatcttacaaagactccgggagaacgccgctcacctgggggataagagacgagatctcgctcacttggccgctgaggttgaaggaaagtgtttgcagtccgggttcgaaatgctcaaagatgtgaagtccactctggaaaaatgcgaaaaggttaaaactatggaggtgacctctgtgagcatcgaattggaaaaaaatttcagcaacttccctaggcagtacttcgccctgcgcaaaatcctgaagcagctcattgctgacgttactttagatcccgagaccgcacatccaaacctcgtgttgtcggaagacaggaaaagcgtgaagtttgttgagactagactaagggatctgcccgacacacctcgtcgtttcacgttttatccttgtgttttggcgacggaaggcttcacaagtggaaggcactactgggaagttgaagttggggacaagacgcactgggccgtcggcgtctgccgggacagcgtctccaggaagggcgagttgacccctctgcccgagaccgggtattggcgcgtacgcctgtggaacggagataaatacgctgccaccacaaccccattcacaccactgcacataaaggtgaagccaaagcgagtgggtatatttttagattatgaggccggaaccttgtctttctataacgtgaccgacagatcccacatttataccttcactgatacgtttaccgagaaactgtggccgctgttttaccccggaatacgtgctggacggaaaaacgcggctccgttgacaataagacctccgaccgattgggagtag

SEQ ID NO: 247784 - DNA, 435 bp, Artificial Sequence
  derived and/or modified sequence
atggctgagacctccttgttggaagcgggagctagtgctgcctctaccgctgctgccctcgaaaacctgcaggtcgaggcatcatgtagtgtctgcttggaatacttaaaagaacctgtcatcattgaatgtggacacaatttctgtaaggcttgtattactcggtggtgggaagatctggagagagatttcccatgccccgtttgtcggaaaacaagtaggtaccgcagtctcagaccaaaccgtcaattgggctcaatggtggaaatagctaaacagctgcaggctgttaagcgcaagatacgagatgagtccttatgcccacaacatcatgaagccttatccctgttttgctacgaagaccaggaagctgtctgtctgatctgcgccatcagccacacccatagagcacacaccgtggttccgcttgactag

SEQ ID NO: 247785 - DNA, 225 bp, Artificial Sequence
  derived and/or modified sequence
atggcggaaacctctctgcttgaagcaggagctagcgccgcttctacggcagctgcactcgaaaatttgcaagtagaagcaagttgcagcgtgtgtctggaatatttgaaggagcctgtgatcattgagtgtggtcataatttttgcaaagcatgcatcactagatggtgggaggatctggagcgggatttcccttgtcctgtttgccgcaagacgtcacggtag

SEQ ID NO: 247786 - DNA, 147 bp, Artificial Sequence
  derived and/or modified sequence
atggccgaaacttcactgttagaggccggtgcttctgcggcttccaccgccgcagcactggaaaatctgcaggtggaggcatcttgtagcgtttgcctagaatacctgaaagagccagtgatcatcgagtgtggccacaatttttag

SEQ ID NO: 247787 - DNA, 1467 bp, Artificial Sequence
  derived and/or modified sequence
atggctgagaccagcttacttgaggcaggggctagcgcagcttccaccgcagccgctctggagaatctgcaagttgaggcttcctgctccgtgtgccttgagtacttaaaggaacccgtgattattgaatgtggccacaatttctgcaaagcctgtattacccggtggtgggaggacttagagcgcgacttcccttgtcctgtctgccgaaagacgtcccgctaccgaagcctcaggcctaatcggcagctgggctccatggtggagatcgccaagcagctgcaggccgtgaagcgcaaaatccgagacgaatccctttgtccacagcatcacgaagccctgagtcttttctgctatgaggaccaggaggccgtgtgcctgatctgcgccatatcgcacacacaccgcgcacataccgtggtgcccctggacgatgcaacccaggagtataaagaaaagctacagaaatgcctcgaacctttagaacagaagctccaggaaatcaccagatgcaagtccagcgaggaaaagaagccaggagagctgaaaagactggtggagtcccgcagacagcaaatcctccgggaattcgaggaattgcatagacggcttgatgaggaacagcaggtgctcttatccaggttggaggaggaagaacaggacattttacagcggctgcgtgagaacgctgcccatctgggcgacaaacggagggacctggctcacctggcagcagaggtggaaggcaaatgcctccaaagtggattcgagatgttgaaagatgtgaaatccactctggagaagtgcgagaaagtgaagactatggaggtaacatccgtctcaattgagcttgaaaagaacttctctaattttccgagacaatactttgctcttcgcaagattttgaaacaactaatcgctgatgtgacgctcgatcctgaaacagcacatcccaacctcgttctaagcgaggatcgcaagtcggtgaagttcgttgagactcgtctaagagacctacccgatacaccccgtagatttaccttttatccatgtgtgctggccaccgaagggttcacatccggaagacactattgggaagttgaggtaggcgataaaacacactgggccgtgggggtgtgtcgtgattccgtttccagaaaaggcgagctgactccacttccagaaactgggtattggcgggttcgcctgtggaacggagacaaatatgccgcaactactactccattcacccctctgcatatcaaagtgaagcctaaaagagtcgggatcttcctggactatgaggccggtaccctcagcttctacaacgtgacagacaggtcacatatttataccttcacggatactttcacggagaagctgtggcccttgttctacccaggaataagggcaggtagaaagaacgctgcaccattgaccatcaggcccccaaccgattgggagtag

SEQ ID NO: 247788 - DNA, 684 bp, Artificial Sequence
  derived and/or modified sequence
taaactagccgttacagatccttaaggcccaaccgacagctgggcagcatggttgaaattgcgaagcagttgcaggcagtcaagagaaagataagggatgagtcattgtgcccacagcaccatgaggcgttatcacttttctgctacgaggatcaagaggccgtgtgcctgatttgcgccatctcacacacacacagggcacatacggtcgtcccactggacgacgccactcaggagtataaggaaaaattgcagaagtgcctggagcccctcgagcagaagctccaggaaatcacccgctgcaagagcagcgaggaaaagaagcctggagagttaaagcgcttggtggagagccggaggcaacagatcctcagggagttcgaagagctccacagacggcttgacgaggagcagcaagtcctgctcagtcggttagaggaggaagagcaggacattctgcaacgcctgcgggagaacgccgcacatctcggggacaagcgtcgagacttggcacatctcgccgctgaggtggaaggcaaatgcctgcaatctgggttcgagatgttaaaagacgtgaaatccaccttggagaagtgtgagaaggtgaagactatggaggtgacttcgaccacgccttgcacatctcttcattcagagattaacgataacgttcgcggaagatag

SEQ ID NO: 247789 - DNA, 147 bp, Artificial Sequence
  derived and/or modified sequence
atggccgagacatcactgctggaagccggtgcatctgccgctagcaccgcggctgctctggagaatttgcaggtggaggccagctgcagcgtgtgcctggagtacctaaaggagcctgtaatcattgagtgcggccacaatttttag

SEQ ID NO: 247790 - DNA, 147 bp, Artificial Sequence
  derived and/or modified sequence
atggccgagacgagcctcctggaagctggcgcatctgctgcaagtacggccgctgcgcttgagaacctccaggtggaggcctcatgctctgtgtgcttggaatatctgaaagaaccggtcataatcgaatgcgggcataatttttag

SEQ ID NO: 247791 - DNA, 180 bp, Artificial Sequence
  derived and/or modified sequence
atggccgaaacttcgctacttgaagctggcgcaagcgccgcatctacagccgctgctctggagaacctgcaggtggaggctagctgtagcgtatgtctggagtacctgaaggaacccgttatcatcgaatgtgggcacaatttttgcaaagcatgcattaccagatggtgggaagattag

SEQ ID NO: 247792 - DNA, 180 bp, Artificial Sequence
  derived and/or modified sequence
atggccgaaacctctcttctagaggcgggagcctcagctgcctccactgctgcagccctggagaacctgcaggtggaagcaagctgctctgtgtgcctagagtacctcaaggagccagtgattatcgaatgtggtcacaacttctgcaaggcatgtatcacgaggtggtgggaagattag

SEQ ID NO: 247793 - DNA, 435 bp, Artificial Sequence
  derived and/or modified sequence
atggctgaaacctcccttctcgaggccggagcatcggcagcctcaactgctgccgctctggaaaatttgcaagtggaagcgtcctgtagtgtgtgcctggaatatctgaaagaaccagtgatcatcgagtgcggccataacttctgtaaagcttgtattaccaggtggtgggaggacctggaaagggacttcccctgccctgtgtgccggaaaacatcaaggtaccgctctctccgtccaaataggcaactaggctccatggtagagatcgcaaagcaattgcaagctgttaagcgtaagattagagacgaatcgttgtgtccccaacatcacgaggccctctcgttgttctgctacgaagaccaggaagccgtgtgcctgatatgcgcgatctcacacacgcacagggctcacacagtggtaccgctggactag

SEQ ID NO: 247794 - DNA, 684 bp, Artificial Sequence
  derived and/or modified sequence
tgaaccagcaggtataggtcgctgaggcccaacagacagctcggaagcatggtggagatcgcaaagcagctacaggccgtcaagcggaaaattcgcgacgagtccctctgcccccagcaccacgaagctctgagccttttctgttacgaggatcaagaagccgtttgcttgatttgcgctataagccacacccatagagcccacactgtggtcccactggacgatgctacccaagagtacaaagagaagctgcagaaatgcctcgagcctctcgaacagaagctgcaggagatcaccagatgtaagagctcagaggagaaaaagcctggcgagttgaagcgcctggtggaatcacgtcggcaacagattctccgcgaattcgaagagctccacagaagactggacgaggagcaacaagttctcttgagccgccttgaggaggaagagcaggacatactgcaaagacttagagagaacgcagcacacttaggcgacaaaaggcgggatctggctcatctagctgcagaggtcgaggggaagtgcctgcagtccggatttgagatgcttaaggacgtgaaatctaccctcgagaaatgcgaaaaggtgaagacaatggaagtgacctcaaccactccctgtacaagcctccactctgagattaacgataacgtgcgtggacgctag

SEQ ID NO: 247795 - DNA, 684 bp, Artificial Sequence
  derived and/or modified sequence
tgaacatcacgctacaggtccctgagaccaaaccgacagctgggatctatggtagaaatagccaagcagctgcaggctgtgaaaagaaagattagggacgaatcgctgtgcccacagcaccacgaggccctgagcctgttctgttacgaggaccaggaggcagtgtgtcttatctgtgcaatctcacatacccacagagcgcatacagttgttccattagacgacgccacgcaggagtacaaagaaaagctgcagaagtgcctcgagcccttggaacaaaagctgcaggaaatcacgcggtgtaaatcctctgaagaaaaaaagcctggcgaactgaagagattagtggagagtcgtaggcagcagatcctgagagagtttgaggagttgcacaggagacttgacgaggaacagcaagtactgctcagcagactggaggaagaggaacaggacattctccagcggttgcgcgaaaacgccgcacatttaggcgataaacggagagatctggctcacttggctgccgaggttgagggtaaatgccttcagtctggcttcgaaatgcttaaggacgtgaagtctacacttgagaaatgtgagaaggtcaagactatggaggtgaccagcaccaccccatgtacatcgctgcattcagaaataaatgacaatgtgcgcggtcgatag

SEQ ID NO: 247796 - DNA, 147 bp, Artificial Sequence
  derived and/or modified sequence
atggctgagacctctttgttggaggcaggcgcaagtgctgcctcaacagccgctgccctcgaaaatcttcaggttgaggctagttgtagcgtgtgtctggagtatctgaaagaaccagtaatcatcgaatgtggccacaacttctag

SEQ ID NO: 247797 - DNA, 225 bp, Artificial Sequence
  derived and/or modified sequence
atggcagaaacctctctcctcgaggcaggcgcaagcgccgctagcaccgctgcagcgctggaaaacctgcaagtcgaggcctcttgcagcgtgtgcctcgaatacctaaaagagcccgtgataatcgaatgtggtcacaacttctgcaaagcttgcattaccaggtggtgggaagacctggagcgagactttccttgtcccgtctgcaggaaaacgagccgctag

SEQ ID NO: 247798 - DNA, 180 bp, Artificial Sequence
  derived and/or modified sequence
atggcagagacaagcctgttagaggctggagcctccgccgcatcgacagcagcggctttagaaaacttgcaggtggaggccagctgttcagtctgtcttgaatatctgaaggaacccgtgatcatagagtgcgggcataacttttgcaaagcatgtatcactcgatggtgggaagactag

SEQ ID NO: 247799 - DNA, 147 bp, Artificial Sequence
  derived and/or modified sequence
atggccgaaacttctctgctcgaggccggagcctcggctgctagcaccgcagccgctctggagaacctacaggtggaagcatcttgcagcgtttgcttagagtacctgaaagaacctgtgattattgagtgcggccacaacttctag

SEQ ID NO: 247800 - DNA, 786 bp, Artificial Sequence
  derived and/or modified sequence
atggccgagacatcacttttggaagctggcgcatctgcagcctcaactgcagctgcactcgagaatctgcaggtggaagccagctgtagtgtttgcctggaatatctgaaagagccggttatcatcgagtgtggacacaatttctgcaaggcctgcataactcgctggtgggaagacctggagcgggacttcccttgtcctgtgtgccggaagacatcaaggtataggtctctgcgccctaatcgccagttaggatccatggtggaaattgccaagcagctccaggccgtgaagcgaaagatcagggacgagtctctgtgtccccagcatcacgaagcgctgagtctgttctgctacgaggaccaggaggctgtctgtctgatttgcgcgatctcccatacacacagggcccatactgtcgtccccctcgatgacgccacccaggagtacaaggaaaaactgcaaaagtgtctggaaccactggagcaaaaactccaagaaatcacaaggtgtaaatcctcagaggaaaagaaaccgggagagttgaagcgtttggtggagtccaggcgacagcagattcttcgcgaatttgaggagctccacaggcggctggacgaagaacagcaagtgctcctttcgagactggaggaagaggagcaggatattctgcagaggcttagagagaatgcagcgcacttgggagacaagagaagggacctggcacacctcgctgcagaagtcgagggaaagtgtcttcagagcggctttgagatgttgaaggtatag

SEQ ID NO: 247801 - DNA, 180 bp, Artificial Sequence
  derived and/or modified sequence
atggctgagacttccctgttagaggctggcgcatctgccgcaagcactgccgctgcactcgaaaacctgcaggttgaggcgagctgctctgtgtgccttgaatatctaaaggaacctgtgattatagagtgtggtcacaacttctgcaaggcatgtattacgagatggtgggaagactag

SEQ ID NO: 247802 - DNA, 435 bp, Artificial Sequence
  derived and/or modified sequence
atggctgagactagcctgctggaggcgggagcatcggctgctagcactgccgcagcattagaaaacctacaagttgaggcatcctgctcggtgtgtcttgaatatctcaaagagccggtcataatcgaatgtggccacaacttctgtaaagcatgtatcacgcgttggtgggaagatctggagcgcgactttccatgccccgtttgtcggaagacaagccgctatcgaagtctcagacctaatcgacagttaggatctatggtggagattgccaagcaactgcaagcagtgaaaaggaaaatcagagacgagtcactgtgcccacaacaccacgaagcgctgagcttattttgttacgaggatcaggaagcggtatgtcttatttgtgccatttcacacacgcatagagcccacacagtggtgcccctcgattag

SEQ ID NO: 247803 - DNA, 1467 bp, Artificial Sequence
  derived and/or modified sequence
atggctgagacttcactactggaagctggagcctcagccgcttctacagctgccgctttagaaaatttgcaggttgaagcgtcctgtagtgtttgtctagagtatttaaaggagcccgtcatcatagagtgtggtcataatttttgtaaggcctgcattacccggtggtgggaggatctggaacgggactttccatgtccagtgtgcaggaaaacaagtcggtaccgttccctcaggcccaatagacagctgggaagtatggtagagatcgcgaaacaacttcaggcggtgaagcgcaaaatcagggacgaatccctctgcccccagcatcatgaggctctcagtcttttttgttatgaagaccaggaagctgtctgtcttatctgcgcaatttctcacactcatagggctcataccgtggtcccattagatgatgctacacaggagtataaagaaaagctgcagaagtgccttgaacccctcgagcagaaactgcaggaaataaccagatgtaaaagcagcgaggagaagaagccaggtgagttgaagcgcctggtagaatcaagacgacaacaaattctcagagagtttgaagagctgcacagacgtttggatgaggaacaacaggtgttgcttagcaggttagaggaggaggagcaggacatactgcaacgtcttagggagaatgccgctcatttgggcgataagcggcgtgatctggcccacctcgctgctgaagttgaaggaaagtgtctgcagtccggcttcgagatgttaaaagatgtcaagagtactctcgaaaagtgtgaaaaagtcaagactatggaagtgacatctgtttcaatcgagcttgagaagaacttctctaactttcctcgccagtatttcgcactccggaagatcttgaagcagctaattgccgacgtgacactggatcccgagactgcacaccctaacttggtactcagtgaagacagaaaaagtgtgaaattcgttgagacacggctcagagatctgccggacactccaaggagattcaccttttatccttgcgtcctggctactgagggctttaccagtggtcgccactactgggaggtcgaagtcggagataaaacccactgggcggttggagtttgtagggactccgttagtcgcaaaggtgaactcactcctctgccagaaactggctattggagggtcaggttgtggaatggggataagtacgcagctactaccacccccttcacgcctctccacatcaaggttaaacccaaaagagtgggaatttttctggattatgaggccggtactctgtcgttttacaacgtgactgataggtcccacatatatacctttacagatacattcacggaaaaactgtggccactgttttaccctggcatccgcgctggccgtaagaatgcggcacctctgacaatccggccacctacggattgggagtag

SEQ ID NO: 247804 - DNA, 1467 bp, Artificial Sequence
  derived and/or modified sequence
atggcggaaaccagtctgctggaggccggagcctcagctgcttccaccgccgctgctcttgagaatctgcaggtcgaggcatcatgctccgtttgtctggaatatctcaaagagcctgtcataattgagtgtggccacaacttctgcaaagcatgcatcacacgatggtgggaagacctagagcgtgatttcccttgccccgtgtgtcggaaaaccagccggtatcgctctctgcgaccgaatagacaactcggctcgatggtagagatcgccaagcagctgcaggccgtgaagagaaaaatccgcgatgagtctctgtgcccccagcatcatgaggccctgagtttattctgttacgaagatcaggaggcggtgtgcctgatttgcgcaatctcccatacccaccgcgcacatacagtggtgcccctggatgacgccacccaagagtataaggagaagctccagaagtgtctggagccgctcgaacagaagctgcaggagataaccaggtgtaagtcttctgaggaaaaaaagcctggcgaactgaagaggcttgtagaaagtcgcaggcaacaaatcctacgggagttcgaagaattgcatcggagactggatgaggaacaacaggtgctgctctcccggttggaagaggaggaacaggacatactgcagcgcttgcgagaaaatgctgcccacctgggtgataagaggagagacttagcccatctggctgcagaagttgaaggaaagtgcctccaaagtggctttgagatgctgaaagacgtgaaatctaccctggaaaaatgtgagaaagtgaagaccatggaagtgacctcagtttctattgagctcgagaaaaatttttccaatttccccaggcagtatttcgcactacgaaaaatcctgaaacagttaattgctgacgtcactctggacccggagaccgctcaccctaatctagtattgagtgaggatagaaaatccgtgaaatttgtagaaacccgcctgcgtgacctgcctgatacgcccaggcgctttaccttctatccatgtgttcttgcgaccgaggggttcaccagcgggagacactactgggaggtggaggtgggagataagacccactgggctgtcggcgtgtgtcgcgattctgtaagccgcaagggagaacttaccccactcccagagactggctattggcgcgtgcggttatggaacggagataagtatgccgcaacaacaacacctttcacgccgttgcacataaaagtaaagccgaagcgcgtgggcatctttctggactacgaggctggcaccctatccttctataatgttactgatcgctcccacatctatacattcacagataccttcacagaaaagctgtggcccctattttatcctggcattcgcgcaggacgcaagaatgctgcccctctcactatcagacctccaaccgattgggagtag

SEQ ID NO: 247805 - DNA, 786 bp, Artificial Sequence
  derived and/or modified sequence
atggccgagaccagtctcctggaggcaggtgctagtgccgcaagcactgctgctgccctggaaaacctgcaggtcgaagcctcatgcagcgtctgcctggagtaccttaaggagcctgtcatcatcgaatgtggccataacttttgcaaagcatgcattacaagatggtgggaggaccttgaacgggactttccttgcccagtctgcagaaaaacctccaggtatcgctctctgaggcccaatcgacagctaggcagcatggtggaaatagcaaaacaacttcaggccgtgaagagaaagataagggacgagagcctatgcccccaacaccatgaggccttaagtttgttttgctacgaggaccaggaggcagtgtgtttgatctgcgcaatcagtcacacccatcgcgcacatacggtcgtgcccctggatgacgcgactcaggagtacaaggagaagttacaaaaatgcctcgagcctttggaacaaaaattgcaggaaataacccggtgcaagtcgagtgaagagaagaagccaggtgagctgaagcgcttagttgagagtcggcgtcagcagatcttaagagagttcgaagaactgcaccgcaggctggatgaagaacaacaggtactcctgtcccgactggaagaagaagagcaggatatcttgcagagacttcgagaaaatgctgcacatcttggagacaagcgcagggatctggcccatctggccgcagaggtggaaggcaagtgccttcagtcgggctttgagatgctcaaagtatag

SEQ ID NO: 247806 - DNA, 1467 bp, Artificial Sequence
  derived and/or modified sequence
atggccgaaaccagcctgctcgaagcaggtgccagcgccgcttccacagctgcagccctggagaatttacaggtggaggcctcctgtagtgtatgcctcgaatatctcaaagagccagtcataattgagtgcggccacaacttctgcaaagcttgcataaccagatggtgggaggaccttgaaagagattttccatgcccggtttgtcgcaaaacctccaggtataggtctctgcgccctaaccggcagcttggtagcatggtggagattgcgaagcagttacaggctgttaagcgtaaaatccgcgacgagagcctgtgtccgcagcaccatgaagccctttcactgttctgctacgaggaccaggaggctgtttgtctgatctgcgctatttcacacactcatagggctcatacagtggtcccactcgacgacgccacacaagagtataaagagaaattacagaagtgcctcgagcccctggagcagaaactgcaagagataaccagatgcaagtcatccgaagaaaagaagccgggtgagttaaaacggctggtggagtctagacgccagcagatcttgagggagttcgaggaacttcatagaaggctggatgaggagcagcaggtgctgctgagtcggctggaggaagaagagcaggacattctccagcgactgcgggaaaatgccgctcatctgggtgataagcggagggacttagcccacttagccgcagaggtagaaggcaaatgcttacagtcaggttttgagatgttaaaagacgtcaaatcaacgttagagaaatgtgagaaagtaaagacaatggaggttacgagtgtgagcattgagttggaaaagaatttttctaattttccacggcagtactttgctctgcgaaagatcctcaagcagctcatcgcggatgtaactctggatccagagacagctcatccaaacctcgtactgtcggaggatcgaaagagcgtaaagtttgttgagacccggttaagggacctgcccgacacccccaggcgcttcaccttctacccctgtgttcttgccacagaggggtttaccagcgggaggcactattgggaggtcgaagtgggtgataaaacccattgggctgtgggtgtttgtcgcgattcggtatcacgaaaaggagagctaacacctctgccagagacagggtactggcgcgttcggctctggaatggcgacaagtatgctgccaccactaccccatttactccgctgcatatcaaggtcaagccaaagcgcgtgggaatcttccttgattatgaagccggtaccttaagcttctacaatgtgaccgacagatcccatatctacacttttacagacacatttactgagaaactgtggcctcttttttacccagggatacgggctggtcgtaagaacgccgctcctctgacaattagaccccctaccgactgggagtag

SEQ ID NO: 247807 - DNA, 180 bp, Artificial Sequence
  derived and/or modified sequence
atggccgagaccagtttgctagaggccggtgcttctgccgctagcaccgccgcagccttggagaacttgcaagtcgaggcaagttgttcagtgtgccttgagtacctgaaagaacccgtaatcattgaatgtggtcataacttctgcaaagcttgtattacccgatggtgggaagattag

SEQ ID NO: 247808 - DNA, 180 bp, Artificial Sequence
  derived and/or modified sequence
atggccgagactagtctcctggaagctggtgcttcagcggcatccaccgccgctgctctggaaaatctgcaggtggaggcctcttgtagcgtgtgcctggaatatctcaaggagcccgttattatcgagtgcggccataatttctgcaaggcctgtataaccaggtggtgggaggactag

SEQ ID NO: 247809 - DNA, 684 bp, Artificial Sequence
  derived and/or modified sequence
tgaacctcacgataccgaagcctacgtccaaatagacagcttggcagcatggtggagatagccaagcagctgcaagctgtaaagcgcaaaatccgggacgaatccttgtgcccccaacatcacgaagcactgagtttgttttgttacgaagaccaggaagccgtgtgcctgatttgtgccatctcccacacgcaccgtgcgcacaccgtcgttccactggacgacgccacccaggaatacaaggaaaaactccagaaatgcctggagcctctagagcagaagctgcaagaaatcacaagatgcaaatcctccgaggagaagaagcctggggagttgaaacgcctagtagagtcccggagacagcagatccttcgagagtttgaggagctgcataggcgattggatgaggagcaacaggtgttgctaagcagactggaagaggaagaacaggacattctccagaggctccgggagaatgccgctcatctcggggacaagagacgcgacctggcacatcttgccgcagaggttgaaggtaagtgcctgcagtctgggttcgaaatgcttaaggacgtgaaatccacgttagaaaagtgtgagaaggtgaagaccatggaagttactagcacaactccctgtacatctctgcactccgaaatcaatgataatgtccgcggaagatag

SEQ ID NO: 247810 - DNA, 1467 bp, Artificial Sequence
  derived and/or modified sequence
atggcagagacgagcctgttggaggccggagcttcagcagcatctacggccgctgcccttgagaacttgcaggttgaggcttcatgcagcgtctgtctggagtacttgaaagaacctgtaattattgagtgcggccataatttctgtaaagcttgcatcacccgctggtgggaggacctggagcgagatttcccctgcccagtgtgtcggaagacctctcgataccgctcgctccgacctaaccggcagcttgggtctatggtcgagatagctaagcagctccaggcagtgaagcggaaaatacgagatgaatctctatgcccacaacaccatgaggcgctctctctgttttgttatgaggatcaagaagcggtctgtttaatatgcgccatttctcacacccatagggcccatacagttgtgcctcttgacgatgccacgcaggagtacaaggaaaagctccagaagtgtctagagcccttagagcagaagttgcaagagatcaccagatgtaagagtagcgaggaaaaaaagcccggagaactgaagcggcttgtggagtccagacgccagcagatcctgcgggaattcgaagaactgcataggcgcctggacgaggaacaacaggttctattatctcgactggaggaagaagaacaggatatactccaaagattgcgcgagaatgcagcccacctcggcgataaacgcagagacctggcccacctcgccgctgaggttgagggaaagtgtttgcagtccggcttcgagatgcttaaagacgtgaaaagtaccctggaaaagtgcgaaaaagtgaagaccatggaggtgacctcggtcagcattgaacttgaaaagaatttttccaacttccctagacagtacttcgcccttcgcaagatcttaaaacagctgatcgccgacgtcactctggatccggagactgctcatcccaacctcgttctttccgaagatagaaagagcgtgaaatttgttgaaacccggctgcgagacctgcctgatacaccacgtcgctttaccttctatccttgcgtgctggctaccgaaggcttcacctccgggagacactattgggaggtcgaggtgggggataaaacccactgggcggtgggtgtgtgtagagattccgtctcaaggaagggggaactcacacctctgcccgaaacggggtattggcgagtgagactgtggaacggggataaatatgctgctactaccacgccgtttacaccactccacatcaaggtgaagcccaagcgcgtggggatatttctggattatgaagctggcacgctgtccttctacaacgtgactgatcgcagccacatatacacattcacagatacatttactgagaagctgtggccactgttctacccaggtatccgcgcaggaagaaaaaacgcagcccctttgacaatccgtcctcctactgactgggagtag

SEQ ID NO: 247811 - DNA, 225 bp, Artificial Sequence
  derived and/or modified sequence
atggctgagacgtcgttactggaggccggagccagtgccgcatctactgccgcagcccttgaaaacctgcaagttgaggctagctgctctgtttgtttggagtacctcaaggagccagttatcattgagtgcggccataatttttgtaaagcctgcattactcgatggtgggaggatctcgagcgagacttcccatgcccggtttgcaggaagacttctcggtag

SEQ ID NO: 247812 - DNA, 684 bp, Artificial Sequence
  derived and/or modified sequence
tgaacctcgcgctaccgatctctgcgtccaaatcgtcagctcggctctatggtcgagattgcaaagcaactgcaggcagtgaagcgtaaaataagagacgaaagtctttgtccacaacaccatgaggccctgtcactcttctgctatgaggatcaggaggcagtgtgtctaatttgtgcaatatcccacacacacagggcccatactgttgttccactggatgacgccactcaagagtataaggagaaactacagaaatgtttggagccgctggaacagaagttacaggagatcactcggtgcaaatcaagcgaagagaagaaacccggagaacttaaaaggctggtggaatcgcgccgacagcaaatattgagagagttcgaggagctccaccggagattggacgaggaacagcaggtgctactgagcaggctggaagaggaggagcaggatatacttcaacggctccgagaaaacgcagcccatcttggagacaagaggagagacctcgcgcacctggcagccgaggtagagggtaaatgtctgcagtctggtttcgaaatgctaaaggatgtcaaatcaacattggagaagtgtgagaaagtgaaaacaatggaggtcacctccacaactccctgcacatccttgcatagcgagattaatgataatgtgcgtggtagatag

SEQ ID NO: 247813 - DNA, 1467 bp, Artificial Sequence
  derived and/or modified sequence
atggcagaaacctcacttttggaagcaggcgctagcgctgcttccacggcagccgcactcgaaaacctccaggtggaagccagctgttccgtttgcctggagtacctcaaggagcccgttatcatcgagtgcggacacaatttttgcaaggcttgcattacaagatggtgggaggaccttgagcgcgacttcccatgtcctgtatgtcgcaaaacttctcgatatcgttcgctaagaccgaacagacagttaggaagcatggtcgaaattgccaagcagctgcaggctgtgaaacgcaagatcagggatgagagcttgtgtcctcaacaccatgaagcactgtccctgttctgttatgaggaccaagaagccgtctgcctgatctgcgcaatcagtcacacccatagagcgcatacagtggtgcctcttgacgatgctactcaggagtataaggaaaaattgcagaagtgcctcgaaccccttgaacagaaactccaggaaattacacggtgtaagagctccgaggagaaaaagcccggagagctgaagagactcgttgagtcaaggagacaacagattcttagagaatttgaagaattgcacagaagactcgacgaggagcagcaggtgctcctgtcccggttagaagaggaggagcaagatattttgcagaggctacgcgagaatgcagcccatctgggtgacaagagacgcgatttggcccacctagccgcagaagtggaggggaaatgcttacagagcggattcgagatgctgaaggacgtaaagtcaaccctggagaaatgtgaaaaagtgaaaactatggaggtgacttctgtcagcatcgagctggaaaaaaacttctcaaactttcctcgacagtatttcgccctgcggaaaatattaaaacaactcatcgcagacgtgaccttggatcctgagacagcccacccaaacctggtcctaagcgaggatcggaaatccgtgaagtttgtggaaacaagacttagagacctgcccgataccccacggagattcaccttctacccgtgcgttctggctactgagggctttacctctggaagacactattgggaggttgaggtaggcgataagactcactgggctgtgggcgtgtgcagagatagtgtgtcccgtaaaggagaactgacaccccttccagaaacagggtattggcgggtacgcttgtggaatggtgacaagtacgcagctaccactaccccattcactcccctccatattaaggttaagccgaaacgcgttggtatcttccttgattatgaggccggtactctctcattctacaatgtgaccgaccggagccacatctacacattcaccgacactttcaccgagaaactttggcccctgttctaccccggaatcagagccggtcggaaaaatgccgctcccttgaccattagaccgcctacagattgggagtag

SEQ ID NO: 247814 - DNA, 1467 bp, Artificial Sequence
  derived and/or modified sequence
atggccgagacctcccttctggaggcaggcgcatccgccgcaagtaccgcggctgccctggaaaacctccaggtagaagctagctgcagcgtatgcctggagtaccttaaggaaccagtgattatcgaatgcggtcacaacttctgtaaggcatgcattacacgatggtgggaggatctcgagcgagacttcccctgtcccgtctgccgaaaaacttctcgttacagatctctcaggccaaatcggcaactgggctctatggtggaaatcgcaaagcaactgcaggccgttaagcgcaagatccgtgacgagagtctgtgtccccagcaccacgaggctctctctctgttttgctatgaagaccaggaagccgtctgtctaatctgcgccatttcccatacccacagggctcatacggtagtcccccttgatgacgccacccaggaatataaggagaagttgcagaaatgcctggaacctctcgaacagaaattgcaggaaatcaccagatgcaaatcctcggaagaaaagaaacctggggagctaaagcggctggtcgaatctaggcgccagcaaattcttcgggagttcgaagaactccaccgcagattggatgaggagcagcaggtgctgctcagccgcctggaagaagaagagcaggatattcttcagaggttaagagagaatgcagcccatttgggggacaagagacgggacctggcgcatctagctgccgaggtcgaagggaaatgtttacagagcggattcgaaatgttaaaggatgtcaagtctacattagaaaaatgcgaaaaagtcaaaacaatggaagtgaccagcgtgtcgattgagctggagaaaaatttctcaaatttcccgaggcagtactttgccctgcgcaaaattctgaaacaattaatcgccgatgtcaccctcgatccggaaacagctcatcccaatctggtgttgagcgaggaccgcaagtccgttaaatttgtggagacccggttgagagacctgcctgacacacccaggaggtttaccttttatccatgcgtgttggcgacggagggttttacatctggcagacattattgggaggtggaggtgggagacaagactcactgggcggtcggcgtttgcagagattccgtgtcacggaagggggagctaacgccattgccggaaacgggctattggagggtgcggctgtggaatggggacaaatacgcagctaccactacgccctttactcccctgcatattaaagtgaagcccaagcgcgtgggaattttcctggattatgaggctggcaccttatccttctacaatgtcaccgatcgcagccacatatacacgtttaccgacacatttaccgagaagttatggcccctcttctatccagggataagggcgggacgcaaaaacgccgcacctttaacgatcaggccgcctactgactgggaatag

SEQ ID NO: 247815 - DNA, 786 bp, Artificial Sequence
  derived and/or modified sequence
atggccgaaacctcccttctcgaagccggagcctctgccgcatcaaccgccgcagcactagagaatctgcaggtggaagcctcctgttccgtgtgtctggaataccttaaggagcccgtgatcattgagtgtgggcacaatttctgtaaagcctgtatcacccgttggtgggaggatttagagagggattttccatgcccagtgtgtaggaaaacctcacgttatcgttcccttagacccaacagacagctcggatcaatggtggaaatcgccaaacaactccaggctgtgaaaaggaagattagggatgaaagtctctgccctcaacaccatgaagctctgagtctcttctgctacgaggaccaggaagctgtgtgtctgatctgcgccatctcccacacacaccgagctcacacagtagtgcctctggatgatgcaacccaggagtataaagagaagctgcagaagtgcctggagccactggagcagaagctgcaagaaatcacgagatgcaaatcatcagaggaaaaaaaacctggcgagctgaaacgcctcgttgagtcaagacgccagcagatcctcagagaattcgaagagcttcacagaagactggatgaggagcaacaagtgctactatcccggctcgaagaagaggagcaggatatcctgcaacgtctgcgggaaaatgctgctcatctgggggacaagagacgcgaccttgctcacttagcagccgaggtggaaggaaaatgcctgcaatcaggatttgagatgctgaaggtgtag

SEQ ID NO: 247816 - DNA, 225 bp, Artificial Sequence
  derived and/or modified sequence
atggccgaaacaagcctgctcgaagccggtgccagcgcggcttcaacggccgcagccctggagaacttgcaggtggaagcctcctgtagcgtctgtctcgaatacctcaaggagccagtgataatagagtgtggccataatttttgcaaagcctgtatcacccgatggtgggaggacctggaaagagatttcccctgcccagtgtgtagaaaaacttctagatag

SEQ ID NO: 247817 - DNA, 180 bp, Artificial Sequence
  derived and/or modified sequence
atggctgagacctcacttcttgaggccggagcatccgccgctagcacagccgctgccctcgagaacctccaggtcgaggcctcttgcagcgtttgccttgagtacctgaaggaaccagtcattatcgaatgtggacacaacttttgtaaggcatgcattacgagatggtgggaagactag

SEQ ID NO: 247818 - DNA, 786 bp, Artificial Sequence
  derived and/or modified sequence
atggctgagaccagcttactggaagccggtgccagcgctgcgagtactgctgctgcccttgagaaccttcaagttgaagccagctgctctgtctgccttgaatacctaaaggagccagtgattatcgaatgcggacacaatttctgcaaggcctgtataacaaggtggtgggaggatctggagcgtgatttcccttgtcccgtgtgtcggaaaacttcccgctatcgttcactgcgacccaatcggcagctggggtctatggttgaaattgccaaacagctccaggcggttaaacgaaagatccgagacgaaagcttgtgcccacagcaccacgaggcacttagtctgttctgttacgaggaccaggaggctgtgtgtctgatctgcgccatcagccacacccaccgggctcatacagtggtgccattggacgatgctacccaggagtataaggaaaaattacaaaagtgtctcgagccactggaacagaagctgcaggagatcacgaggtgcaagtcgtctgaggagaagaagccaggtgaactcaagagacttgtggagtctcgtcgacaacagattctgagagagttcgaagaactgcatcgaaggctcgatgaagaacagcaagtactcctcagccggctagaggaggaagaacaggacatccttcaaagactgagggagaacgccgcacacctcggtgataagaggcgcgacctggcacacctcgccgcagaagtcgagggtaaatgccttcagagcgggttcgagatgcttaaggtgtag

SEQ ID NO: 247819 - DNA, 1467 bp, Artificial Sequence
  derived and/or modified sequence
atggcagagactagcctgctcgaggctggagcctcagctgcatctacggcagcagcactagaaaaccttcaggtagaagccagttgttctgtgtgcctggagtatctcaaagagccagtgattatcgagtgcggacacaatttctgcaaagcctgcataacgcgctggtgggaagatcttgagcgcgatttcccgtgtccagtatgcaggaagaccagtagataccggtctctcagaccaaataggcagctggggtcaatggttgaaattgccaagcagctgcaagctgtgaagcgtaaaatcagagacgaatctctgtgccctcagcatcatgaggctctcagcctcttttgttacgaggaccaagaggctgtctgtttgatttgtgcaatttcccacacccaccgggcacatacagttgtacctctcgatgatgcaacacaggaatataaggagaagctgcagaaatgtctcgagccgttggaacaaaaactccaggaaatcacccggtgcaagtcaagcgaagaaaagaagcctggagagctaaagcgattggtggagtccagaagacagcagattctcagggagtttgaggagttgcacaggcgcctggatgaggagcaacaagttctcctttctcggctggaggaagaagagcaagacatacttcagcgcctgcgagagaacgctgcacacctgggcgacaagaggcgcgatttggcccacctcgcagctgaagtagagggaaagtgtttgcagagcgggtttgagatgctcaaagacgtgaaaagcacattggaaaaatgtgaaaaggtgaagacaatggaggtgaccagtgtgagcatcgaactggaaaagaactttagcaactttcccagacaatacttcgcattaagaaaaattcttaagcagctgattgccgacgtgacattagatccagagactgctcatcccaacctagtgttgtccgaggaccggaagagcgtgaaatttgttgagacaaggctcagggacctgccagacactcccaggagattcaccttttatccatgcgtgctggctaccgaaggcttcacttctggaaggcattactgggaggtggaggtgggtgacaagacccattgggcagtgggcgtctgtcgggactctgtctcaaggaagggcgagctcacaccccttcctgagaccggatactggagggtgcggctgtggaacggcgacaaatatgccgcaaccaccacacctttcaccccgcttcacatcaaagtcaagcctaaaagagtgggtatctttttggattatgaagctggaaccctttcattttacaatgttacggacagatcccacatttataccttcaccgacacgtttaccgagaaactctggcccctcttttaccccggaatccgagcaggcaggaagaatgcagctcctctgacaattagacctcccacagactgggaatag

SEQ ID NO: 247820 - DNA, 1467 bp, Artificial Sequence
  derived and/or modified sequence
atggccgagacaagcttactggaggccggagcatccgccgcttcaacagccgcagccctggagaatctccaagtggaggcaagttgctcagtgtgtctagaatatctgaaggaacccgtgatcatcgaatgtggccataacttctgtaaggcgtgcatcacaagatggtgggaggatctcgagagagattttccctgtcccgtctgccgcaagactagtcgctacaggagtctgaggcccaaccgccagttgggaagtatggtggagatcgcaaagcagttacaagcggtcaagcgaaaaatcagagatgaatctttatgtccacaacaccatgaagccctttcactcttttgctacgaggatcaggaggccgtctgtctgatctgcgccatttcccacacccacagagctcatactgtcgtgcccctcgacgatgccacacaggaatataaggagaagttgcagaaatgcctcgaaccactggagcaaaaactgcaggaaattaccaggtgcaagtcatccgaagagaagaagccaggtgaattaaaaagacttgtagagagtcggaggcagcagattcttcgagagtttgaggagctccaccgaagattggacgaggagcaacaggtgctgctctctcgactggaggaggaagaacaggatatactccagcggctgcgcgaaaacgctgcccacctcggggacaagcgcagggaccttgcccatcttgcagcagaagtggaagggaagtgcctgcagtccgggttcgagatgttaaaggatgtgaaatctacattggagaaatgcgagaaggtgaaaactatggaggtcaccagcgtttctattgaactcgaaaagaatttcagtaatttcccaagacagtactttgcgttgcgaaagatcttaaaacaacttatcgcagatgtcaccctcgaccccgagacagctcacccaaatctggtcctgtctgaagaccgtaagtctgttaaattcgtggagactcgcctgcgggaccttcctgatactcctcgtagattcacattctacccctgcgtgttggccacagagggtttcaccagcggtcggcattactgggaggtcgaggtcggcgacaaaacacactgggcagttggagtgtgccgtgattccgtttcgagaaagggtgagctcacaccactgccagaaaccgggtattggcgcgtgcgcttgtggaatggtgataaatacgcggcaacgacgaccccatttaccccgctacacatcaaggtgaagccaaagcgagtcggaatatttctggattacgaggccggaactctcagcttttacaacgtgactgatcgctcccatatttataccttcaccgacactttcacagagaaactgtggcccctcttttatcccggaatccgtgcaggccgaaagaacgccgctcccctgaccatccgccctcctactgattgggaatag

SEQ ID NO: 247821 - DNA, 786 bp, Artificial Sequence
  derived and/or modified sequence
atggcagaaactagtctcctggaggccggtgccagtgcagcctcgacagctgccgcactggaaaaccttcaggtggaggccagttgtagcgtctgtctggaatacctgaaggagcccgtgattatcgagtgcgggcacaacttttgcaaagcttgcattaccaggtggtgggaggacctggagcgagactttccatgtcctgtgtgccggaaaactagtcgctaccgctccctgcgccctaatcgacagctgggcagcatggtggaaatcgctaagcagctccaggccgttaagaggaagatccgtgacgagtcactgtgtcctcagcaccatgaggcacttagtctgttctgctacgaagaccaggaagccgtgtgcctgatatgcgccatttcccacactcacagagcacacaccgtagtccccctagacgatgccacacaggaatacaaagaaaaactccagaagtgtcttgagcctctggaacagaaactgcaggaaatcacacggtgtaagtcttctgaggagaagaaaccaggggagctgaaacgtctggtggagtccaggcgtcagcagatcttgagagagtttgaggagcttcaccggaggctggacgaggagcaacaggtgttacttagtcgcctcgaggaggaggaacaggatattctacagagactgagagaaaacgcggctcacttgggggataagagaagggatctagctcatttggctgccgaggttgagggcaaatgtctgcaatcgggtttcgagatgcttaaagtctag

SEQ ID NO: 247822 - DNA, 225 bp, Artificial Sequence
  derived and/or modified sequence
atggccgagacgtcactgctcgaggcaggcgctagtgcagcaagtactgcggcagcactcgaaaacctgcaggtggaagccagctgctctgtgtgtctggagtacctaaaagaaccagtgattattgaatgcggacataacttctgtaaggcttgtatcactcgttggtgggaggatctggagagggacttcccttgtccggtctgtagaaaaacaagccggtag

SEQ ID NO: 247823 - DNA, 1236 bp, Artificial Sequence
  derived and/or modified sequence
atggccgagacctcactgctggaagcaggagctagtgccgcttcaacggctgctgctttagagaaccttcaggtggaggcaagctgctctgtctgcctcgaatatctaaaagaacctgtgattatcgagtgtggacacaatttctgcaaagcatgtattacgcggtggtgggaagacttagagcgtgatttcccatgtccagtgtgcagaaaaactagccggtatcgaagtctgcggcctaataggcagctgggatcaatggtggagatcgccaaacaactccaggccgtgaaacgcaagatcagagacgaatctctctgccctcagcatcatgaggccctaagtctgttttgttacgaagatcaagaggctgtctgcctcatttgtgctatttctcatacacatagagcccacaccgttgtgccactggacgacgctacgcaggaatacaaggagaagcttcaaaaatgtcttgagcccctcgaacagaagctccaagaaattacccgttgcaaaagcagtgaagagaagaaaccaggcgagttgaaacgcttagtagaaagcagaagacagcaaattctgagggagttcgaggagctgcatcggaggctggatgaagaacagcaagtccttctgtcccgcctggaagaagaggagcaggatatccttcagaggttgcgggaaaacgcggcacatctaggagacaaaaggagagatcttgcgcaccttgctgccgaggtggagggcaaatgcctgcagagcggcttcgagatgctgaaacccgtgttgtcagcaagggaggagtgcgagaaagtgaagacaatggaagtgacaagcgtgtcaatcgagctggagaaaaatttttcgaacttccccagacagtactttgcgcttcgaaagatcctaaagcagttgattgcagacgtgactctggatccagaaacagcacaccccaacttagtgctgagtgaagatcgcaaatcagtcaagttcgtcgaaacccgcctgcgtgacctccccgatactcctcggaggtttacattttacccttgtgtcctcgctacggaggggtttacaagtggaaggcactactgggaggtggaggtcggcgataagacccattgggccgttggcgtgtgtcgggattcggtttctaggaagggagggtgtgggtacggcatgggtacaaacatgcaacctcctccccatctcttaccactatgcacaagtcggtag

SEQ ID NO: 247824 - DNA, 1467 bp, Artificial Sequence
  derived and/or modified sequence
atggctgaaacttcccttctggaagctggtgcttcagcggcttctaccgccgctgctctggaaaacctccaagtggaagcgtcatgttcagtgtgcctggagtatttgaaagagcccgtcataatcgagtgtggacataatttctgtaaggcctgcatcacccgttggtgggaagaccttgagagagacttcccatgccctgtctgtcggaaaaccagtaggtacagatccttgaggccaaatagacagctgggaagtatggtggagatcgccaagcagctccaggctgtgaaacgaaagataagggatgaaagtctgtgcccgcagcaccacgaggccctctcgcttttttgctacgaagaccaggaagcagtgtgcctgatctgcgcaatttcacacacccacagagctcacaccgtggtgcctctggatgatgccactcaggaatataaggaaaaactacagaagtgtttggagcctctcgaacaaaagttgcaggagatcactcggtgcaagagtagcgaagagaagaaacctggggagctgaaaaggctggtggagtccaggcgacagcaaatactgagggagttcgaggagctccatcgccgtctcgacgaggaacagcaggtcctgttatccaggctagaagaagaggagcaggatatcttgcagcgcctgagggagaacgctgcccacctgggtgataagagaagggaccttgcccacctcgctgcggaggtggaaggcaagtgcctgcagagtggctttgaaatgctgaaggacgtgaaatctaccctggagaagtgcgagaaggtcaaaaccatggaagtgacctccgtgagcatcgaactcgagaagaacttcagtaatttcccacggcagtattttgctctccgtaaaatcctgaagcagctgatcgccgatgtgacactggatccggagacagctcatcctaacctagtcctgtccgaggatagaaagagcgttaagttcgttgagacccggctgcgagacttacccgatactcctcgcagattcaccttctacccatgcgtgttagccactgagggattcactagtggcaggcattattgggaggtagaggtcggcgataaaacccattgggctgtgggcgtctgcagagacagcgtctcccgaaagggtgaactcaccccacttccagagaccggatactggcgggtgaggctgtggaacggcgataaatacgccgcaactaccactccttttacacctctccatattaaagtcaagcccaaaagggtaggcattttcttagattatgaggcaggcacactctcattttataacgtgaccgatagaagccacatatatacattcaccgacacattcacagagaagctctggcccctgttctaccccggaattagggccggacgcaaaaatgcagcccctttgacaattcgcccacccaccgattgggagtag

SEQ ID NO: 247825 - DNA, 786 bp, Artificial Sequence
  derived and/or modified sequence
atggccgagacttccctgctggaagcgggagcttcagccgcatctacagccgctgccctcgagaatctgcaggtggaggccagttgctccgtttgcctggaatacctgaaagagccagtgatcatagagtgcggccacaatttttgtaaggcatgcataactagatggtgggaggatctggagcgcgacttcccctgccctgtttgccgaaagacatcaaggtaccggagccttcggccaaacaggcaattgggttcaatggtggagattgcaaaacagctgcaggccgtgaaaagaaaaatacgggatgaatctttatgcccgcagcaccatgaggccctgagtctgttctgttacgaagaccaggaggcggtgtgtctcatttgcgctatatctcatactcatagggcccacactgtggtaccactcgacgatgcgacccaggaatataaggagaagcttcagaagtgcctagagcccctggagcaaaagttacaagaaatcaccagatgcaagagtagtgaggaaaagaaacccggagagctaaaacggcttgtggaaagtcggaggcaacagattttgcgcgaatttgaggagcttcatcgacggctcgacgaggagcaacaagtgctgctgtctaggctggaggaggaggagcaggatatcctgcagaggcttcgggagaatgccgctcatcttggggataaacggagagatctcgcgcacctcgcggctgaagtggagggcaagtgtctccagtctggcttcgagatgttgaaagtgtag

SEQ ID NO: 247826 - DNA, 147 bp, Artificial Sequence
  derived and/or modified sequence
atggctgaaacaagccttctggaggcaggcgcaagcgcagcctctactgccgcagccttagaaaatctccaagtggaggcctcctgttccgtgtgcttagaatacttgaaggagccagtgatcatagaatgcggtcataatttttag

SEQ ID NO: 247827 - DNA, 786 bp, Artificial Sequence
  derived and/or modified sequence
atggccgagacttcactgctggaagccggagcaagcgctgcctcaaccgctgcagccctcgagaatttacaggttgaagcttcttgcagcgtgtgtctggaatatctgaaggagcccgtgataattgaatgcggccacaatttttgtaaggcttgcatcacccggtggtgggaggatctagagcgcgactttccctgtccggtttgccgtaaaacctccaggtaccgctcacttaggcccaaccggcagctcggcagcatggtggagatcgccaaacagctgcaggccgtgaaacgcaagattagggacgagtcactgtgtccccagcatcacgaagccctgtctttgttctgctacgaggaccaggaggcagtttgtttgatatgtgcaattagtcacacccatagagcccacaccgtcgtgcccttggatgatgcgactcaagagtataaggagaagctgcagaagtgtctcgagcctctcgagcaaaagctgcaggagataacccgctgcaagtcaagcgaggaaaagaagccaggagagctcaaaagactggtcgaaagtagacggcagcaaatcctgcgcgagtttgaagagctgcataggcggcttgacgaggagcaacaagtcttgctaagtcgcctggaggaggaggaacaggatatcctgcaaagacttcgtgaaaatgctgcccatctcggcgacaaacgcagagacctcgcccacctggctgcagaagtggagggcaagtgccttcaatccggtttcgagatgctgaaagtctag

SEQ ID NO: 247828 - DNA, 1467 bp, Artificial Sequence
  derived and/or modified sequence
atggcggagaccagcctgttggaggccggagcgtccgccgcttcaacagccgctgcccttgaaaatctgcaggtggaggctagctgtagtgtttgcttagagtatctcaaagaacctgtgattatcgaatgtggtcataatttttgcaaggcttgcattacacgctggtgggaagatctggagcgtgactttccatgccccgtgtgtaggaaaacttcgcgttatcggagtctgaggcccaatcggcagctgggcagtatggtggaaattgcaaaacagctgcaggctgttaagcgaaaaatccgagacgagtccctctgcccccaacatcatgaagccctcagcctcttttgttatgaagaccaggaagcagtctgtttaatttgcgctatttctcacactcatcgtgctcacaccgtggtgcccctagatgacgccacgcaggaatacaaagaaaaacttcagaaatgcctcgaaccactggagcagaaactccaggaaattacccggtgcaaatccagtgaggagaaaaaacctggcgaactgaaaagactggtcgaaagcaggcgccagcagattctgcgtgaatttgaagaactgcacaggcgattagacgaggagcagcaagttctgctgagccgcctggaggaggaggaacaggacatactgcagagactgcgtgaaaacgccgcacatttaggagataagaggcgagaccttgctcacctagccgctgaggtcgaggggaaatgcctgcagtccggttttgaaatgctgaaggacgtcaagagtaccttggaaaaatgcgagaaagtgaagactatggaggtaacatccgtcagcattgagttggagaagaatttttccaatttccccaggcaatatttcgcccttcgtaaaattcttaagcaacttattgcagacgtcacactggatcccgagacggcccatcccaatctggtgctgagcgaagaccggaagtccgtgaagttcgtggagacacgtctccgcgatctgcccgataccccccgacgcttcaccttttacccctgtgtcctagcgaccgaaggctttacaagcggcagacactattgggaggtggaggtgggagataagacccattgggccgtcggggtttgtcgagattctgtcagccgcaagggagagctcactcccctgcccgagaccggttattggagagtacgcctgtggaatggcgacaaatatgccgcaacaactaccccttttacacctctgcatataaaagtaaagcccaagcgcgtaggcatatttctggactacgaagctggcacactctcattctacaatgtgacggaccggagccacatctacaccttcacggacacttttacggaaaagttgtggcccctcttctaccccggtatccgagctggtcgaaagaatgccgcacccctcacaatcaggccaccaacagactgggagtag

SEQ ID NO: 247829 - DNA, 225 bp, Artificial Sequence
  derived and/or modified sequence
atggccgaaacttcactcctcgaggccggtgccagtgccgcaagcactgccgctgccctcgaaaacctgcaagtggaagcctcttgttctgtctgtctcgagtatctcaaagaacccgtgatcattgaatgtggccataacttctgcaaggcctgtatcacgcgctggtgggaggacctcgaacgggactttccctgcccagtttgccggaagacctcccgatag

SEQ ID NO: 247830 - DNA, 1467 bp, Artificial Sequence
  derived and/or modified sequence
atggcagaaaccagccttctagaggcaggcgcttccgccgcttctactgcggcagctctcgaaaacctgcaagtcgaagcatcttgctccgtctgtctcgagtatctaaaggagccggtgattattgagtgcggtcacaacttctgcaaagcctgtatcactcgctggtgggaagacctcgagcgggattttccctgtccagtttgccgcaagacgtcccgctatagatctctgcgtcccaatcgtcagcttgggagtatggttgaaatcgcgaagcaacttcaggccgtgaagagaaagattagagacgagtctctttgcccacaacaccacgaggccctgtctctgttttgctatgaagatcaggaagctgtctgtctgatctgtgcgatttcacacacccacagggcccatacggtggtgccacttgacgacgcgacacaggaatataaagaaaagctgcagaaatgtctggaaccactggaacagaagctgcaagaaatcacccgctgcaaatctagcgaagagaagaaaccgggtgagttgaaacggctcgtggagtccaggagacaacagatcctgcgggaattcgaagaactgcaccgcaggctggacgaagagcagcaagtgttgctgtcaagactggaggaggaggaacaagacattttgcagcggcttagagagaatgctgcccacctgggggacaaacgccgagacctcgcacaccttgctgccgaggtcgaggggaagtgtctgcagagtggttttgagatgttgaaagacgtaaaaagcactcttgagaagtgcgaaaaagtgaagaccatggaggtgaccagtgtgtctattgagctagagaaaaacttttccaatttccctcggcagtacttcgctttgaggaagattctgaagcagctgatcgcagacgtgaccttagatcccgaaacggcccacccaaatctcgttctaagcgaagatcgcaaatcagtgaaatttgtcgagaccaggctacgggatctgcctgacacgcctcggagattcactttctatccttgcgtgttggccaccgagggattcacctccgggcgacactattgggaagttgaagtcggtgataaaacccattgggcagtaggggtgtgcagagactccgtgtcccgtaaaggggaactcacgcccctacctgaaactggctattggcgagtgaggctttggaacggcgataagtatgccgcaacgaccactcccttcacgccccttcatatcaaggtaaagcctaagagagtcggaattttcctggattatgaggctggcacactgtctttctataatgtcaccgacaggagccacatttatactttcaccgacacattcacagaaaaactgtggccgctcttttatccaggaataagggccggtaggaagaacgcggcacccctcaccatcaggccaccaaccgattgggaatag

SEQ ID NO: 247831 - DNA, 1467 bp, Artificial Sequence
  derived and/or modified sequence
atggccgaaacatcactactggaggcaggtgccagcgccgcatctaccgcagccgctttagagaacctgcaggttgaagcttcttgttcagtgtgcctggagtacctcaaggagccagtcattatcgagtgcggacacaatttttgcaaagcgtgtatcactcgctggtgggaagacctggaacgggatttcccctgcccagtgtgccggaaaactagccggtaccgttccctgcggccaaaccggcaattgggatcgatggtggagattgccaagcagctacaggctgtaaagcgcaagatccgagatgagtccctgtgccctcaacatcatgaagcattatccctattctgctacgaagaccaggaagctgtgtgtctgatctgtgccatatctcacacccacagagctcacaccgtcgtgccattagacgatgcaacccaagagtacaaagaaaagctccagaagtgccttgagcctctggagcaaaagctgcaagaaataacaaggtgtaagtcctccgaggaaaagaagcccggtgagctgaagcgcttggtcgagtcccgcagacagcaaattttgagggagttcgaggagctgcaccgacgcctcgacgaagaacagcaggtattgcttagtaggctggaagaggaagagcaggacattttgcaaaggcttagagaaaacgccgcacacctgggcgataagaggagggatcttgcccatctggctgccgaggtcgagggtaaatgcctgcagagtggcttcgagatgctcaaggacgtaaaatctactcttgaaaaatgcgagaaggtgaagacaatggaggtgacttcagtgtctattgaactcgagaagaatttctctaatttcccgagacagtattttgccttgaggaagattctgaaacagctgatagccgacgtgactctggacccagaaactgcccatcctaatctagtgctatcagaggacagaaaaagcgtgaaatttgtggaaacgaggttaagggacctcccagacacacctcgtcggttcaccttttatccctgtgtactggccacagaggggtttacaagtggcagacattactgggaggttgaggtcggcgacaagacccattgggccgttggagtctgccgtgattcagtctcccgcaaaggggagctcacaccattaccagagaccgggtactggcgggttcgcctgtggaatggagacaagtacgccgcaactacgactcccttcacaccattacacatcaaggtaaagcccaagcgggtcggcatattcctggactacgaggccggaacactgtctttttataacgtcaccgatcggtcccatatctatacattcactgatactttcacagagaaattatggccactcttttatcccggaattcgagccggaaggaagaacgcagcccctcttactatccggcctcccacggactgggagtag

SEQ ID NO: 247832 - DNA, 435 bp, Artificial Sequence
  derived and/or modified sequence
atggcagagacaagtctcctcgaggccggagcaagtgctgcatctacagcagctgccctggagaatttgcaggtcgaggcatcttgttctgtatgtcttgaatacctgaaggagcctgtcattatagaatgcggccacaatttttgcaaggcctgcattactcggtggtgggaagatcttgaaagagacttcccttgccccgtatgccgcaagacctcgcggtaccggtccttaaggcctaatagacagctggggtccatggtagagatcgctaaacagctacaagcagtgaagcggaagattcgggacgagtccctgtgcccacaacaccatgaagcccttagtcttttctgctacgaagatcaggaggctgtatgcctgatctgtgccataagtcatactcatcgcgctcataccgtggtgccactggattag

SEQ ID NO: 247833 - DNA, 435 bp, Artificial Sequence
  derived and/or modified sequence
atggccgaaacatccctgcttgaagccggtgcttccgccgctagtactgctgccgctctggaaaatctgcaggtagaggcaagctgcagcgtttgtcttgagtatctcaaagaaccagtgattattgagtgcggacacaatttctgcaaggcgtgtattactaggtggtgggaagacctggagcgggatttcccatgccctgtgtgccgaaagacttcaagatatcggtctctcagacctaaccgccaactggggtctatggtggagatcgctaaacagctacaggccgtgaaaagaaaaatccgcgacgagtccttgtgccctcaacatcacgaagccctttccctgttctgctacgaagaccaggaggctgtctgcctgatttgtgctatctctcatacgcatcgagcacacactgtggtgccgcttgattag

SEQ ID NO: 247834 - DNA, 684 bp, Artificial Sequence
  derived and/or modified sequence
tgaacctccaggtatcggagtctcagacctaaccggcaactgggaagcatggtggagattgcaaaacagttgcaggcagtcaaacggaagatccgggacgagagcctgtgcccccaacatcacgaggcattaagtctcttctgctacgaggaccaggaggctgtttgcctaatctgcgcaatctctcacacacaccgtgcccacaccgttgttccacttgatgacgccactcaggaatataaagaaaaactgcagaagtgcctggagccactggagcagaagctgcaggaaataacccgatgcaagtcgtccgaggagaagaaacccggtgaactgaaacgtttggtggaaagtcgcaggcaacaaatactgagggagtttgaggaactgcaccggcgactggatgaagagcagcaggtgcttctctccaggctggaggaagaagagcaggacatccttcagcgattgcgagaaaacgctgcccacctgggagataagcgtagagacctcgctcatctggccgcagaagttgagggcaagtgcctgcagagcggcttcgaaatgctgaaggacgtgaagtccaccctggagaagtgtgagaaggtgaaaaccatggaggttactagcacaaccccatgcacctctctgcactctgaaattaatgataatgtgcgagggagatag

SEQ ID NO: 247835 - DNA, 147 bp, Artificial Sequence
  derived and/or modified sequence
atggccgagactagcttgttggaagccggagcctcagccgcttctactgcggctgcgttggaaaacctccaggttgaggcctcgtgctcagtgtgtctggaatatctcaaagaacccgtgataatcgagtgcggtcataatttttag

SEQ ID NO: 247836 - DNA, 435 bp, Artificial Sequence
  derived and/or modified sequence
atggcagaaactagcctgctggaggccggagcatctgccgcttctactgctgcagctctggaaaacctgcaggttgaggccagctgctccgtatgtcttgaatatttaaaagagccagtgattatcgagtgcggccataatttttgtaaagcctgcattaccaggtggtgggaggatcttgagcgcgattttccctgccctgtctgtcggaaaacctcaagatatcggtctttgcggcctaataggcagctcggctccatggtggaaatagctaagcagctgcaagccgtaaagcggaagattagagatgaaagcctgtgtccccagcatcatgaggctctcagcctcttctgttatgaagatcaggaggccgtgtgtctcatctgtgccattagccatacccaccgggctcataccgtagttcctctagattag

SEQ ID NO: 247837 - DNA, 1467 bp, Artificial Sequence
  derived and/or modified sequence
atggccgagacgtccctgctagaagccggagctagtgcagctagtaccgcagctgccctggaaaatctccaggttgaagcctcttgctctgtgtgcctcgagtacctgaaagagcccgttataattgagtgtggtcataatttctgtaaggcgtgtatcaccaggtggtgggaagacctagaaagggacttcccctgtcctgtgtgcagaaagacaagtcggtatcggagcctgcgcccaaaccggcagctgggttcaatggtagaaatagcgaaacagctacaggcagtaaagcgcaagatacgagacgagtccctgtgtcctcaacatcacgaggctcttagcctgttttgttacgaggaccaggaggccgtgtgcctgatctgtgctatctcccacactcatcgggcacatacagtggtcccactggatgacgctacacaagagtacaaggagaaactccaaaagtgcctggagcctttggagcagaaactccaggagattacacggtgcaaatcttcggaggaaaaaaagccgggagagctgaagcgtcttgtcgagagtaggcggcaacagatcctcagggagttcgaggagctgcatcggagactggatgaggaacagcaagtgttactttctaggctggaggaggaagagcaggacatcttgcaaaggttaagagagaacgccgctcacctgggcgataagcgaagggatctagcccatcttgctgctgaagttgaaggaaagtgcctccaaagtggattcgaaatgctaaaagatgtgaaatccaccctggagaaatgcgaaaaagtaaaaacgatggaggtgacatcagtgtcgatcgagttggagaagaatttttccaacttcccaagacagtattttgccctgcgtaaaatcttaaaacagttgatcgcagatgtgaccctggatcccgaaacagcccatcctaacctggtcctgtccgaagaccggaagagcgtgaaattcgtggagacaagacttcgcgacttgccagacacccccaggcgtttcactttttatccttgtgttttggccacagaggggtttacatctggccgtcactattgggaagtggaggttggcgataaaacacactgggccgtaggcgtctgccgcgactccgtcagcaggaagggagaactgactcccctgccagaaactggctattggagagtgagactatggaacggcgacaagtatgctgccacgaccacaccctttactcctctgcatatcaaagttaagcccaagcgcgtcggaatctttctcgattacgaggcaggcactctctcattttacaatgtcactgaccggtcccacatatataccttcaccgatactttcactgaaaagctgtggccacttttttatccagggattagggctgggagaaagaacgctgccccattaactatcagacccccaactgattgggaatag

SEQ ID NO: 247838 - DNA, 1467 bp, Artificial Sequence
  derived and/or modified sequence
atggctgagacctcactcctggaagcaggcgcaagcgccgctagcactgccgcagctctggaaaacctccaggtggaggccagctgttccgtgtgtctggagtacttgaaagaacccgttataatagagtgtggtcataacttttgcaaggcgtgcataacgcgctggtgggaagaccttgagagagattttccatgtcctgtctgccggaagacttctcggtaccgcagtctgcgtccgaacagacaactaggatccatggtcgagatcgccaagcagctacaggctgtcaaacggaagatccgcgacgaatccctgtgtcctcagcaccatgaagccttatcacttttctgctacgaagaccaggaagctgtgtgtttgatctgcgcaatatcgcacactcatagggcacacaccgttgtgccacttgatgacgctacccaggaatacaaggagaaattgcagaagtgtctggagcccctggagcagaaactacaggaaataaccaggtgcaaaagttccgaggaaaagaagccaggggaattgaagcgattggttgaaagcagacgccagcagatacttagagagttcgaggagttgcaccgaagacttgatgaagagcagcaggtcctgcttagccgactggaagaggaagagcaggatattttgcaaagactgagagagaacgcagcacacctgggcgataagcgtagagatctggcacacctggcagctgaagtcgaggggaaatgtttacagtcggggttcgagatgctcaagccggtgctgtctgccagagaggaatgcgaaaaagtgaagacaatggaggtcacatccgtgtcaatcgagcttgagaaaaacttttctaattttccacggcaatattttgcactgaggaagatcctgaaacagctcatcgccgacgtcactctggatcctgagactgcccacccaaacttggtgctgagcgaagaccgtaaatccgtaaaatttgtagaaacacgacttagagacttgcctgacacgccccgtaggttcaccttctacccctgcgtcctagccaccgagggtttcacatctggacgtcactactgggaggtcgaagtgggcgacaagacacactgggcagtgggagtgtgtagagactccgtgtcccggaagggcgaactcacacctctgccagagaccggatattggcgggtcaggctgtggaatggggacaaatatgcagccacaacaactccatttaccccactacatattaaggtgaagccaaagcgagtgggcattttcctggactatgaagcaggaaccctttcattttataacgtgaccgacagaagtcacatttacacatttacagacactttcactgagaagttatggccacttttttaccccggtataagggcaggtaggaagaacgcagccccattaactatcaggcccccaactgattgggagtag

SEQ ID NO: 247839 - DNA, 1236 bp, Artificial Sequence
  derived and/or modified sequence
atggcagagacgagcttgttggaagctggggcatctgccgctagtaccgctgctgcccttgagaatctgcaagtggaggctagctgtagtgtgtgtctggagtatctgaaagagccagttatcatcgaatgcggacacaatttctgcaaggcctgcattactagatggtgggaggacttagagagggactttccatgccccgtctgcaggaagacctctcgctaccgatcactgagaccgaatagacagcttggaagcatggtggagattgcgaagcaactgcaggccgtgaagagaaaaataagagacgaatctttgtgccctcaacaccacgaagcactttccctgttttgctacgaggaccaggaagccgtgtgtttgatttgcgccatctcccatacacaccgagcccataccgtagtgcccctagatgacgctacacaggagtacaaagaaaagttgcaaaagtgcctggaaccactcgaacagaagttacaagagattactcgttgcaagagctccgaagaaaaaaaacccggtgagctgaaacggctcgtggaatccaggcggcaacagatcctccgggaattcgaggagctccatcggagacttgacgaggagcagcaggtcctcctcagtcggctagaggaggaagagcaggacatcctgcagcgattgcgagagaatgccgctcatctcggggacaaacgaagggatctggctcacttagcggctgaggtcgaaggtaagtgcttgcaatcgggatttgaaatgctgaagccagtcctatctgcaagggaggagtgtgaaaaagtcaagacaatggaggtgacaagcgtttcaatcgagctcgaaaaaaactttagcaatttccctcgccagtatttcgcactgcgtaaaatactgaaacaactgatcgcagatgttaccctcgacccagagacggcccaccctaatctcgtgctgtccgaggacaggaagagcgtcaagttcgtcgaaactcgtttgcgggacctccctgatacacctcggaggtttaccttttacccctgtgtccttgccactgagggctttaccagcggccgtcattactgggaagtagaggtgggggacaagactcactgggctgtgggtgtctgcagagattccgtgagccgcaaagggggatgtggatacgggatgggcactaatatgcagcctccaccccacctgcttcctctctgcacttcccgatag

SEQ ID NO: 247840 - DNA, 1467 bp, Artificial Sequence
  derived and/or modified sequence
atggcagagacttcactcctggaggctggggcatccgcggcatctacggcagccgcactcgaaaatctccaggtggaggctagctgctcagtctgcctggaatatctcaaggagccagtgattatcgagtgcggccataatttctgtaaagcatgcataacacgctggtgggaagaccttgaacgcgattttccctgtccggtctgcaggaagaccagccgttaccggtcacttagacccaatcgacaactggggagcatggtcgaaatagccaaacagttacaagcagtgaaacgcaaaattagggacgagtccctgtgtccccaacaccacgaagccctgtccctgttctgctacgaagaccaggaagcagtgtgtcttatctgtgcaattagccacacccatcgggctcacactgtggtgccacttgatgatgccacccaggaatacaaagagaagctgcagaagtgcttggaaccattagaacaaaaactgcaagagattacccggtgtaagagtagcgaggagaaaaaaccaggggagctgaagaggcttgtggaatctagaaggcagcagattttgcgggagtttgaggaacttcatcgcaggctggacgaggagcagcaagttctgctgtccaggctcgaagaagaggaacaggacatccttcagagacttcgagagaacgcggcacatctgggtgataaacggcgtgacctcgcacatcttgctgccgaagtggagggaaagtgtttgcagtcagggttcgagatgctgaagcccgttctcagcgctagagaggagtgtgagaaggtcaaaaccatggaggtgactagtgtatccatagagttggagaaaaatttttcaaatttcccaagacaatatttcgccctacgcaaaattttgaagcaactgatcgccgatgtaacattggaccctgaaactgcacatcccaacctagtactctctgaagaccgtaaaagtgtgaaattcgtggagacacgactgagggacttgccagacactccaagacgattcactttctacccttgtgtgctcgctaccgaagggttcacctccgggagacactactgggaggtggaggttggtgacaaaactcattgggcagttggggtgtgtagggatagtgtctcccgcaagggcgagttgactccactgcccgagactggctactggagggtgaggctgtggaatggcgacaaatacgctgccacaacaacccctttcaccccactccacattaaggtgaaacccaagcgcgttggcatcttcctcgactacgaagctggtaccctgagtttctacaacgtgaccgatagaagtcatatctacacctttaccgatacatttacagagaagttatggcctctgttttacccaggtattagggcagggaggaagaatgccgctccactcactatccgccctcccacagattgggagtag

SEQ ID NO: 247841 - DNA, 1467 bp, Artificial Sequence
  derived and/or modified sequence
atggctgagacgagcttgctggaagccggagcatctgctgccagtactgcagctgctctggagaacctgcaggtggaggctagctgtagcgtgtgtctggagtacttaaaggaaccggtgattattgaatgtggccacaacttctgtaaggcatgcatcacccggtggtgggaggatttagagcgcgactttccttgtccagtgtgcagaaaaacctctaggtaccggtctctccgcccaaatagacaactgggatctatggttgagatcgcaaaacagctccaggccgtgaagaggaagataagggacgagagtctgtgcccccaacaccatgaggccctcagtctgttttgttatgaggaccaggaagcagtttgcctgatttgtgccatctcccacactcaccgagcccacactgtggtacctctcgatgatgccactcaggaatataaggaaaagctgcaaaagtgtctcgagcccctcgagcaaaaattacaggagatcacacggtgtaaatccagcgaggagaaaaagcctggagagctgaaacgccttgttgagtcacgacggcagcaaatactgagagagttcgaggaactgcatcgcagactagacgaggagcagcaagtcttactatcaaggctggaggaagaggagcaggatatcctgcaacggctccgcgagaacgctgcgcacttgggggataagagaagagatctcgcccatttggcggctgaagtcgaaggcaagtgtctccagtcagggttcgaaatgcttaagcctgtccttagcgcccgagaagaatgcgaaaaggttaagacgatggaggtcaccagcgtttctatcgagctggagaagaatttcagtaattttccaagacagtatttcgccttgagaaaaattctcaagcagctgatcgccgatgtgacgcttgatccagaaactgcccaccctaatctggtgctcagcgaggatagaaagtcagtcaaattcgtggagacacggctgcgcgatctgcccgacaccccacggcgttttacattctacccttgcgtcctggccacggaaggtttcacgagcggacgccactactgggaggtcgaggtcggcgacaagacccattgggccgtcggggtgtgcagagactcagtgtcacgtaaaggggaattaacccccctccccgaaactggttattggcgggttcgactttggaatggtgacaaatacgctgcaacgaccaccccttttacccccctccatatcaaggtgaaacccaaacgtgtgggaatttttctagactacgaagccggaacattgtcattctataatgtcaccgaccgcagccacatttatacctttacagataccttcacggaaaagctgtggcctctcttctatccgggaattagagctgggcgtaagaatgctgcaccgctcacaattcggccacctacagactgggagtag

SEQ ID NO: 247842 - DNA, 1467 bp, Artificial Sequence
  derived and/or modified sequence
atggcagaaacaagcctgcttgaggccggagcatcggccgcttccacggccgcagcactcgagaatcttcaggtggaggcgtcctgtagtgtgtgtctggaatacctgaaggaaccagtaattatagagtgtggacacaacttctgtaaggcctgcatcactagatggtgggaggacctggagcgcgacttcccttgtcctgtgtgccggaaaaccagcaggtatcgaagtctgcgacccaatcgtcagctagggtccatggttgaaatagccaagcagctacaggcagtgaaacgtaaaatccgtgacgaatcgttgtgccctcagcaccatgaggcactctctctgttctgttatgaggatcaggaagctgtctgtctcatttgtgccatttctcacacccatcgggcacataccgtcgttcccctcgatgatgctacccaggaatacaaagaaaaattgcagaagtgtctggagcccctggaacagaaactgcaggaaatcacgcggtgtaaatcttcagaggagaaaaaaccgggagagcttaaaaggctggtcgaaagtagaaggcagcagatcctgagagagttcgaggagctgcaccggagactggatgaggagcagcaggtgctcttgtcgaggctggaggaagaggaacaggacatcctgcagcgcctgagagagaacgccgcacatttgggcgataagagaagagacttggctcacctggcagccgaagtggaaggaaagtgtctccaaagcggttttgaaatgctgaaaccagtcctgtcagccagagaagagtgtgaaaaagtgaagaccatggaggtgacatcggtctctatcgaactggaaaagaacttctctaacttcccccgacagtatttcgccctccgcaaaattctcaagcagctcattgccgatgtgacactggaccccgaaacagcgcaccccaatcttgtgcttagcgaggacagaaaatctgttaagtttgtggagacgcggctcagggacctccctgatacccccagaaggtttaccttctacccttgtgtcctagccaccgagggctttacatcaggacggcattattgggaagttgaagtcggtgacaagacacattgggccgtcggagtttgcagggattccgtgagcagaaagggggagttgacccctctccccgaaaccgggtactggagagtgagactgtggaatggagacaagtatgcggctaccaccaccccttttacacctctgcatatcaaggtaaagccaaagagggtgggcatatttctcgactacgaagcaggaaccctgagcttttacaatgttacggaccgctcccatatatatacgtttacagacacctttaccgagaagctgtggcctctgttctaccctggtatacgtgccggaagaaaaaacgccgctccactcaccattagacctccaaccgactgggagtag

SEQ ID NO: 247843 - DNA, 1467 bp, Artificial Sequence
  derived and/or modified sequence
atggctgagaccagtctacttgaagcaggtgcctctgcagcctcaactgccgcagcactggaaaacctgcaggtggaggcctcttgctccgtgtgcctagaatacctgaaagaacccgtgattatcgagtgcggacataatttctgtaaagcctgcattacacgctggtgggaggatctggagagggatttcccttgccctgtgtgtagaaagacttcccgatatcggtctcttagaccaaaccggcagctaggctccatggtcgagatcgctaaacagctgcaggcagttaagaggaaaattagggatgagtctttgtgcccgcaacaccacgaggctttgagcctgttctgctatgaggatcaagaggctgtctgcctgatatgtgccattagccatacccaccgagcccacactgtcgtgcccctagacgacgctacccaggagtacaaggagaaactgcagaaatgtctcgaaccattggaacaaaagttacaggaaatcaccaggtgcaaatcatcggaagagaaaaagccaggcgagctcaagcggcttgtggagagcaggaggcaacagatcctccgagaattcgaagagttgcatagacgtcttgatgaggagcagcaagtcctcttgagtcgacttgaagaagaggagcaagatatcttgcagcggctaagagaaaatgccgcacatttgggggataagagacgcgaccttgcccacctcgccgctgaagttgagggaaagtgtctgcagtccggcttcgagatgctgaagccagtgttatctgcacgcgaggaatgtgagaaggtgaaaacaatggaggtcacttcggtcagcatcgagctggagaagaatttttcaaactttcccagacagtacttcgcactgaggaagattctgaagcagctcattgcagatgttaccttggaccccgagactgcacatcccaaccttgtgttaagcgaggaccgaaaatccgtgaagtttgtagaaacccggcttcgggatctgcctgatacccctaggcgattcacattctacccttgcgttcttgctacagagggatttactagtggtcgtcactactgggaggttgaggtgggtgacaagacccattgggctgttggggtgtgccgggattcagtgtctagaaaaggagagcttacacctctgcccgagacaggatattggcgtgttcgattgtggaatggggacaagtatgccgctacaacaacaccctttacgcctttacacatcaaggttaaacctaagcgcgttggcatattccttgactatgaggcaggaacgctgtctttttataatgtaaccgaccggagtcatatctacacgtttaccgacacctttactgaaaagctttggccgttgttctacccaggcatcagagccggaaggaagaatgccgctcctctgaccattcgcccaccgactgactgggaatag

SEQ ID NO: 247844 - DNA, 1236 bp, Artificial Sequence
  derived and/or modified sequence
atggccgaaacaagcctactggaggccggagcgtcggcagcttcaactgctgctgccctggaaaatctgcaggtggaggcaagttgcagtgtatgcctggagtacctaaaggagccagtaatcattgagtgcggacataatttctgtaaggcctgcattacacggtggtgggaagacctcgagcgcgactttccatgccctgtatgccggaaaacttcgcgctacagaagcctaaggcccaataggcagctggggtctatggttgaaattgcgaagcagcttcaggcagtgaagcgaaagattcgtgacgagtccttgtgtccacagcaccatgaagctctgtcactgttctgctacgaggaccaggaggcagtttgcttgatttgtgctatttcccatactcaccgcgcacacaccgttgtgcccctcgacgacgccactcaggagtataaggagaaactgcagaagtgcctcgagcccctggagcagaaactccaggagattacgagatgcaaatcttcagaagaaaagaaacccggtgaactcaaacggctagtggagtcacggagacaacagatactgcgagaattcgaagaattacaccggagactggacgaggagcagcaggtattactgtcacgactagaggaggaagaacaggacatcctgcaacggttgcgcgagaatgcagcccacttgggcgataagcggagagacctggctcacctggccgctgaggttgagggcaagtgtcttcaaagtggcttcgagatgctgaagccagtgctgagcgctagggaggagtgcgagaaggtgaaaacaatggaagtcacaagcgtgagtatcgaattggaaaagaatttttcaaacttcccaaggcagtacttcgcactgagaaagatcttgaaacagctcatcgccgacgtcacccttgatccggagacagcacatcccaacttggtgttgtccgaagaccgcaagtccgtgaaattcgtcgagacacgtctgcgagatcttccggacacgcctcgacggttcacattttatccctgcgtcctggctacagagggctttacttctgggcgacactactgggaggtggaggtaggcgataaaacccattgggctgtgggagtgtgccgggattctgtgtcccgcaaaggtggatgcggctatggcatgggcacaaatatgcaacctcccccacatcttctccccctttgcacaagtagatag

SEQ ID NO: 247845 - DNA, 1236 bp, Artificial Sequence
  derived and/or modified sequence
atggccgagaccagtctgcttgaagcaggcgcaagcgccgcatctacagctgcagccctagaaaatttacaggttgaggccagctgctccgtgtgtctcgaatatctcaaggagccagtaataatcgagtgcgggcacaatttctgtaaggcctgtataaccagatggtgggaagatttagagagggacttcccatgtcccgtgtgccggaagacctcccggtatcgttcacttaggcctaaccggcagctcggcagcatggtcgagatcgctaaacagttacaggccgtgaagcggaagatcagggacgaatctttatgcccacagcaccatgaagctttaagcctcttttgttatgaggatcaagaggctgtctgtctcatctgcgccatctctcatacacacagagcacatacggtcgtgcctcttgacgatgcgacacaagagtacaaagagaaattgcaaaaatgcttagaaccccttgagcagaagctgcaggagattactcgttgcaagagttccgaggaaaagaagccaggtgagcttaagcggctagtcgaatctcggagacaacagatcctacgggaattcgaagaacttcacagaagactggacgaagagcagcaagtcctgctctccaggttggaggaggaggagcaggacatattgcagaggctcagagaaaacgcagcccatctgggcgacaagaggagggaccttgcccaccttgccgctgaggtcgagggcaaatgtctccaatcaggctttgagatgctgaaacccgtgctgagtgccagggaagagtgtgagaaggtcaagacaatggaagttacgtctgtaagtatcgagctcgagaagaatttctccaatttcccgagacaatactttgctctccgtaagattctgaaacagctgattgcggatgtgactctggatcctgaaacggcccacccaaacctggtgctatcggaagataggaagagcgtcaaattcgtggaaacgagacttcgggatctcccagacactcctcggcgatttactttctacccttgtgtgttggccaccgaaggattcacgtccggacgacactattgggaggtggaggtgggcgataaaacccactgggcggttggagtctgcagagattccgtgtcacgcaagggaggatgtggctatggtatggggacaaacatgcagcccccaccccatctactgcccctgtgtacttccagatag

SEQ ID NO: 247846 - DNA, 1236 bp, Artificial Sequence
  derived and/or modified sequence
atggccgagacctcactgctcgaggctggggcatcggcagctagtaccgccgctgccctagaaaatctccaggtggaagcctcgtgttccgtgtgtttggagtatctcaaggagcctgtgattatcgaatgtggtcacaatttctgtaaggcctgtatcacccgctggtgggaggacctcgagagagattttccctgtcctgtctgtcggaaaacatccagatataggtctttgcgcccaaatcgtcagcttggctcaatggtggaaattgcaaagcagctgcaggcggtaaagcgcaaaattagggacgagtctttgtgccctcagcaccatgaagccttgtcccttttctgctatgaagatcaggaagccgtctgtctgatctgtgcaattagccacacacatcgggctcataccgtggtccctctagatgatgcgacacaagaatacaaagagaaactgcagaaatgcctggaacctctggaacagaaactgcaggagattacaagatgtaagagtagtgaagaaaagaagcccggagaactaaaacggttggtcgagagcagacggcagcagatcctacgagagtttgaggagctccacagacgactcgacgaggagcagcaggtgcttctgtcccggctggaagaggaagagcaggacatcctccagaggctgagagagaatgccgctcatttgggagacaaacgccgagatttggcccacctggcggcagaagttgaagggaagtgtctgcagagcggcttcgagatgttgaaaccagtgttatctgcacgggaggaatgcgaaaaggtcaaaaccatggaagtgacatccgtatcaattgaattagagaagaattttagcaattttccaagacagtacttcgcgctccgtaagattctcaaacagttgatcgcggacgtgactctagatcccgaaaccgcccaccccaatctggtcctctccgaggacaggaagtctgtcaagtttgtcgagacccggctgagggacctgcccgacaccccaaggagatttactttctacccgtgtgttctcgccactgaagggtttacctcagggaggcattactgggaagtcgaagtgggcgacaagacgcattgggcagtcggcgtgtgtcgggattccgtatccaggaagggcggatgtggctacgggatgggaactaatatgcagcctccgcctcacctgttgcctctctgcacctcacgctag

SEQ ID NO: 247847 - DNA, 1236 bp, Artificial Sequence
  derived and/or modified sequence
atggccgagacatcactgctcgaagccggtgcctccgccgctagcacagccgcagcgctcgaaaatctgcaagtggaggccagttgttcagtctgcctggaatacttgaaggaacccgtgatcatcgagtgtgggcataatttctgtaaggcttgtatcactcgatggtgggaggacctcgagcgagattttccatgtccggtgtgtaggaagacaagcaggtaccgaagcctgagacccaaccgccagcttggctctatggtggaaattgcaaagcagctacaggctgtgaaacggaaaattagagacgaatctctatgccctcaacaccatgaggcactgagcctgttctgttatgaggaccaggaagctgtgtgtcttatctgcgctatctcgcatacccaccgggctcatactgtggtccccctggatgatgcgacacaggagtacaaggaaaaactgcaaaagtgtctggagccacttgaacagaaactgcaggaaattaccaggtgtaaaagctctgaggagaaaaagcctggggaactaaaaaggttagtggaatcccggagacaacaaatccttagggaattcgaggagctgcatcgcaggctcgacgaagagcagcaagtgctgctgtcaagactcgaggaagaggaacaggatattcttcaacgcctccgcgagaatgctgcacatcttggggacaaaagaagagatttagcccaccttgctgccgaagttgaggggaaatgtctgcagtctggctttgaaatgctcaaaccggtgctcagcgccagagaagagtgcgaaaaagttaagaccatggaagtaacctctgtctccatagagctggagaaaaacttcagtaattttccacggcagtactttgctctgaggaagatcttaaaacagctcatcgctgatgtcactctggacccagagactgctcacccgaatttagttctctccgaggaccgtaaaagcgtgaagttcgtggagactagactcagggatctgcctgacaccccaagacgatttaccttttatccgtgtgtcttggctacagaagggttcacttccgggaggcattactgggaggttgaagtgggtgacaagacacattgggctgtgggcgtttgccgggattccgtctctaggaagggaggctgcggctacgggatgggtacaaatatgcagccaccaccacacctattgcccctctgtacatcacggtag

SEQ ID NO: 247848 - DNA, 1236 bp, Artificial Sequence
  derived and/or modified sequence
atggctgaaacatctctgttagaggctggtgctagcgctgcgagtacagccgcagctctggaaaacctgcaagtggaagcatcatgtagcgtgtgccttgagtacctgaaggagcctgtgattattgagtgcggacataatttctgcaaggcttgcatcactcggtggtgggaggacctggaacgcgacttcccctgccccgtttgtagaaagacaagtcggtatcggtcactgcgaccaaaccgacagctgggcagcatggtcgagatcgcaaaacagctgcaggcagtgaagcggaagatccgcgacgagtccttatgtccccaacatcatgaggccctgagcttgttctgttacgaggatcaagaagcagtgtgcttaatctgcgccatttctcatacccaccgcgcacatacagtggtcccactcgacgatgcaacccaggagtataaagagaagctgcagaagtgtctcgagccattagagcaaaagttgcaggaaatcacaagatgcaagagcagtgaagagaagaagcccggagagctcaagaggctggtagaaagtcggagacaacagatcctgcgcgagttcgaggaattacaccgcaggttggatgaggagcaacaggtacttctaagcaggcttgaggaagaggaacaggatatactgcaaagactgcgggaaaacgcggctcatctgggggacaagcgcagagatcttgcacatttggccgctgaggtggagggaaagtgtctccagtcagggttcgagatgttgaaacccgtgttgagcgcgagggaagagtgtgagaaagttaaaaccatggaagtgacatctgtgtcaattgaattggaaaaaaacttctctaacttccctcgtcagtactttgccttacgcaagattctgaagcaactgatcgcagacgtgacgctggaccccgaaactgctcacccgaacctagtcctgtccgaggataggaaatccgtaaaattcgtggagacgcggttgagagacctgccagacaccccacgaagattcaccttctacccttgcgtactggcgacagaaggctttacttcagggcgacactactgggaggtggaggtaggagataaaacacattgggcagtgggagtgtgcagagactcagtgagcaggaaggggggatgtggctatgggatgggaactaacatgcagccccctccccatctcctgccactgtgtacttcgaggtag

SEQ ID NO: 247849 - DNA, 1467 bp, Artificial Sequence
  derived and/or modified sequence
atggccgaaacatcactccttgaagcaggggctagtgcagcaagcaccgctgcggctttggaaaacttgcaagtggaggcaagttgcagtgtgtgcttagaatacctgaaggaacctgtgatcatcgaatgtggtcataacttttgcaaggcctgcatcacacggtggtgggaagatctggagagagatttcccttgccctgtctgccgaaagacttctcggtaccggtctctgagacctaatcgtcagctgggctccatggtggagatcgctaaacagctgcaggcggttaagcgaaagatccgagatgagtcactgtgcccacagcaccacgaagccttatcgctcttttgctatgaggatcaagaggcagtttgcctcatctgcgccatatctcatacccatcgggctcacaccgtggtgcccctggatgatgccacacaggagtacaaggagaaactgcagaagtgtctggagcccctggaacagaaactccaggagatcactcggtgcaagagtagtgaggagaagaaacccggagaattaaagcgcttagtcgaatcccggaggcaacagatcctccgagaattcgaagagctgcatcggcgactggatgaagaacagcaggtgcttctcagtcgtcttgaagaggaggaacaagacatcctgcagcgactgcgagagaatgcagcacatctgggcgataagagacgggacctggcacatttggccgctgaggtcgagggcaagtgtttacagtcaggcttcgagatgctgaagccggtgttatcagcacgcgaagaatgcgagaaggtcaagactatggaggtaacttcggtgagtatagagctggagaagaacttttcgaacttcccccgtcagtattttgctttgagaaagatcttgaaacaattgatcgccgacgtaaccctggaccccgagacagcccaccctaatctcgttctaagtgaggaccggaagagcgtcaaattcgtggaaaccagattgcgtgacctccccgacacccccagacggttcactttttacccatgcgtgctggccacagaaggttttacttccggccgtcactactgggaagtggaggtcggcgataaaactcattgggctgtgggagtttgcagggactctgtgtccagaaagggcgagctcacaccgttgccagagacagggtactggcgggtcaggctctggaatggcgataaatatgccgctacaaccaccccattcacccctctgcacatcaaagtgaagcctaagagagtcggcatttttttagattatgaggctggcaccctaagtttttataacgtgactgatcggtcacatatctacaccttcactgacacatttactgaaaagttgtggcctctcttctacccagggattagggccggaaggaaaaatgccgcaccactgacaattcgacccccaactgattgggagtag

SEQ ID NO: 247850 - DNA, 1467 bp, Artificial Sequence
  derived and/or modified sequence
atggccgaaacgagtctgctagaggccggtgccagcgccgcttcaacagccgctgcgctcgagaatctgcaggtcgaggcctcatgcagcgtgtgtctcgaatacttaaaggaaccggtcatcatcgagtgcggacacaatttttgcaaggcttgcattactagatggtgggaggacctcgaacgagactttccatgcccagtctgtcgaaagacaagtcggtatagatccctccggcctaatcgacagttgggaagcatggtggagattgcgaaacagctgcaggccgtgaagagaaaaattagggacgagagcctgtgcccccagcaccatgaggccctctcactcttctgttacgaggaccaagaagccgtgtgtctcatttgtgcgattagccatacacatcgagctcacacggtggtgcccctggacgacgcaactcaagaatacaaggaaaaactgcaaaagtgtcttgagcccctggagcagaagctccaggagatcactcggtgcaagtcttccgaggagaagaagcccggagagctcaagagactggtggagtcaaggaggcagcagattctgagagagttcgaagaactgcatcggagactagacgaagagcagcaggttctgctctctcggctggaagaagaggagcaggacattctccagcgcttaagggagaatgctgctcacctgggcgataaacgcagggatctggcccatttggcagccgaagttgaaggaaaatgtctccaaagtggattcgagatgcttaagcccgtgttaagcgccagagaggaatgtgagaaagtcaagactatggaggtgacaagtgtctcaatcgaactggagaagaacttttccaatttccctaggcagtatttcgcattgagaaagatcctgaagcagctgatcgctgacgtgacactggatccagagacagcacatcccaatctcgtgttgtcagaggatagaaagagcgtgaaattcgttgagaccagactgcgggacctgcccgataccccgcgacgctttaccttctacccctgtgtgctggctacagagggattcaccagcggtcgacattactgggaggtggaagtcggggataaaacacactgggccgttggtgtttgtcgggatagtgtcagtaggaagggagagctgacacccttacccgaaacaggctattggcgggttcggctatggaatggcgacaaatatgctgccacgacaaccccatttacacctctccatatcaaagtcaagcccaaaagggtgggaattttcctggattacgaggccggaacactctccttttataacgttaccgacaggtcacatatctacaccttcacagacacctttacggaaaagctgtggcccctcttctaccccggtatccgggcaggacggaagaatgccgcaccgctgacgatacgcccacctactgattgggaatag

SEQ ID NO: 247851 - DNA, 3535 bp, Artificial Sequence
  derived and/or modified sequence
cggcagcgtcatagcggcgggcatcccatctgcacgtcacacctctttctcacctggacacgcatcccttcctaccctgccagccacgacgtttcctctttcccctctccaatgccccagccccagatctggcggaagaagatggagaacgggggtgggacagagttgtggacaacctctcaggagagggtcgcaaggtgggaccctgaacagtggtagaaacaaaatgagattgtccctgaagtttgcccttcagctgagacacaaggagtagaggaagaggaaggactaacgcagaggcactcaaggtctcactatgactgtagttgagagtcctctcccttcttccctaaccctttccccatttctctcaccacttctttgccagtctagatccgtcctggtgccttactgtgcatacagttctactcgtctcagattcctttcttgtctgttagaaacgtatgtcaaacgaggatacagtgtctggaactattggttctaagatataagtggaatgagcctggatcaggagaagtatgctgagctagagttgaaggaagcttctctttctaacaagagaaagcagagttaaattatggcagagacaagtctgttagaggctggggcctctgcagcctctacagctgcggctttggagaacttacaggtggaggcgagctgctctgtgtgcctggagtatctgaaggaacctgtcatcattgagtgtgggcacaacttctgcaaagcttgcatcacccgctggtgggaggacctagagagggacttcccttgtcctgtctgtcgaaagacatcccgctaccgcagtctccgacctaatcggcaactaggcagtatggtggaaattgccaagcagctccaggccgtcaagcggaagatccgggatgagagcctctgcccccaacaccatgaggccctcagccttttctgttatgaggaccaggaggctgtatgcttgatatgtgcaatttcccacacccaccgggcccacaccgttgtgccactggacgatgctacacaggagtacaaggaaaaactgcagaagtgtctggagcccctggaacagaagctgcaggagatcactcgctgcaagtcctctgaggagaagaagcctggtgagctcaagagactagtggaaagtcgccgacagcagatcttgagggagtttgaagagcttcataggcggctggatgaagagcagcaggtgttgctttcacgactggaagaagaggaacaggacattctgcagcgactccgagaaaatgctgctcaccttggggacaagcgccgggacctggcccacttggctgccgaggtggagggcaagtgcttacagtcaggcttcgagatgcttaaggatgtcaaaagtaccctggaaaaatgtgaaaaggtgaagaccatggaggtgacttcagtatccatagagctggaaaagaacttcagcaattttccccgacagtactttgccctaaggaaaatccttaaacagctaattgcggatgtgaccctggaccctgagacagctcatcctaacctagtcctgtcagaggatcgtaagagcgtcaagttcgtggagacaagactccgggatctccctgacacaccaaggcgtttcaccttctacccttgcgtcctggctactgagggtttcacctcaggtcgacactactgggaggtggaggtgggcgacaagacccactgggcagtgggtgtatgccgggactccgtgagccgaaagggcgagttgactccactccctgagactggctactggcgggtgcggctatggaatggggacaaatatgcagccaccaccacaccttttacccctttgcacatcaaggtgaaacccaagcgggtaggcatattcctagactatgaggccggcacactgtctttctacaatgtcacagaccgctctcatatctacaccttcactgatacttttactgagaaactttggcccctcttctacccaggcatccgggctggacggaagaatgctgcaccacttaccatcaggcccccaacagattgggagtgacaggttgggatgtgggaatgactggggtgaggcagggtcaagtgctacgggcctccttcccgtgtcctgctggaacgtcttcgtgtccacctgggtccagtcctgaatcatcttggagaaacaccttggtttctaggatggttttgtgtggagggggaggtaggactgggctggatgagagagcacagctgtgacttcctcctaactgtcagggtggggagctggttcccagaggattgtctaccctgaagtccatcaggttttctgttgcacaaggacgggtcaggaaggaaggagaggcttttccagaaacaaaaaatctgtgagggtctgacttgctcaaaccagaggaggaaacagaaacccctgcacatctttttagggggttctttgacccaggatagtcttgcttcttgaggtagatcacaggggtctgtgtacctctgaattcatgagagatgaatgacagatgctctcatgggtctagatattgaggagtttttctgagggcagagattggacatcaacaaggctagaagggtcagggaagtgggctaaaggaacagattcctagagattaatgaagaggagggaggtttctttggtcttctattccaagggtaaggttgcgattatgggtaagattggccagaggtaggaatgtggggagaaggagaggctgaaaagaaagcagaggagaacccaggtccctgcctcagccttcagcagagttggcttattgcctgcctctataccaataagtcagtcaccttgctcctctccagaggcaaagtggaagagatcctgcaagacacatctatcctttcacagtgttcccaagggaacttggaaaggagagtcaggtattagaggaaagagaagggtatttgtatacaaagccctggccttaaagaatgttacttagtagctactcccaaattgtcagccttcttacctggccaaggtgtccaagccagaaaggaaaaaaggttatggagtctttctcaccctaaggacagggtggaagagggtggtatatagggaagggccagataggcaacttcatttggcttgtgtgcatctggcctggaactggtgttaagccaggcttttgcttgtttgttgccatccctcaccctttgccatttcccttttcagagaatgtaaatgattttcatgttaggccaaaataaacaacttatagggtacatatgttgtcataaaaggtaaaagtgatgcatgccaaaccaaactaaaccaatttggattatctgctattcgggtaatcttcacagaaatgactgagagaagaatctgcagtttactgagggcatttcagttcctcctaccacctcaacaggactttgtccagactctcctcctcttacctttgtgccttgactgtggttctttgtggcaagatactttggttggttaaaataatatggaacaaaggatccactgaagtga

SEQ ID NO: 247852 - DNA, 3198 bp, Artificial Sequence
  derived and/or modified sequence
gcgaggggaggaggaaggagggaggcagcgctccggcggctccgcgccccgcactcccggacccgaagccgggaagatccgtcctggtgccttactgtgcatacagttctactcgtctcagaaacgtatgtcaaacgaggatacagtgtctggaactattggttctaagatataagtggaatgagcctggatcaggagaagtatgctgagctagagttgaaggaagcttctctttctaacaagagaaagcagagttaaattatggcagagacaagtctgttagaggctggggcctctgcagcctctacagctgcggctttggagaacttacaggtggaggcgagctgctctgtgtgcctggagtatctgaaggaacctgtcatcattgagtgtgggcacaacttctgcaaagcttgcatcacccgctggtgggaggacctagagagggacttcccttgtcctgtctgtcgaaagacatcccgctaccgcagtctccgacctaatcggcaactaggcagtatggtggaaattgccaagcagctccaggccgtcaagcggaagatccgggatgagagcctctgcccccaacaccatgaggccctcagccttttctgttatgaggaccaggaggctgtatgcttgatatgtgcaatttcccacacccaccgggctcacaccgttgtgccactggacgatgctacacaggagtacaaggaaaaactgcagaagtgtctggagcccctggaacagaagctgcaggagatcactcgctgcaagtcctctgaggagaagaagcctggtgagctcaagagactagtggaaagtcgccgacagcagatcttgagggagtttgaagagcttcataggcggctggatgaagagcagcaggtgttgctttcacgactggaagaagaggaacaggacattctgcagcgactccgagaaaatgctgctcaccttggggacaagcgccgggacctggcccacttggctgccgaggtggagggcaagtgcttacagtcaggcttcgagatgcttaaggatgtcaaaagtaccctggaaaaatgtgaaaaggtgaagaccatggaggtgacttcagtatccatagagctggaaaagaacttcagcaattttccccgacagtactttgccctaaggaaaatccttaaacagctaattgcggatgtgaccctggaccctgagacagctcatcctaacctagtcctgtcagaggatcgtaagagcgtcaagttcgtggagacaagactccgggatctccctgacacaccaaggcgtttcaccttctacccttgcgtcctggctactgagggtttcacctcaggtcgacactactgggaggtggaggtgggcgacaagacccactgggcagtgggtgtatgccgggactccgtgagccgaaagggcgagttgactccactccctgagactggctactggcgggtgcggctatggaatggggacaaatatgcagccaccaccacaccttttacccctttgcacatcaaggtgaaacccaagcgggtaggcatattcctagactatgaggccggcacactgtctttctacaatgtcacagaccgctctcatatctacaccttcactgatacttttactgagaaactttggcccctcttctacccaggcatccgggctggacggaagaatgctgcaccacttaccatcaggcccccaacagattgggagtgacaggttgggatgtgggaatgactggggtgaggcagggtcaagtgctacgggcctccttcccgtgtcctgctggaacgtcttcgtgtccacctgggtccagtcctgaatcatcttggagaaacaccttggtttctaggatggttttgtgtggagggggaggtaggactgggctggatgagagagcacagctgtgacttcctcctaactgtcagggtggggagctggttcccagaggattgtctaccctgaagtccatcaggttttctgttgcacaaggacgggtcaggaaggaaggagaggcttttccagaaacaaaaaatctgtgagggtctgacttgctcaaaccagaggaggaaacagaaacccctgcacatctttttagggggttctttgacccaggatagtcttgcttcttgaggtagatcacaggggtctgtgtacctctgaattcatgagagatgaatgacagatgctctcatgggtctagatattgaggagtttttctgagggcagagattggacatcaacaaggctagaagggtcagggaagtgggctaaaggaacagattcctagagattaatgaagaggagggaggtttctttggtcttctattccaagggtaaggttgcgattatgggtaagattggccagaggtaggaatgtggggagaaggagaggctgaaaagaaagcagaggagaacccaggtccctgcctcagccttcagcagagttggcttattgcctgcctctataccaataagtcagtcaccttgctcctctccagaggcaaagtggaagagatcctgcaagacacatctatcctttcacagtgttcccaagggaacttggaaaggagagtcaggtattagaggaaagagaagggtatttgtatacaaagccctggccttaaagaatgttacttagtagctactcccaaattgtcagccttcttacctggccaaggtgtccaagccagaaaggaaaaaaggttatggagtctttctcaccctaaggacagggtggaagagggtggtatatagggaagggccagataggcaacttcatttggcttgtgtgcatctggcctggaactggtgttaagccaggcttttgcttgtttgttgccatccctcaccctttgccatttcccttttcagagaatgtaaatgattttcatgttaggccaaaataaacaacttatagggtacatatgttgtcataaaaggtaaaagtgatgcatgccaaaccaaactaaaccaatttggattatctgctattcgggtaatcttcacagaaatgactgagagaagaatctgcagtttactgagggcatttcagttcctcctaccacctcaacaggactttgtccagactctcctcctcttacctttgtgccttgactgtggttctttgtggcaagatactttggttggttaaaataatatggaacaaaggatccactgaagtga

SEQ ID NO: 247853 - DNA, 3535 bp, Artificial Sequence
  derived and/or modified sequence
cggcagcgtcatagcggcgggcatcccatctgcacgtcacacctctttctcacctggacacgcatcccttcctaccctgccagccacgacgtttcctctttcccctctccaatgccccagccccagatctggcggaagaagatggagaacgggggtgggacagagttgtggacaacctctcaggagagggtcgcaaggtgggaccctgaacagtggtagaaacaaaatgagattgtccctgaagtttgcccttcagctgagacacaaggagtagaggaagaggaaggactaacgcagaggcactcaaggtctcactatgactgtagttgagagtcctctcccttcttccctaaccctttccccatttctctcaccacttctttgccagtctagatccgtcctggtgccttactgtgcatacagttctactcgtctcagattcctttcttgtctgttagaaacgtatgtcaaacgaggatacagtgtctggaactattggttctaagatataagtggaatgagcctggatcaggagaagtatgctgagctagagttgaaggaagcttctctttctaacaagagaaagcagagttaaattatggcagagacaagtctgttagaggctggggcctctgcagcctctacagctgcggctttggagaacttacaggtggaggcgagctgctctgtgtgcctggagtatctgaaggaacctgtcatcattgagtgtgggcacaacttctgcaaagcttgcatcacccgctggtgggaggacctagagagggacttcccttgtcctgtctgtcgaaagacatcccgctaccgcagtctccgacctaatcggcaactaggcagtatggtggaaattgccaagcagctccaggccgtcaagcggaagatccgggatgagagcctctgcccccaacaccatgaggccctcagccttttctgttatgaggaccaggaggctgtatgcttgatatgtgcaatttcccacacccaccgggctcacaccgttgtgccactggacgatgctacacaggagtacaaggaaaaactgcagaagtgtctggagcccctggaacagaagctgcaggagatcactcgctgcaagtcctctgaggagaagaagcctggtgagctcaagagactagtggaaagtcgccgacagcagatcttgagggagtttgaagagcttcataggcggctggatgaagagcagcaggtgttgctttcacgactggaagaagaggaacaggacattctgcagcgactccgagaaaatgctgctcaccttggggacaagcgccgggacctggcccacttggctgccgaggtggagggcaagtgcttacagtcaggcttcgagatgcttaaggatgtcaaaagtaccctggaaaaatgtgaaaaggtgaagaccatggaggtgacttcagtatccatagagctggaaaagaacttcagcaattttccccgacagtactttgccctaaggaaaatccttaaacagctaattgcggatgtgaccctggaccctgagacagctcatcctaacctagtcctgtcagaggatcgtaagagcgtcaagttcgtggagacaagactccgggatctccctgacacaccaaggcgtttcaccttctacccttgcgtcctggctactgagggtttcacctcaggtcgacactactgggaggtggaggtgggcgacaagacccactgggcagtgggtgtatgccgggactccgtgagccgaaagggcgagttgactccactccctgagactggctactggcgggtgcggctatggaatggggacaaatatgcagccaccaccacaccttttacccctttgcacatcaaggtgaaacccaagcgggtaggcatattcctagactatgaggccggcacactgtctttctacaatgtcacagaccgctctcatatctacaccttcactgatacttttactgagaaactttggcccctcttctacccaggcatccgggctggacggaagaatgctgcaccacttaccatcaggcccccaacagattgggagtgacaggttgggatgtgggaatgactggggtgaggcagggtcaagtgctacgggcctccttcccgtgtcctgctggaacgtcttcgtgtccacctgggtccagtcctgaatcatcttggagaaacaccttggtttctaggatggttttgtgtggagggggaggtaggactgggctggatgagagagcacagctgtgacttcctcctaactgtcagggtggggagctggttcccagaggattgtctaccctgaagtccatcaggttttctgttgcacaaggacgggtcaggaaggaaggagaggcttttccagaaacaaaaaatctgtgagggtctgacttgctcaaaccagaggaggaaacagaaacccctgcacatctttttagggggttctttgacccaggatagtcttgcttcttgaggtagatcacaggggtctgtgtacctctgaattcatgagagatgaatgacagatgctctcatgggtctagatattgaggagtttttctgagggcagagattggacatcaacaaggctagaagggtcagggaagtgggctaaaggaacagattcctagagattaatgaagaggagggaggtttctttggtcttctattccaagggtaaggttgcgattatgggtaagattggccagaggtaggaatgtggggagaaggagaggctgaaaagaaagcagaggagaacccaggtccctgcctcagccttcagcagagttggcttattgcctgcctctataccaataagtcagtcaccttgctcctctccagaggcaaagtggaagagatcctgcaagacacatctatcctttcacagtgttcccaagggaacttggaaaggagagtcaggtattagaggaaagagaagggtatttgtatacaaagccctggccttaaagaatgttacttagtagctactcccaaattgtcagccttcttacctggccaaggtgtccaagccagaaaggaaaaaaggttatggagtctttctcaccctaaggacagggtggaagagggtggtatatagggaagggccagataggcaacttcatttggcttgtgtgcatctggcctggaactggtgttaagccaggcttttgcttgtttgttgccatccctcaccctttgccatttcccttttcagagaatgtaaatgattttcatgttaggccaaaataaacaacttatagggtacatatgttgtcataaaaggtaaaagtgatgcatgccaaaccaaactaaaccaatttggattatctgctattcgggtaatcttcacagaaatgactgagagaagaatctgcagtttactgagggcatttcagttcctcctaccacctcaacaggactttgtccagactctcctcctcttacctttgtgccttgactgtggttctttgtggcaagatactttggttggttaaaataatatggaacaaaggatccactgaagtga

SEQ ID NO: 247854 - DNA, 3198 bp, Artificial Sequence
  derived and/or modified sequence
gcgaggggaggaggaaggagggaggcagcgctccggcggctccgcgccccgcactcccggacccgaagccgggaagatccgtcctggtgccttactgtgcatacagttctactcgtctcagaaacgtatgtcaaacgaggatacagtgtctggaactattggttctaagatataagtggaatgagcctggatcaggagaagtatgctgagctagagttgaaggaagcttctctttctaacaagagaaagcagagttaaattatggcagagacaagtctgttagaggctggggcctctgcagcctctacagctgcggctttggagaacttacaggtggaggcgagctgctctgtgtgcctggagtatctgaaggaacctgtcatcattgagtgtgggcacaacttctgcaaagcttgcatcacccgctggtgggaggacctagagagggacttcccttgtcctgtctgtcgaaagacatcccgctaccgcagtctccgacctaatcggcaactaggcagtatggtggaaattgccaagcagctccaggccgtcaagcggaagatccgggatgagagcctctgcccccaacaccatgaggccctcagccttttctgttatgaggaccaggaggctgtatgcttgatatgtgcaatttcccacacccaccgggcccacaccgttgtgccactggacgatgctacacaggagtacaaggaaaaactgcagaagtgtctggagcccctggaacagaagctgcaggagatcactcgctgcaagtcctctgaggagaagaagcctggtgagctcaagagactagtggaaagtcgccgacagcagatcttgagggagtttgaagagcttcataggcggctggatgaagagcagcaggtgttgctttcacgactggaagaagaggaacaggacattctgcagcgactccgagaaaatgctgctcaccttggggacaagcgccgggacctggcccacttggctgccgaggtggagggcaagtgcttacagtcaggcttcgagatgcttaaggatgtcaaaagtaccctggaaaaatgtgaaaaggtgaagaccatggaggtgacttcagtatccatagagctggaaaagaacttcagcaattttccccgacagtactttgccctaaggaaaatccttaaacagctaattgcggatgtgaccctggaccctgagacagctcatcctaacctagtcctgtcagaggatcgtaagagcgtcaagttcgtggagacaagactccgggatctccctgacacaccaaggcgtttcaccttctacccttgcgtcctggctactgagggtttcacctcaggtcgacactactgggaggtggaggtgggcgacaagacccactgggcagtgggtgtatgccgggactccgtgagccgaaagggcgagttgactccactccctgagactggctactggcgggtgcggctatggaatggggacaaatatgcagccaccaccacaccttttacccctttgcacatcaaggtgaaacccaagcgggtaggcatattcctagactatgaggccggcacactgtctttctacaatgtcacagaccgctctcatatctacaccttcactgatacttttactgagaaactttggcccctcttctacccaggcatccgggctggacggaagaatgctgcaccacttaccatcaggcccccaacagattgggagtgacaggttgggatgtgggaatgactggggtgaggcagggtcaagtgctacgggcctccttcccgtgtcctgctggaacgtcttcgtgtccacctgggtccagtcctgaatcatcttggagaaacaccttggtttctaggatggttttgtgtggagggggaggtaggactgggctggatgagagagcacagctgtgacttcctcctaactgtcagggtggggagctggttcccagaggattgtctaccctgaagtccatcaggttttctgttgcacaaggacgggtcaggaaggaaggagaggcttttccagaaacaaaaaatctgtgagggtctgacttgctcaaaccagaggaggaaacagaaacccctgcacatctttttagggggttctttgacccaggatagtcttgcttcttgaggtagatcacaggggtctgtgtacctctgaattcatgagagatgaatgacagatgctctcatgggtctagatattgaggagtttttctgagggcagagattggacatcaacaaggctagaagggtcagggaagtgggctaaaggaacagattcctagagattaatgaagaggagggaggtttctttggtcttctattccaagggtaaggttgcgattatgggtaagattggccagaggtaggaatgtggggagaaggagaggctgaaaagaaagcagaggagaacccaggtccctgcctcagccttcagcagagttggcttattgcctgcctctataccaataagtcagtcaccttgctcctctccagaggcaaagtggaagagatcctgcaagacacatctatcctttcacagtgttcccaagggaacttggaaaggagagtcaggtattagaggaaagagaagggtatttgtatacaaagccctggccttaaagaatgttacttagtagctactcccaaattgtcagccttcttacctggccaaggtgtccaagccagaaaggaaaaaaggttatggagtctttctcaccctaaggacagggtggaagagggtggtatatagggaagggccagataggcaacttcatttggcttgtgtgcatctggcctggaactggtgttaagccaggcttttgcttgtttgttgccatccctcaccctttgccatttcccttttcagagaatgtaaatgattttcatgttaggccaaaataaacaacttatagggtacatatgttgtcataaaaggtaaaagtgatgcatgccaaaccaaactaaaccaatttggattatctgctattcgggtaatcttcacagaaatgactgagagaagaatctgcagtttactgagggcatttcagttcctcctaccacctcaacaggactttgtccagactctcctcctcttacctttgtgccttgactgtggttctttgtggcaagatactttggttggttaaaataatatggaacaaaggatccactgaagtga

SEQ ID NO: 247855 - DNA, 3249 bp, Artificial Sequence
  derived and/or modified sequence
cccagcttccactgacacgagcctcggcgcggcttccgcttccggcgagtattgtgtgtcgcgccgcggggcgggggcgaggggaggaggaaggagggaggcagcgctccggcggctccgcgccccgcactcccggacccgaagccgggaagattcctttcttgtctgttagaaacgtatgtcaaacgaggatacagtgtctggaactattggttctaagatataagtggaatgagcctggatcaggagaagtatgctgagctagagttgaaggaagcttctctttctaacaagagaaagcagagttaaattatggcagagacaagtctgttagaggctggggcctctgcagcctctacagctgcggctttggagaacttacaggtggaggcgagctgctctgtgtgcctggagtatctgaaggaacctgtcatcattgagtgtgggcacaacttctgcaaagcttgcatcacccgctggtgggaggacctagagagggacttcccttgtcctgtctgtcgaaagacatcccgctaccgcagtctccgacctaatcggcaactaggcagtatggtggaaattgccaagcagctccaggccgtcaagcggaagatccgggatgagagcctctgcccccaacaccatgaggccctcagccttttctgttatgaggaccaggaggctgtatgcttgatatgtgcaatttcccacacccaccgggcccacaccgttgtgccactggacgatgctacacaggagtacaaggaaaaactgcagaagtgtctggagcccctggaacagaagctgcaggagatcactcgctgcaagtcctctgaggagaagaagcctggtgagctcaagagactagtggaaagtcgccgacagcagatcttgagggagtttgaagagcttcataggcggctggatgaagagcagcaggtgttgctttcacgactggaagaagaggaacaggacattctgcagcgactccgagaaaatgctgctcaccttggggacaagcgccgggacctggcccacttggctgccgaggtggagggcaagtgcttacagtcaggcttcgagatgcttaaggatgtcaaaagtaccctggaaaaatgtgaaaaggtgaagaccatggaggtgacttcagtatccatagagctggaaaagaacttcagcaattttccccgacagtactttgccctaaggaaaatccttaaacagctaattgcggatgtgaccctggaccctgagacagctcatcctaacctagtcctgtcagaggatcgtaagagcgtcaagttcgtggagacaagactccgggatctccctgacacaccaaggcgtttcaccttctacccttgcgtcctggctactgagggtttcacctcaggtcgacactactgggaggtggaggtgggcgacaagacccactgggcagtgggtgtatgccgggactccgtgagccgaaagggcgagttgactccactccctgagactggctactggcgggtgcggctatggaatggggacaaatatgcagccaccaccacaccttttacccctttgcacatcaaggtgaaacccaagcgggtaggcatattcctagactatgaggccggcacactgtctttctacaatgtcacagaccgctctcatatctacaccttcactgatacttttactgagaaactttggcccctcttctacccaggcatccgggctggacggaagaatgctgcaccacttaccatcaggcccccaacagattgggagtgacaggttgggatgtgggaatgactggggtgaggcagggtcaagtgctacgggcctccttcccgtgtcctgctggaacgtcttcgtgtccacctgggtccagtcctgaatcatcttggagaaacaccttggtttctaggatggttttgtgtggagggggaggtaggactgggctggatgagagagcacagctgtgacttcctcctaactgtcagggtggggagctggttcccagaggattgtctaccctgaagtccatcaggttttctgttgcacaaggacgggtcaggaaggaaggagaggcttttccagaaacaaaaaatctgtgagggtctgacttgctcaaaccagaggaggaaacagaaacccctgcacatctttttagggggttctttgacccaggatagtcttgcttcttgaggtagatcacaggggtctgtgtacctctgaattcatgagagatgaatgacagatgctctcatgggtctagatattgaggagtttttctgagggcagagattggacatcaacaaggctagaagggtcagggaagtgggctaaaggaacagattcctagagattaatgaagaggagggaggtttctttggtcttctattccaagggtaaggttgcgattatgggtaagattggccagaggtaggaatgtggggagaaggagaggctgaaaagaaagcagaggagaacccaggtccctgcctcagccttcagcagagttggcttattgcctgcctctataccaataagtcagtcaccttgctcctctccagaggcaaagtggaagagatcctgcaagacacatctatcctttcacagtgttcccaagggaacttggaaaggagagtcaggtattagaggaaagagaagggtatttgtatacaaagccctggccttaaagaatgttacttagtagctactcccaaattgtcagccttcttacctggccaaggtgtccaagccagaaaggaaaaaaggttatggagtctttctcaccctaaggacagggtggaagagggtggtatatagggaagggccagataggcaacttcatttggcttgtgtgcatctggcctggaactggtgttaagccaggcttttgcttgtttgttgccatccctcaccctttgccatttcccttttcagagaatgtaaatgattttcatgttaggccaaaataaacaacttatagggtacatatgttgtcataaaaggtaaaagtgatgcatgccaaaccaaactaaaccaatttggattatctgctattcgggtaatcttcacagaaatgactgagagaagaatctgcagtttactgagggcatttcagttcctcctaccacctcaacaggactttgtccagactctcctcctcttacctttgtgccttgactgtggttctttgtggcaagatactttggttggttaaaataatatggaacaaaggatccactgaagtga

SEQ ID NO: 247856 - DNA, 3249 bp, Artificial Sequence
  derived and/or modified sequence
cccagcttccactgacacgagcctcggcgcggcttccgcttccggcgagtattgtgtgtcgcgccgcggggcgggggcgaggggaggaggaaggagggaggcagcgctccggcggctccgcgccccgcactcccggacccgaagccgggaagattcctttcttgtctgttagaaacgtatgtcaaacgaggatacagtgtctggaactattggttctaagatataagtggaatgagcctggatcaggagaagtatgctgagctagagttgaaggaagcttctctttctaacaagagaaagcagagttaaattatggcagagacaagtctgttagaggctggggcctctgcagcctctacagctgcggctttggagaacttacaggtggaggcgagctgctctgtgtgcctggagtatctgaaggaacctgtcatcattgagtgtgggcacaacttctgcaaagcttgcatcacccgctggtgggaggacctagagagggacttcccttgtcctgtctgtcgaaagacatcccgctaccgcagtctccgacctaatcggcaactaggcagtatggtggaaattgccaagcagctccaggccgtcaagcggaagatccgggatgagagcctctgcccccaacaccatgaggccctcagccttttctgttatgaggaccaggaggctgtatgcttgatatgtgcaatttcccacacccaccgggctcacaccgttgtgccactggacgatgctacacaggagtacaaggaaaaactgcagaagtgtctggagcccctggaacagaagctgcaggagatcactcgctgcaagtcctctgaggagaagaagcctggtgagctcaagagactagtggaaagtcgccgacagcagatcttgagggagtttgaagagcttcataggcggctggatgaagagcagcaggtgttgctttcacgactggaagaagaggaacaggacattctgcagcgactccgagaaaatgctgctcaccttggggacaagcgccgggacctggcccacttggctgccgaggtggagggcaagtgcttacagtcaggcttcgagatgcttaaggatgtcaaaagtaccctggaaaaatgtgaaaaggtgaagaccatggaggtgacttcagtatccatagagctggaaaagaacttcagcaattttccccgacagtactttgccctaaggaaaatccttaaacagctaattgcggatgtgaccctggaccctgagacagctcatcctaacctagtcctgtcagaggatcgtaagagcgtcaagttcgtggagacaagactccgggatctccctgacacaccaaggcgtttcaccttctacccttgcgtcctggctactgagggtttcacctcaggtcgacactactgggaggtggaggtgggcgacaagacccactgggcagtgggtgtatgccgggactccgtgagccgaaagggcgagttgactccactccctgagactggctactggcgggtgcggctatggaatggggacaaatatgcagccaccaccacaccttttacccctttgcacatcaaggtgaaacccaagcgggtaggcatattcctagactatgaggccggcacactgtctttctacaatgtcacagaccgctctcatatctacaccttcactgatacttttactgagaaactttggcccctcttctacccaggcatccgggctggacggaagaatgctgcaccacttaccatcaggcccccaacagattgggagtgacaggttgggatgtgggaatgactggggtgaggcagggtcaagtgctacgggcctccttcccgtgtcctgctggaacgtcttcgtgtccacctgggtccagtcctgaatcatcttggagaaacaccttggtttctaggatggttttgtgtggagggggaggtaggactgggctggatgagagagcacagctgtgacttcctcctaactgtcagggtggggagctggttcccagaggattgtctaccctgaagtccatcaggttttctgttgcacaaggacgggtcaggaaggaaggagaggcttttccagaaacaaaaaatctgtgagggtctgacttgctcaaaccagaggaggaaacagaaacccctgcacatctttttagggggttctttgacccaggatagtcttgcttcttgaggtagatcacaggggtctgtgtacctctgaattcatgagagatgaatgacagatgctctcatgggtctagatattgaggagtttttctgagggcagagattggacatcaacaaggctagaagggtcagggaagtgggctaaaggaacagattcctagagattaatgaagaggagggaggtttctttggtcttctattccaagggtaaggttgcgattatgggtaagattggccagaggtaggaatgtggggagaaggagaggctgaaaagaaagcagaggagaacccaggtccctgcctcagccttcagcagagttggcttattgcctgcctctataccaataagtcagtcaccttgctcctctccagaggcaaagtggaagagatcctgcaagacacatctatcctttcacagtgttcccaagggaacttggaaaggagagtcaggtattagaggaaagagaagggtatttgtatacaaagccctggccttaaagaatgttacttagtagctactcccaaattgtcagccttcttacctggccaaggtgtccaagccagaaaggaaaaaaggttatggagtctttctcaccctaaggacagggtggaagagggtggtatatagggaagggccagataggcaacttcatttggcttgtgtgcatctggcctggaactggtgttaagccaggcttttgcttgtttgttgccatccctcaccctttgccatttcccttttcagagaatgtaaatgattttcatgttaggccaaaataaacaacttatagggtacatatgttgtcataaaaggtaaaagtgatgcatgccaaaccaaactaaaccaatttggattatctgctattcgggtaatcttcacagaaatgactgagagaagaatctgcagtttactgagggcatttcagttcctcctaccacctcaacaggactttgtccagactctcctcctcttacctttgtgccttgactgtggttctttgtggcaagatactttggttggttaaaataatatggaacaaaggatccactgaagtga

SEQ ID NO: 247857 - DNA, 1003 bp, Artificial Sequence
  derived and/or modified sequence
gaagagaggaaaagtgtggaagtccacaagccgcccccgccccgccctcttcgtcgactttcagctgcaccgggaggcggcggcgcctggccagagccggggcctggagcctggactagacagcctcgccggccggggcgccagtccagcgccctgcgggcaatgggcttcagcgctcgagcacgcgcatgcgcgggcctgtatctccagaggattcctcgggtcacctggacgccagcatctcagccacctgcccctctgggtcccttcttgcccttgattccccctgctgcttctcatcgccagccctcctcctccttcttccgcaggcaccgctagacccggccgcggccgcccgccgacaccccagcttccactgacacgagcctcggcgcggcttccgcttccgattcctttcttgtctgttagaaacgtatgtcaaacgaggatacagtgtctggaactattggttctaagatataagtggaatgagcctggatcaggagaagtatgctgagctagagttgaaggaagcttctctttctaacaagagaaagcagagttaaattatggcagagacaagtctgttagaggctggggcctctgcagcctctacagctgcggctttggagaacttacaggtggaggcgagctgctctgtgtgcctggagtatctgaaggaacctgtcatcattgagtgtgggcacaacttctgcaaagcttgcatcacccgctggtgggaggacctagagagggacttcccttgtcctgtctgtcgaaagacatcccgctaccgcagtctccgacctaatcggcaactaggcagtatggtggaaattgccaagcagctccaggccgtcaagcggaagatccgggatgagagcctctgcccccaacaccatgaggccctcagccttttctgttatgaggaccaggaggctgtatgcttgatatgtgcaatttcccacacccaccgggcccacaccgttgtgccactggacga

SEQ ID NO: 247858 - DNA, 708 bp, Artificial Sequence
  derived and/or modified sequence
agacatcccgctaccgcagtctccgacctaatcggcaactaggcagtatggtggaaattgccaagcagctccaggccgtcaagcggaagatccgggatgagagcctctgcccccaacaccatgaggccctcagccttttctgttatgaggaccaggaggctgtatgcttgatatgtgcaatttcccacacccaccgggcccacaccgttgtgccactggacgatgctacacaggagtacaaggaaaaactgcagaagtgtctggagcccctggaacagaagctgcaggagatcactcgctgcaagtcctctgaggagaagaagcctggtgagctcaagagactagtggaaagtcgccgacagcagatcttgagggagtttgaagagcttcataggcggctggatgaagagcagcaggtgttgctttcacgactggaagaagaggaacaggacattctgcagcgactccgagaaaatgctgctcaccttggggacaagcgccgggacctggcccacttggctgccgaggtggagggcaagtgcttacagtcaggcttcgagatgcttaaggatgtcaaaagtaccctggaaaaatgtgaaaaggtgaagaccatggaggtgacttcaactacaccttgtacttctctacatagtgagataaatgataatgtcagagggagatgaagagaggaccaggcgggaacctaga

SEQ ID NO: 247859 - DNA, 588 bp, Artificial Sequence
  derived and/or modified sequence
cgccgacaccccagcttccactgacacgagcctcggcgcggcttccgcttccggcgagtattgtgtgtcgcgccgcggggcgggggcgaggggaggaggaaggagggaggcagcgctccggcggctccgcgccccgcactcccggacccgaagccgggaagatccgtcctggtgccttactgtgcatacagttctactcgtctcagattcctttcttgtctgttagaaacgtatgtcaaacgaggatacagtgtctggaactattggttctaagatataagtggaatgagcctggatcaggagaagtatgctgagctagagttgaaggaagcttctctttctaacaagagaaagcagagttaaattatggcagagacaagtctgttagaggctggggcctctgcagcctctacagctgcggctttggagaacttacaggtggaggcgagctgctctgtgtgcctggagtatctgaaggaacctgtcatcattgagtgtgggcacaacttctgcaaagcttgcatcacccgctggtgggaggacctagagagggacttcccttgtcctgtctgtcgaaagacatcccgc

SEQ ID NO: 247860 - DNA, 459 bp, Artificial Sequence
  derived and/or modified sequence
caaggagtagaggaagaggaaggactaacgcagaggcactcaaggtctcactatgactgtagttgagagtcctctcccttcttccctaaccctttccccatttctctcaccacttctttgccagtctagatccgtcctggtgccttactgtgcatacagttctactcgtctcagaaacgtatgtcaaacgaggatacagtgtctggaactattggttctaagatataagtggaatgagcctggatcaggagaagtatgctgagctagagttgaaggaagcttctctttctaacaagagaaagcagagttaaattatggcagagacaagtctgttagaggctggggcctctgcagcctctacagctgcggctttggagaacttacaggtggaggcgagctgctctgtgtgcctggagtatctgaaggaacctgtcatcattgagtgtgggcacaacttct

SEQ ID NO: 247861 - DNA, 427 bp, Artificial Sequence
  derived and/or modified sequence
ggctccgcgccccgcactcccggacccgaagccgggaagtctagatccgtcctggtgccttactgtgcatacagttctactcgtctcagattcctttcttgtctgttagaaacgtatgtcaaacgaggatacagtgtctggaactattggttctaagatataagtggaatgagcctggatcaggagaagtatgctgagctagagttgaaggaagcttctctttctaacaagagaaagcagagttaaattatggcagagacaagtctgttagaggctggggcctctgcagcctctacagctgcggctttggagaacttacaggtggaggcgagctgctctgtgtgcctggagtatctgaaggaacctgtcatcattgagtgtgggcacaacttctgcaaagcttgcatcacccgctggtgggaggacc

SEQ ID NO: 247862 - DNA, 1003 bp, Artificial Sequence
  derived and/or modified sequence
gaagagaggaaaagtgtggaagtccacaagccgcccccgccccgccctcttcgtcgactttcagctgcaccgggaggcggcggcgcctggccagagccggggcctggagcctggactagacagcctcgccggccggggcgccagtccagcgccctgcgggcaatgggcttcagcgctcgagcacgcgcatgcgcgggcctgtatctccagaggattcctcgggtcacctggacgccagcatctcagccacctgcccctctgggtcccttcttgcccttgattccccctgctgcttctcatcgccagccctcctcctccttcttccgcaggcaccactagacccggccgcggccgcccgccgacaccccagcttccactgacacgagcctcggcgcggcttccgcttccgattcctttcttgtctgttagaaacgtatgtcaaacgaggatacagtgtctggaactattggttctaagatataagtggaatgagcctggatcaggagaagtatgctgagctagagttgaaggaagcttctctttctaacaagagaaagcagagttaaattatggcagagacaagtctgttagaggctggggcctctgcagcctctacagctgcggctttggagaacttacaggtggaggcgagctgctctgtgtgcctggagtatctgaaggaacctgtcatcattgagtgtgggcacaacttctgcaaagcttgcatcacccgctggtgggaggacctagagagggacttcccttgtcctgtctgtcgaaagacatcccgctaccgcagtctccgacctaatcggcaactaggcagtatggtggaaattgccaagcagctccaggccgtcaagcggaagatccgggatgagagcctctgcccccaacaccatgaggccctcagccttttctgttatgaggaccaggaggctgtatgcttgatatgtgcaatttcccacacccaccgggctcacaccgttgtgccactggacga

SEQ ID NO: 247863 - DNA, 708 bp, Artificial Sequence
  derived and/or modified sequence
agacatcccgctaccgcagtctccgacctaatcggcaactaggcagtatggtggaaattgccaagcagctccaggccgtcaagcggaagatccgggatgagagcctctgcccccaacaccatgaggccctcagccttttctgttatgaggaccaggaggctgtatgcttgatatgtgcaatttcccacacccaccgggcccacaccgttgtgccactggacgacgctacacaggagtacaaggaaaaactgcagaagtgtctggagcccctggaacagaagctgcaggagatcactcgctgcaagtcctctgaggagaagaagcctggtgagctcaagagactagtggaaagtcgccgacagcagatcttgagggagtttgaagagcttcataggcggctggatgaagagcagcaggtgttgctttcacgactggaagaagaggaacaggacattctgcagcgactccgagaaaatgctgctcaccttggggacaagcgccgggacctggcccacttggctgccgaggtggagggcaagtgcttacagtcaggcttcgagatgcttaaggatgtcaaaagtaccctggaaaaatgtgaaaaggtgaagaccatggaggtgacttcaactacaccttgtacttctctacatagtgagataaatgataatgtcagagggagatgaagagaggaccaggcgggaacctaga

SEQ ID NO: 247864 - DNA, 1013 bp, Artificial Sequence
  derived and/or modified sequence
cgccgcggggcgggggcgaggggaggaggaaggagggaggcagcgctccggcggctccgcgccccgcactcccggacccgaagccgggaagaaacgtatgtcaaacgaggatacagtgtctggaactattggttctaagatataagtggaatgagcctggatcaggagaagtatgctgagctagagttgaaggaagcttctctttctaacaagagaaagcagagttaaattatggcagagacaagtctgttagaggctggggcctctgcagcctctacagctgcggctttggagaacttacaggtggaggcgagctgctctgtgtgcctggagtatctgaaggaacctgtcatcattgagtgtgggcacaacttctgcaaagcttgcatcacccgctggtgggaggacctagagagggacttcccttgtcctgtctgtcgaaagacatcccgctaccgcagtctccgacctaatcggcaactaggcagtatggtggaaattgccaagcagctccaggccgtcaagcggaagatccgggatgagagcctctgcccccaacaccatgaggccctcagccttttctgttatgaggaccaggaggctgtatgcttgatatgtgcaatttcccacacccaccgggcccacaccgttgtgccactggacgatgctacacaggagtacaaggaaaaactgcagaagtgtctggagcccctggaacagaagctgcaggagatcactcgctgcaagtcctctgaggagaagaagcctggtgagctcaagagactagtggaaagtcgccgacagcagatcttgagggagtttgaagagcttcataggcggctggatgaagagcagcaggtgttgctttcacgactggaagaagaggaacaggacattctgcagcgactccgagaaaatgctgctcaccttggggacaagcgccgggacctggcccacttggctgccgaggtggagggcaagtgcttacagtcaggcttcgagatgcttaaggt

SEQ ID NO: 247865 - DNA, 3249 bp, Artificial Sequence
  derived and/or modified sequence
cccagcttccactgacacgagcctcggcgcggcttccgcttccggcgagtattgtgtgtcgcgccgcggggcgggggcgaggggaggaggaaggagggaggcagcgctccggcggctccgcgccccgcactcccggacccgaagccgggaagattcctttcttgtctgttagaaacgtatgtcaaacgaggatacagtgtctggaactattggttctaagatataagtggaatgagcctggatcaggagaagtatgctgagctagagttgaaggaagcttctctttctaacaagagaaagcagagttaaattatggcagagacaagtctgttagaggctggggcctctgcagcctctacagctgcggctttggagaacttacaggtggaggcgagctgctctgtgtgcctggagtatctgaaggaacctgtcatcattgagtgtgggcacaacttctgcaaagcttgcatcacccgctggtgggaggacctagagagggacttcccttgtcctgtctgtcgaaagacatcccgctaccgcagtctccgacctaatcggcaactaggcagtatggtggaaattgccaagcagctccaggccgtcaagcggaagatccgggatgagagcctctgcccccaacaccatgaggccctcagccttttctgttatgaggaccaggaggctgtatgcttgatatgtgcaatttcccacacccaccgggcccacaccgttgtgccactggacgacgctacacaggagtacaaggaaaaactgcagaagtgtctggagcccctggaacagaagctgcaggagatcactcgctgcaagtcctctgaggagaagaagcctggtgagctcaagagactagtggaaagtcgccgacagcagatcttgagggagtttgaagagcttcataggcggctggatgaagagcagcaggtgttgctttcacgactggaagaagaggaacaggacattctgcagcgactccgagaaaatgctgctcaccttggggacaagcgccgggacctggcccacttggctgccgaggtggagggcaagtgcttacagtcaggcttcgagatgcttaaggatgtcaaaagtaccctggaaaaatgtgaaaaggtgaagaccatggaggtgacttcagtatccatagagctggaaaagaacttcagcaattttccccgacagtactttgccctaaggaaaatccttaaacagctaattgcggatgtgaccctggaccccgagacagctcatcctaacctagtcctgtcagaggatcgtaagagcgtcaagttcgtggagacaagactccgggatctccctgacacaccaaggcgtttcaccttctacccttgcgtcctggctactgagggtttcacctcaggtcgacactactgggaggtggaggtgggcgacaagacccactgggcagtgggtgtatgccgggactccgtgagccgaaagggcgagttgactccactccctgagactggctactggcgggtgcggctatggaatggggacaaatatgcagccaccaccacaccttttacccctttgcacatcaaggtgaaacccaagcgggtaggcatattcctagactatgaggccggcacactgtctttctacaatgtcacagaccgctctcatatctacaccttcactgatacttttactgagaaactttggcccctcttctacccaggcatccgggctggacggaagaatgctgcaccacttaccatcaggcccccaacagattgggagtgacaggttgggatgtgggaatgactggggtgaggcagggtcaagtgctacgggcctccttcccgtgtcctgctggaacgtcttcgtgtccacctgggtccagtcctgaatcatcttggagaaacaccttggtttctaggatggttttgtgtggagggggaggtaggactgggctggatgagagagcacagctgtgacttcctcctaactgtcagggtggggagctggttcccagaggattgtctaccctgaagtccatcaggttttctgttgcacaaggacgggtcaggaaggaaggagaggcttttccagaaacaaaaaatctgtgagggtctgacttgctcaaaccagaggaggaaacagaaacccctgcacatctttttagggggttctttgacccaggatagtcttgcttcttgaggtagatcacaggggtctgtgtacctctgaattcatgagagatgaatgacagatgctctcatgggtctagatattgaggagtttttctgagggcagagattggacatcaacaaggctagaagggtcagggaagtgggctaaaggaacagattcctagagattaatgaagaggagggaggtttctttggtcttctattccaagggtaaggttgcgattatgggtaagattggccagaggtaggaatgtggggagaaggagaggctgaaaagaaagcagaggagaacccaggtccctgcctcagccttcagcagagttggcttattgcctgcctctataccaataagtcagtcaccttgctcctctccagaggcaaagtggaagagatcctgcaagacacatctatcctttcacagtgttcccaagggaacttggaaaggagagtcaggtattagaggaaagagaagggtatttgtatacaaagccctggccttaaagaatgttacttagtagctactcccaaattgtcagccttcttacctggccaaggtgtccaagccagaaaggaaaaaaggttatggagtctttctcaccctaaggacagggtggaagagggtggtatatagggaagggccagataggcaacttcatttggcttgtgtgcatctggcctggaactggtgttaagccaggcttttgcttgtttgttgccatccctcaccctttgccatttcccttttcagagaatgtaaatgattttcatgttaggccaaaataaacaacttatagggtacatatgttgtcataaaaggtaaaagtgatgcatgccaaaccaaactaaaccaatttggattatctgctattcgggtaatcttcacagaaatgactgagagaagaatctgcagtttactgagggcatttcagttcctcctaccacctcaacaggactttgtccagactctcctcctcttacctttgtgccttgactgtggttctttgtggcaagatactttggttggttaaaataatatggaacaaaggatccactgaagtga

SEQ ID NO: 247866 - DNA, 1013 bp, Artificial Sequence
  derived and/or modified sequence
cgccgcggggcgggggcgaggggaggaggaaggagggaggcagcgctccggcggctccgcgccccgcactcccggacccgaagccgggaagaaacgtatgtcaaacgaggatacagtgtctggaactattggttctaagatataagtggaatgagcctggatcaggagaagtatgctgagctagagttgaaggaagcttctctttctaacaagagaaagcagagttaaattatggcagagacaagtctgttagaggctggggcctctgcagcctctacagctgcggctttggagaacttacaggtggaggcgagctgctctgtgtgcctggagtatctgaaggaacctgtcatcattgagtgtgggcacaacttctgcaaagcttgcatcacccgctggtgggaggacctagagagggacttcccttgtcctgtctgtcgaaagacatcccgctaccgcagtctccgacctaatcggcaactaggcagtatggtggaaattgccaagcagctccaggccgtcaagcggaagatccgggatgagagcctctgcccccaacaccatgaggccctcagccttttctgttatgaggaccaggaggctgtatgcttgatatgtgcaatttcccacacccaccgggcccacaccgttgtgccactggacgacgctacacaggagtacaaggaaaaactgcagaagtgtctggagcccctggaacagaagctgcaggagatcactcgctgcaagtcctctgaggagaagaagcctggtgagctcaagagactagtggaaagtcgccgacagcagatcttgagggagtttgaagagcttcataggcggctggatgaagagcagcaggtgttgctttcacgactggaagaagaggaacaggacattctgcagcgactccgagaaaatgctgctcaccttggggacaagcgccgggacctggcccacttggctgccgaggtggagggcaagtgcttacagtcaggcttcgagatgcttaaggt

SEQ ID NO: 247867 - DNA, 1013 bp, Artificial Sequence
  derived and/or modified sequence
cgccgcggggcgggggcgaggggaggaggaaggagggaggcagcgctccggcggctccgcgccccgcactcccggacccgaagccgggaagaaacgtatgtcaaacgaggatacagtgtctggaactattggttctaagatataagtggaatgagcctggatcaggagaagtatgctgagctagagttgaaggaagcttctctttctaacaagagaaagcagagttaaattatggcagagacaagtctgttagaggctggggcctctgcagcctctacagctgcggctttggagaacttacaggtggaggcgagctgctctgtgtgcctggagtatctgaaggaacctgtcatcattgagtgtgggcacaacttctgcaaagcttgcatcacccgctggtgggaggacctagagagggacttcccttgtcctgtctgtcgaaagacatcccgctaccgcagtctccgacctaatcggcaactaggcagtatggtggaaattgccaagcagctccaggccgtcaagcggaagatccgggatgagagcctctgcccccaacaccatgaggccctcagccttttctgttatgaggaccaggaggctgtatgcttgatatgtgcaatttcccacacccaccgggctcacaccgttgtgccactggacgatgctacacaggagtacaaggaaaaactgcagaagtgtctggagcccctggaacagaagctgcaggagatcactcgctgcaagtcctctgaggagaagaagcctggtgagctcaagagactagtggaaagtcgccgacagcagatcttgagggagtttgaagagcttcataggcggctggatgaagagcagcaggtgttgctttcacgactggaagaagaggaacaggacattctgcagcgactccgagaaaatgctgctcaccttggggacaagcgccgggacctggcccacttggctgccgaggtggagggcaagtgcttacagtcaggcttcgagatgcttaaggt

SEQ ID NO: 247868 - DNA, 1548 bp, Artificial Sequence
  derived and/or modified sequence
cccagcttccactgacacgagcctcggcgcggcttccgcttccggcgagtattgtgtgtcgcgccgcggggcgggggcgaggggaggaggaaggagggaggcagcgctccggcggctccgcgccccgcactcccggacccgaagccgggaagattcctttcttgtctgttagaaacgtatgtcaaacgaggatacagtgtctggaactattggttctaagatataagtggaatgagcctggatcaggagaagtatgctgagctagagttgaaggaagcttctctttctaacaagagaaagcagagttaaattatggcagagacaagtctgttagaggctggggcctctgcagcctctacagctgcggctttggagaacttacaggtggaggcgagctgctctgtgtgcctggagtatctgaaggaacctgtcatcattgagtgtgggcacaacttctgcaaagcttgcatcacccgctggtgggaggacctagagagggacttcccttgtcctgtctgtcgaaagacatcccgctaccgcagtctccgacctaatcggcaactaggcagtatggtggaaattgccaagcagctccaggccgtcaagcggaagatccgggatgagagcctctgcccccaacaccatgaggccctcagccttttctgttatgaggaccaggaggctgtatgcttgatatgtgcaatttcccacacccaccgggcccacaccgttgtgccactggacgatgctacacaggagtacaaggaaaaactgcagaagtgtctggagcccctggaacagaagctgcaggagatcactcgctgcaagtcctctgaggagaagaagcctggtgagctcaagagactagtggaaagtcgccgacagcagatcttgagggagtttgaagagcttcataggcggctggatgaagagcagcaggtgttgctttcacgactggaagaagaggaacaggacattctgcagcgactccgagaaaatgctgctcaccttggggacaagcgccgggacctggcccacttggctgccgaggtggagggcaagtgcttacagtcaggcttcgagatgcttaagccagttctttctgccagggaggaatgtgaaaaggtgaagaccatggaggtgacttcagtatccatagagctggaaaagaacttcagcaattttccccgacagtactttgccctaaggaaaatccttaaacagctaattgcggatgtgaccctggaccctgagacagctcatcctaacctagtcctgtcagaggatcgtaagagcgtcaagttcgtggagacaagactccgggatctccctgacacaccaaggcgtttcaccttctacccttgcgtcctggctactgagggtttcacctcaggtcgacactactgggaggtggaggtgggcgacaagacccactgggcagtgggtgtatgccgggactccgtgagccgaaagggcgggtgcggctatggaatggggacaaatatgcagccaccaccacaccttttacccctttgcacatcaaggtga

SEQ ID NO: 247869 - DNA, 3535 bp, Artificial Sequence
  derived and/or modified sequence
cggcagcgtcatagcggcgggcatcccatctgcacgtcacacctctttctcacctggacacgcatcccttcctaccctgccagccacgacgtttcctctttcccctctccaatgccccagccccagatctggcggaagaagatggagaacgggggtgggacagagttgtggacaacctctcaggagagggtcgcaaggtgggaccctgaacagtggtagaaacaaaatgagattgtccctgaagtttgcccttcagctgagacacaaggagtagaggaagaggaaggactaacgcagaggcactcaaggtctcactatgactgtagttgagagtcctctcccttcttccctaaccctttccccatttctctcaccacttctttgccagtctagatccgtcctggtgccttactgtgcatacagttctactcgtctcagattcctttcttgtctgttagaaacgtatgtcaaacgaggatacagtgtctggaactattggttctaagatataagtggaatgagcctggatcaggagaagtatgctgagctagagttgaaggaagcttctctttctaacaagagaaagcagagttaaattatggcagagacaagtctgttagaggctggggcctctgcagcctctacagctgcggctttggagaacttacaggtggaggcgagctgctctgtgtgcctggagtatctgaaggaacctgtcatcattgagtgtgggcacaacttctgcaaagcttgcatcacccgctggtgggaggacctagagagggacttcccttgtcctgtctgtcgaaagacatcccgctaccgcagtctccgacctaatcggcaactaggcagtatggtggaaattgccaagcagctccaggccgtcaagcggaagatccgggatgagagcctctgcccccaacaccatgaggccctcagccttttctgttatgaggaccaggaggctgtatgcttgatatgtgcaatttcccacacccaccgggcccacaccgttgtgccactggacgacgctacacaggagtacaaggaaaaactgcagaagtgtctggagcccctggaacagaagctgcaggagatcactcgctgcaagtcctctgaggagaagaagcctggtgagctcaagagactagtggaaagtcgccgacagcagatcttgagggagtttgaagagcttcataggcggctggatgaagagcagcaggtgttgctttcacgactggaagaagaggaacaggacattctgcagcgactccgagaaaatgctgctcaccttggggacaagcgccgggacctggcccacttggctgccgaggtggagggcaagtgcttacagtcaggcttcgagatgcttaaggatgtcaaaagtaccctggaaaaatgtgaaaaggtgaagaccatggaggtgacttcagtatccatagagctggaaaagaacttcagcaattttccccgacagtactttgccctaaggaaaatccttaaacagctaattgcggatgtgaccctggaccccgagacagctcatcctaacctagtcctgtcagaggatcgtaagagcgtcaagttcgtggagacaagactccgggatctccctgacacaccaaggcgtttcaccttctacccttgcgtcctggctactgagggtttcacctcaggtcgacactactgggaggtggaggtgggcgacaagacccactgggcagtgggtgtatgccgggactccgtgagccgaaagggcgagttgactccactccctgagactggctactggcgggtgcggctatggaatggggacaaatatgcagccaccaccacaccttttacccctttgcacatcaaggtgaaacccaagcgggtaggcatattcctagactatgaggccggcacactgtctttctacaatgtcacagaccgctctcatatctacaccttcactgatacttttactgagaaactttggcccctcttctacccaggcatccgggctggacggaagaatgctgcaccacttaccatcaggcccccaacagattgggagtgacaggttgggatgtgggaatgactggggtgaggcagggtcaagtgctacgggcctccttcccgtgtcctgctggaacgtcttcgtgtccacctgggtccagtcctgaatcatcttggagaaacaccttggtttctaggatggttttgtgtggagggggaggtaggactgggctggatgagagagcacagctgtgacttcctcctaactgtcagggtggggagctggttcccagaggattgtctaccctgaagtccatcaggttttctgttgcacaaggacgggtcaggaaggaaggagaggcttttccagaaacaaaaaatctgtgagggtctgacttgctcaaaccagaggaggaaacagaaacccctgcacatctttttagggggttctttgacccaggatagtcttgcttcttgaggtagatcacaggggtctgtgtacctctgaattcatgagagatgaatgacagatgctctcatgggtctagatattgaggagtttttctgagggcagagattggacatcaacaaggctagaagggtcagggaagtgggctaaaggaacagattcctagagattaatgaagaggagggaggtttctttggtcttctattccaagggtaaggttgcgattatgggtaagattggccagaggtaggaatgtggggagaaggagaggctgaaaagaaagcagaggagaacccaggtccctgcctcagccttcagcagagttggcttattgcctgcctctataccaataagtcagtcaccttgctcctctccagaggcaaagtggaagagatcctgcaagacacatctatcctttcacagtgttcccaagggaacttggaaaggagagtcaggtattagaggaaagagaagggtatttgtatacaaagccctggccttaaagaatgttacttagtagctactcccaaattgtcagccttcttacctggccaaggtgtccaagccagaaaggaaaaaaggttatggagtctttctcaccctaaggacagggtggaagagggtggtatatagggaagggccagataggcaacttcatttggcttgtgtgcatctggcctggaactggtgttaagccaggcttttgcttgtttgttgccatccctcaccctttgccatttcccttttcagagaatgtaaatgattttcatgttaggccaaaataaacaacttatagggtacatatgttgtcataaaaggtaaaagtgatgcatgccaaaccaaactaaaccaatttggattatctgctattcgggtaatcttcacagaaatgactgagagaagaatctgcagtttactgagggcatttcagttcctcctaccacctcaacaggactttgtccagactctcctcctcttacctttgtgccttgactgtggttctttgtggcaagatactttggttggttaaaataatatggaacaaaggatccactgaagtga

SEQ ID NO: 247870 - DNA, 3198 bp, Artificial Sequence
  derived and/or modified sequence
gcgaggggaggaggaaggagggaggcagcgctccggcggctccgcgccccgcactcccggacccgaagccgggaagatccgtcctggtgccttactgtgcatacagttctactcgtctcagaaacgtatgtcaaacgaggatacagtgtctggaactattggttctaagatataagtggaatgagcctggatcaggagaagtatgctgagctagagttgaaggaagcttctctttctaacaagagaaagcagagttaaattatggcagagacaagtctgttagaggctggggcctctgcagcctctacagctgcggctttggagaacttacaggtggaggcgagctgctctgtgtgcctggagtatctgaaggaacctgtcatcattgagtgtgggcacaacttctgcaaagcttgcatcacccgctggtgggaggacctagagagggacttcccttgtcctgtctgtcgaaagacatcccgctaccgcagtctccgacctaatcggcaactaggcagtatggtggaaattgccaagcagctccaggccgtcaagcggaagatccgggatgagagcctctgcccccaacaccatgaggccctcagccttttctgttatgaggaccaggaggctgtatgcttgatatgtgcaatttcccacacccaccgggcccacaccgttgtgccactggacgacgctacacaggagtacaaggaaaaactgcagaagtgtctggagcccctggaacagaagctgcaggagatcactcgctgcaagtcctctgaggagaagaagcctggtgagctcaagagactagtggaaagtcgccgacagcagatcttgagggagtttgaagagcttcataggcggctggatgaagagcagcaggtgttgctttcacgactggaagaagaggaacaggacattctgcagcgactccgagaaaatgctgctcaccttggggacaagcgccgggacctggcccacttggctgccgaggtggagggcaagtgcttacagtcaggcttcgagatgcttaaggatgtcaaaagtaccctggaaaaatgtgaaaaggtgaagaccatggaggtgacttcagtatccatagagctggaaaagaacttcagcaattttccccgacagtactttgccctaaggaaaatccttaaacagctaattgcggatgtgaccctggaccccgagacagctcatcctaacctagtcctgtcagaggatcgtaagagcgtcaagttcgtggagacaagactccgggatctccctgacacaccaaggcgtttcaccttctacccttgcgtcctggctactgagggtttcacctcaggtcgacactactgggaggtggaggtgggcgacaagacccactgggcagtgggtgtatgccgggactccgtgagccgaaagggcgagttgactccactccctgagactggctactggcgggtgcggctatggaatggggacaaatatgcagccaccaccacaccttttacccctttgcacatcaaggtgaaacccaagcgggtaggcatattcctagactatgaggccggcacactgtctttctacaatgtcacagaccgctctcatatctacaccttcactgatacttttactgagaaactttggcccctcttctacccaggcatccgggctggacggaagaatgctgcaccacttaccatcaggcccccaacagattgggagtgacaggttgggatgtgggaatgactggggtgaggcagggtcaagtgctacgggcctccttcccgtgtcctgctggaacgtcttcgtgtccacctgggtccagtcctgaatcatcttggagaaacaccttggtttctaggatggttttgtgtggagggggaggtaggactgggctggatgagagagcacagctgtgacttcctcctaactgtcagggtggggagctggttcccagaggattgtctaccctgaagtccatcaggttttctgttgcacaaggacgggtcaggaaggaaggagaggcttttccagaaacaaaaaatctgtgagggtctgacttgctcaaaccagaggaggaaacagaaacccctgcacatctttttagggggttctttgacccaggatagtcttgcttcttgaggtagatcacaggggtctgtgtacctctgaattcatgagagatgaatgacagatgctctcatgggtctagatattgaggagtttttctgagggcagagattggacatcaacaaggctagaagggtcagggaagtgggctaaaggaacagattcctagagattaatgaagaggagggaggtttctttggtcttctattccaagggtaaggttgcgattatgggtaagattggccagaggtaggaatgtggggagaaggagaggctgaaaagaaagcagaggagaacccaggtccctgcctcagccttcagcagagttggcttattgcctgcctctataccaataagtcagtcaccttgctcctctccagaggcaaagtggaagagatcctgcaagacacatctatcctttcacagtgttcccaagggaacttggaaaggagagtcaggtattagaggaaagagaagggtatttgtatacaaagccctggccttaaagaatgttacttagtagctactcccaaattgtcagccttcttacctggccaaggtgtccaagccagaaaggaaaaaaggttatggagtctttctcaccctaaggacagggtggaagagggtggtatatagggaagggccagataggcaacttcatttggcttgtgtgcatctggcctggaactggtgttaagccaggcttttgcttgtttgttgccatccctcaccctttgccatttcccttttcagagaatgtaaatgattttcatgttaggccaaaataaacaacttatagggtacatatgttgtcataaaaggtaaaagtgatgcatgccaaaccaaactaaaccaatttggattatctgctattcgggtaatcttcacagaaatgactgagagaagaatctgcagtttactgagggcatttcagttcctcctaccacctcaacaggactttgtccagactctcctcctcttacctttgtgccttgactgtggttctttgtggcaagatactttggttggttaaaataatatggaacaaaggatccactgaagtga

SEQ ID NO: 247871 - DNA, 708 bp, Artificial Sequence
  derived and/or modified sequence
agacatcccgctaccgcagtctccgacctaatcggcaactaggcagtatggtggaaattgccaagcagctccaggccgtcaagcggaagatccgggatgagagcctctgcccccaacaccatgaggccctcagccttttctgttatgaggaccaggaggctgtatgcttgatatgtgcaatttcccacacccaccgggctcacaccgttgtgccactggacgatgctacacaggagtacaaggaaaaactgcagaagtgtctggagcccctggaacagaagctgcaggagatcactcgctgcaagtcctctgaggagaagaagcctggtgagctcaagagactagtggaaagtcgccgacagcagatcttgagggagtttgaagagcttcataggcggctggatgaagagcagcaggtgttgctttcacgactggaagaagaggaacaggacattctgcagcgactccgagaaaatgctgctcaccttggggacaagcgccgggacctggcccacttggctgccgaggtggagggcaagtgcttacagtcaggcttcgagatgcttaaggatgtcaaaagtaccctggaaaaatgtgaaaaggtgaagaccatggaggtgacttcaactacaccttgtacttctctacatagtgagataaatgataatgtcagagggagatgaagagaggaccaggcgggaacctaga

SEQ ID NO: 247872 - DNA, 3248 bp, Artificial Sequence
  derived and/or modified sequence
cccagcttccactgacacgagcctcggcgcggcttccgcttccggcgagtattgtgtgtcgcgccgcggggcgggggcgaggggaggaggaaggagggaggcagcgctccggcggctccgcgccccgcactcccggacccgaagccgggaagattcctttcttgtctgttagaaacgtatgtcaaacgaggatacagtgtctggaactattggttctaagatataagtggaatgagcctggatcaggagaagtatgctgagctagagttgaaggaagcttctctttctaacaagagaaagcagagttaaattatggcagagacaagtctgttagaggctggggcctctgcagcctctacagctgcggctttggagaacttacaggtggaggcgagctgctctgtgtgcctggagtatctgaaggaacctgtcatcattgagtgtgggcacaacttctgcaaagcttgcatcacccgctggtgggaggacctagagagggacttcccttgtcctgtctgtcgaaagacatcccgctaccgcagtctccgacctaatcggcaactaggcagtatggtggaaattgccaagcagctccaggccgtcaagcggaagatccgggatgagagcctctgcccccaacaccatgaggccctcagccttttctgttatgaggaccaggaggctgtatgcttgatatgtgcaatttcccacacccaccgggcccacaccgttgtgccactggacgatgctacacaggagtacaaggaaaaactgcagaagtgtctggagcccctggaacagaagctgcaggagatcactcgctgcaagtcctctgaggagaagaagcctggtgagctcaagagactagtggaaagtcgccgacagcagatcttgagggagtttgaagagcttcataggcggctggatgaagagcagcaggtgttgctttcacgactggaagaagaggaacaggacattctgcagcgactccgagaaaatgctgctcaccttggggacaagcgccgggacctggcccacttggctgccgaggtggagggcaagtgcttacagtcaggcttcgagatgcttaagccagttctttctgccagggaggaatgtgaaaaggtgaagaccatggaggtgacttcagtatccatagagctggaaaagaacttcagcaattttccccgacagtactttgccctaaggaaaatccttaaacagctaattgcggatgtgaccctggaccctgagacagctcatcctaacctagtcctgtcagaggatcgtaagagcgtcaagttcgtggagacaagactccgggatctccctgacacaccaaggcgtttcaccttctacccttgcgtcctggctactgagggtttcacctcaggtcgacactactgggaggtggaggtgggcgacaagacccactgggcagtgggtgtatgccgggactccgtgagccgaaagggcgagttgactccactccctgagactggctactggcgggtgcggctatggaatggggacaaatatgcagccaccaccacaccttttacccctttgcacatcaaggtgaaacccaagcgggtaggcatattcctagactatgaggccggcacactgtctttctacaatgtcacagaccgctctcatatctacaccttcactgatacttttactgagaaactttggcccctcttctacccaggcatccgggctggacggaagaatgctgcaccacttaccatcaggcccccaacagattgggagtgacaggttgggatgtgggaatgactggggtgaggcagggtcaagtgctacgggcctccttcccgtgtcctgctggaacgtcttcgtgtccacctgggtccagtcctgaatcatcttggagaaacaccttggtttctaggatggttttgtgtggagggggaggtaggactgggctggatgagagagcacagctgtgacttcctcctaactgtcagggtggggagctggttcccagaggattgtctaccctgaagtccatcaggttttctgttgcacaaggacgggtcaggaaggaaggagaggcttttccagaaacaaaaaatctgtgagggtctgacttgctcaaaccagaggaggaaacagaaacccctgcacatctttttagggggttctttgacccaggatagtcttgcttcttgaggtagatcacaggggtctgtgtacctctgaattcatgagagatgaatgacagatgctctcatgggtctagatattgaggagtttttctgagggcagagattggacatcaacaaggctagaagggtcagggaagtgggctaaaggaacagattcctagagattaatgaagaggagggaggtttctttggtcttctattccaagggtaaggttgcgattatgggtaagattggccagaggtaggaatgtggggagaaggagaggctgaaaagaaagcagaggagaacccaggtccctgcctcagccttcagcagagttggcttattgcctgcctctataccaataagtcagtcaccttgctcctctccagaggcaaagtggaagagatcctgcaagacacatctatcctttcacagtgttcccaagggaacttggaaaggagagtcaggtattagaggaaagagaagggtatttgtatacaaagccctggccttaaagaatgttacttagtagctactcccaaattgtcagccttcttacctggccaaggtgtccaagccagaaaggaaaaaaggttatggagtctttctcaccctaaggacagggtggaagagggtggtatatagggaagggccagataggcaacttcatttggcttgtgtgcatctggcctggaactggtgttaagccaggcttttgcttgtttgttgccatccctcaccctttgccatttcccttttcagagaatgtaaatgattttcatgttaggccaaaataaacaacttatagggtacatatgttgtcataaaaggtaaaagtgatgcatgccaaaccaaactaaaccaatttggattatctgctattcgggtaatcttcacagaaatgactgagagaagaatctgcagtttactgagggcatttcagttcctcctaccacctcaacaggactttgtccagactctcctcctcttacctttgtgccttgactgtggttctttgtggcaagatactttggttggttaaaataatatggaacaaaggatccactgaagtg

SEQ ID NO: 247873 - DNA, 3248 bp, Artificial Sequence
  derived and/or modified sequence
cccagcttccactgacacgagcctcggcgcggcttccgcttccggcgagtattgtgtgtcgcgccgcggggcgggggcgaggggaggaggaaggagggaggcagcgctccggcggctccgcgccccgcactcccggacccgaagccgggaagattcctttcttgtctgttagaaacgtatgtcaaacgaggatacagtgtctggaactattggttctaagatataagtggaatgagcctggatcaggagaagtatgctgagctagagttgaaggaagcttctctttctaacaagagaaagcagagttaaattatggcagagacaagtctgttagaggctggggcctctgcagcctctacagctgcggctttggagaacttacaggtggaggcgagctgctctgtgtgcctggagtatctgaaggaacctgtcatcattgagtgtgggcacaacttctgcaaagcttgcatcacccgctggtgggaggacctagagagggacttcccttgtcctgtctgtcgaaagacatcccgctaccgcagtctccgacctaatcggcaactaggcagtatggtggaaattgccaagcagctccaggccgtcaagcggaagatccgggatgagagcctctgcccccaacaccatgaggccctcagccttttctgttatgaggaccaggaggctgtatgcttgatatgtgcaatttcccacacccaccgggcccacaccgttgtgccactggacgacgctacacaggagtacaaggaaaaactgcagaagtgtctggagcccctggaacagaagctgcaggagatcactcgctgcaagtcctctgaggagaagaagcctggtgagctcaagagactagtggaaagtcgccgacagcagatcttgagggagtttgaagagcttcataggcggctggatgaagagcagcaggtgttgctttcacgactggaagaagaggaacaggacattctgcagcgactccgagaaaatgctgctcaccttggggacaagcgccgggacctggcccacttggctgccgaggtggagggcaagtgcttacagtcaggcttcgagatgcttaagccagttctttctgccagggaggaatgtgaaaaggtgaagaccatggaggtgacttcagtatccatagagctggaaaagaacttcagcaattttccccgacagtactttgccctaaggaaaatccttaaacagctaattgcggatgtgaccctggaccccgagacagctcatcctaacctagtcctgtcagaggatcgtaagagcgtcaagttcgtggagacaagactccgggatctccctgacacaccaaggcgtttcaccttctacccttgcgtcctggctactgagggtttcacctcaggtcgacactactgggaggtggaggtgggcgacaagacccactgggcagtgggtgtatgccgggactccgtgagccgaaagggcgagttgactccactccctgagactggctactggcgggtgcggctatggaatggggacaaatatgcagccaccaccacaccttttacccctttgcacatcaaggtgaaacccaagcgggtaggcatattcctagactatgaggccggcacactgtctttctacaatgtcacagaccgctctcatatctacaccttcactgatacttttactgagaaactttggcccctcttctacccaggcatccgggctggacggaagaatgctgcaccacttaccatcaggcccccaacagattgggagtgacaggttgggatgtgggaatgactggggtgaggcagggtcaagtgctacgggcctccttcccgtgtcctgctggaacgtcttcgtgtccacctgggtccagtcctgaatcatcttggagaaacaccttggtttctaggatggttttgtgtggagggggaggtaggactgggctggatgagagagcacagctgtgacttcctcctaactgtcagggtggggagctggttcccagaggattgtctaccctgaagtccatcaggttttctgttgcacaaggacgggtcaggaaggaaggagaggcttttccagaaacaaaaaatctgtgagggtctgacttgctcaaaccagaggaggaaacagaaacccctgcacatctttttagggggttctttgacccaggatagtcttgcttcttgaggtagatcacaggggtctgtgtacctctgaattcatgagagatgaatgacagatgctctcatgggtctagatattgaggagtttttctgagggcagagattggacatcaacaaggctagaagggtcagggaagtgggctaaaggaacagattcctagagattaatgaagaggagggaggtttctttggtcttctattccaagggtaaggttgcgattatgggtaagattggccagaggtaggaatgtggggagaaggagaggctgaaaagaaagcagaggagaacccaggtccctgcctcagccttcagcagagttggcttattgcctgcctctataccaataagtcagtcaccttgctcctctccagaggcaaagtggaagagatcctgcaagacacatctatcctttcacagtgttcccaagggaacttggaaaggagagtcaggtattagaggaaagagaagggtatttgtatacaaagccctggccttaaagaatgttacttagtagctactcccaaattgtcagccttcttacctggccaaggtgtccaagccagaaaggaaaaaaggttatggagtctttctcaccctaaggacagggtggaagagggtggtatatagggaagggccagataggcaacttcatttggcttgtgtgcatctggcctggaactggtgttaagccaggcttttgcttgtttgttgccatccctcaccctttgccatttcccttttcagagaatgtaaatgattttcatgttaggccaaaataaacaacttatagggtacatatgttgtcataaaaggtaaaagtgatgcatgccaaaccaaactaaaccaatttggattatctgctattcgggtaatcttcacagaaatgactgagagaagaatctgcagtttactgagggcatttcagttcctcctaccacctcaacaggactttgtccagactctcctcctcttacctttgtgccttgactgtggttctttgtggcaagatactttggttggttaaaataatatggaacaaaggatccactgaagtg

SEQ ID NO: 247874 - DNA, 3248 bp, Artificial Sequence
  derived and/or modified sequence
cccagcttccactgacacgagcctcggcgcggcttccgcttccggcgagtattgtgtgtcgcgccgcggggcgggggcgaggggaggaggaaggagggaggcagcgctccggcggctccgcgccccgcactcccggacccgaagccgggaagattcctttcttgtctgttagaaacgtatgtcaaacgaggatacagtgtctggaactattggttctaagatataagtggaatgagcctggatcaggagaagtatgctgagctagagttgaaggaagcttctctttctaacaagagaaagcagagttaaattatggcagagacaagtctgttagaggctggggcctctgcagcctctacagctgcggctttggagaacttacaggtggaggcgagctgctctgtgtgcctggagtatctgaaggaacctgtcatcattgagtgtgggcacaacttctgcaaagcttgcatcacccgctggtgggaggacctagagagggacttcccttgtcctgtctgtcgaaagacatcccgctaccgcagtctccgacctaatcggcaactaggcagtatggtggaaattgccaagcagctccaggccgtcaagcggaagatccgggatgagagcctctgcccccaacaccatgaggccctcagccttttctgttatgaggaccaggaggctgtatgcttgatatgtgcaatttcccacacccaccgggctcacaccgttgtgccactggacgatgctacacaggagtacaaggaaaaactgcagaagtgtctggagcccctggaacagaagctgcaggagatcactcgctgcaagtcctctgaggagaagaagcctggtgagctcaagagactagtggaaagtcgccgacagcagatcttgagggagtttgaagagcttcataggcggctggatgaagagcagcaggtgttgctttcacgactggaagaagaggaacaggacattctgcagcgactccgagaaaatgctgctcaccttggggacaagcgccgggacctggcccacttggctgccgaggtggagggcaagtgcttacagtcaggcttcgagatgcttaagccagttctttctgccagggaggaatgtgaaaaggtgaagaccatggaggtgacttcagtatccatagagctggaaaagaacttcagcaattttccccgacagtactttgccctaaggaaaatccttaaacagctaattgcggatgtgaccctggaccctgagacagctcatcctaacctagtcctgtcagaggatcgtaagagcgtcaagttcgtggagacaagactccgggatctccctgacacaccaaggcgtttcaccttctacccttgcgtcctggctactgagggtttcacctcaggtcgacactactgggaggtggaggtgggcgacaagacccactgggcagtgggtgtatgccgggactccgtgagccgaaagggcgagttgactccactccctgagactggctactggcgggtgcggctatggaatggggacaaatatgcagccaccaccacaccttttacccctttgcacatcaaggtgaaacccaagcgggtaggcatattcctagactatgaggccggcacactgtctttctacaatgtcacagaccgctctcatatctacaccttcactgatacttttactgagaaactttggcccctcttctacccaggcatccgggctggacggaagaatgctgcaccacttaccatcaggcccccaacagattgggagtgacaggttgggatgtgggaatgactggggtgaggcagggtcaagtgctacgggcctccttcccgtgtcctgctggaacgtcttcgtgtccacctgggtccagtcctgaatcatcttggagaaacaccttggtttctaggatggttttgtgtggagggggaggtaggactgggctggatgagagagcacagctgtgacttcctcctaactgtcagggtggggagctggttcccagaggattgtctaccctgaagtccatcaggttttctgttgcacaaggacgggtcaggaaggaaggagaggcttttccagaaacaaaaaatctgtgagggtctgacttgctcaaaccagaggaggaaacagaaacccctgcacatctttttagggggttctttgacccaggatagtcttgcttcttgaggtagatcacaggggtctgtgtacctctgaattcatgagagatgaatgacagatgctctcatgggtctagatattgaggagtttttctgagggcagagattggacatcaacaaggctagaagggtcagggaagtgggctaaaggaacagattcctagagattaatgaagaggagggaggtttctttggtcttctattccaagggtaaggttgcgattatgggtaagattggccagaggtaggaatgtggggagaaggagaggctgaaaagaaagcagaggagaacccaggtccctgcctcagccttcagcagagttggcttattgcctgcctctataccaataagtcagtcaccttgctcctctccagaggcaaagtggaagagatcctgcaagacacatctatcctttcacagtgttcccaagggaacttggaaaggagagtcaggtattagaggaaagagaagggtatttgtatacaaagccctggccttaaagaatgttacttagtagctactcccaaattgtcagccttcttacctggccaaggtgtccaagccagaaaggaaaaaaggttatggagtctttctcaccctaaggacagggtggaagagggtggtatatagggaagggccagataggcaacttcatttggcttgtgtgcatctggcctggaactggtgttaagccaggcttttgcttgtttgttgccatccctcaccctttgccatttcccttttcagagaatgtaaatgattttcatgttaggccaaaataaacaacttatagggtacatatgttgtcataaaaggtaaaagtgatgcatgccaaaccaaactaaaccaatttggattatctgctattcgggtaatcttcacagaaatgactgagagaagaatctgcagtttactgagggcatttcagttcctcctaccacctcaacaggactttgtccagactctcctcctcttacctttgtgccttgactgtggttctttgtggcaagatactttggttggttaaaataatatggaacaaaggatccactgaagtg

SEQ ID NO: 247875 - DNA, 1548 bp, Artificial Sequence
  derived and/or modified sequence
cccagcttccactgacacgagcctcggcgcggcttccgcttccggcgagtattgtgtgtcgcgccgcggggcgggggcgaggggaggaggaaggagggaggcagcgctccggcggctccgcgccccgcactcccggacccgaagccgggaagattcctttcttgtctgttagaaacgtatgtcaaacgaggatacagtgtctggaactattggttctaagatataagtggaatgagcctggatcaggagaagtatgctgagctagagttgaaggaagcttctctttctaacaagagaaagcagagttaaattatggcagagacaagtctgttagaggctggggcctctgcagcctctacagctgcggctttggagaacttacaggtggaggcgagctgctctgtgtgcctggagtatctgaaggaacctgtcatcattgagtgtgggcacaacttctgcaaagcttgcatcacccgctggtgggaggacctagagagggacttcccttgtcctgtctgtcgaaagacatcccgctaccgcagtctccgacctaatcggcaactaggcagtatggtggaaattgccaagcagctccaggccgtcaagcggaagatccgggatgagagcctctgcccccaacaccatgaggccctcagccttttctgttatgaggaccaggaggctgtatgcttgatatgtgcaatttcccacacccaccgggcccacaccgttgtgccactggacgacgctacacaggagtacaaggaaaaactgcagaagtgtctggagcccctggaacagaagctgcaggagatcactcgctgcaagtcctctgaggagaagaagcctggtgagctcaagagactagtggaaagtcgccgacagcagatcttgagggagtttgaagagcttcataggcggctggatgaagagcagcaggtgttgctttcacgactggaagaagaggaacaggacattctgcagcgactccgagaaaatgctgctcaccttggggacaagcgccgggacctggcccacttggctgccgaggtggagggcaagtgcttacagtcaggcttcgagatgcttaagccagttctttctgccagggaggaatgtgaaaaggtgaagaccatggaggtgacttcagtatccatagagctggaaaagaacttcagcaattttccccgacagtactttgccctaaggaaaatccttaaacagctaattgcggatgtgaccctggaccccgagacagctcatcctaacctagtcctgtcagaggatcgtaagagcgtcaagttcgtggagacaagactccgggatctccctgacacaccaaggcgtttcaccttctacccttgcgtcctggctactgagggtttcacctcaggtcgacactactgggaggtggaggtgggcgacaagacccactgggcagtgggtgtatgccgggactccgtgagccgaaagggcgggtgcggctatggaatggggacaaatatgcagccaccaccacaccttttacccctttgcacatcaaggtga

SEQ ID NO: 247876 - DNA, 1548 bp, Artificial Sequence
  derived and/or modified sequence
cccagcttccactgacacgagcctcggcgcggcttccgcttccggcgagtattgtgtgtcgcgccgcggggcgggggcgaggggaggaggaaggagggaggcagcgctccggcggctccgcgccccgcactcccggacccgaagccgggaagattcctttcttgtctgttagaaacgtatgtcaaacgaggatacagtgtctggaactattggttctaagatataagtggaatgagcctggatcaggagaagtatgctgagctagagttgaaggaagcttctctttctaacaagagaaagcagagttaaattatggcagagacaagtctgttagaggctggggcctctgcagcctctacagctgcggctttggagaacttacaggtggaggcgagctgctctgtgtgcctggagtatctgaaggaacctgtcatcattgagtgtgggcacaacttctgcaaagcttgcatcacccgctggtgggaggacctagagagggacttcccttgtcctgtctgtcgaaagacatcccgctaccgcagtctccgacctaatcggcaactaggcagtatggtggaaattgccaagcagctccaggccgtcaagcggaagatccgggatgagagcctctgcccccaacaccatgaggccctcagccttttctgttatgaggaccaggaggctgtatgcttgatatgtgcaatttcccacacccaccgggctcacaccgttgtgccactggacgatgctacacaggagtacaaggaaaaactgcagaagtgtctggagcccctggaacagaagctgcaggagatcactcgctgcaagtcctctgaggagaagaagcctggtgagctcaagagactagtggaaagtcgccgacagcagatcttgagggagtttgaagagcttcataggcggctggatgaagagcagcaggtgttgctttcacgactggaagaagaggaacaggacattctgcagcgactccgagaaaatgctgctcaccttggggacaagcgccgggacctggcccacttggctgccgaggtggagggcaagtgcttacagtcaggcttcgagatgcttaagccagttctttctgccagggaggaatgtgaaaaggtgaagaccatggaggtgacttcagtatccatagagctggaaaagaacttcagcaattttccccgacagtactttgccctaaggaaaatccttaaacagctaattgcggatgtgaccctggaccctgagacagctcatcctaacctagtcctgtcagaggatcgtaagagcgtcaagttcgtggagacaagactccgggatctccctgacacaccaaggcgtttcaccttctacccttgcgtcctggctactgagggtttcacctcaggtcgacactactgggaggtggaggtgggcgacaagacccactgggcagtgggtgtatgccgggactccgtgagccgaaagggcgggtgcggctatggaatggggacaaatatgcagccaccaccacaccttttacccctttgcacatcaaggtga

SEQ ID NO: 247877 - protein, 984 aa, Artificial Sequence
  derived and/or modified sequence
MVCSPVTVRIAPPDRRFSRSAIPEQIISSTLSSPSSNAPDPCAKETVLSALKEKEKKRTVEEEDQIFLDGQENKRRRHDSSGSGHSAFEPLVANGVPASFVPKPGSLKRGLNSQSSDDHLNKRSRSSSMSSLTGAYASGIPSSSRNAITSSYSSTRGISQLWKRNGPSSSPFSSPASSRSQTPERPAKKIREEELCHHSSSSTPLAADRESQGEKAADTTPRKKQNSNSQSTPGSSGQRKRKVQLLPSRRGEQLTLPPPPQLGYSITAEDLDLEKKASLQWFNQALEDKSDAASNSVTETPPITQPSFTFTLPAAAPASPPTSLLAPSTNPLLESLKKMQTPPSLPPCPESAGAATTEALSPPKTPSLLPPLGLSQSGPPGLLPSPSFDSKPPTTLLGLIPAPSMVPATDTKAPPTLQAETATKPQATSAPSPAPKQSFLFGTQNTSPSSPAAPAASSAPPMFKPIFTAPPKSEKEGPTPPGPSVTATAPSSSSLPTTTSTTAPTFQPVFSSMGPPASVPLPAPFFKQTTTPATAPTTTAPLFTGLASATSAVAPITSASPSTDSASKPAFGFGINSVSSSSVSTTTSTATAASQPFLFGAPQASAASFTPAMGSIFQFGKPPALPTTTTVTTFSQSLHTAVPTATSSSAADFSGFGSTLATSAPATSSQPTLTFSNTSTPTFNIPFGSSAKSPLPSYPGANPQPAFGAAEGQPPGAAKPALAPSFGSSFTFGNSAAPAAAPTPAPPSMIKVVPAYVPTPIHPIFGGATHSAFGLKATASAFGAPASSQPAFGGSTAVFFGAATSSGFGATTQTASSGSSSSVFGSTTPSPFTFGGSAAPAGSGSFGINVATPGSSTTTGAFSFGAGQSGSTATSTPFAGGLGQNALGTTGQSTPFAFNVSSTTESKPVFGGTATPTFGLNTPAPGVGTSGSSLSFGASSAPAQGFVGVAPFGSAALSFSIGAGSKTPGARQRLQARRQHTRKK

SEQ ID NO: 247878 - DNA, 2955 bp, Artificial Sequence
  derived and/or modified sequence
atggtgtgcagccccgtgaccgtgagaatcgccccccccgacagaagattcagcagaagcgccatccccgagcagatcatcagcagcaccctgagcagccccagcagcaacgcccccgacccctgcgccaaggagaccgtgctgagcgccctgaaggagaaggagaagaagagaaccgtggaggaggaggaccagatcttcctggacggccaggagaacaagagaagaagacacgacagcagcggcagcggccacagcgccttcgagcccctggtggccaacggcgtgcccgccagcttcgtgcccaagcccggcagcctgaagagaggcctgaacagccagagcagcgacgaccacctgaacaagagaagcagaagcagcagcatgagcagcctgaccggcgcctacgccagcggcatccccagcagcagcagaaacgccatcaccagcagctacagcagcaccagaggcatcagccagctgtggaagagaaacggccccagcagcagccccttcagcagccccgccagcagcagaagccagacccccgagagacccgccaagaagatcagagaggaggagctgtgccaccacagcagcagcagcacccccctggccgccgacagagagagccagggcgagaaggccgccgacaccacccccagaaagaagcagaacagcaacagccagagcacccccggcagcagcggccagagaaagagaaaggtgcagctgctgcccagcagaagaggcgagcagctgaccctgcccccccccccccagctgggctacagcatcaccgccgaggacctggacctggagaagaaggccagcctgcagtggttcaaccaggccctggaggacaagagcgacgccgccagcaacagcgtgaccgagaccccccccatcacccagcccagcttcaccttcaccctgcccgccgccgcccccgccagcccccccaccagcctgctggcccccagcaccaaccccctgctggagagcctgaagaagatgcagaccccccccagcctgcccccctgccccgagagcgccggcgccgccaccaccgaggccctgagcccccccaagacccccagcctgctgccccccctgggcctgagccagagcggcccccccggcctgctgcccagccccagcttcgacagcaagccccccaccaccctgctgggcctgatccccgcccccagcatggtgcccgccaccgacaccaaggccccccccaccctgcaggccgagaccgccaccaagccccaggccaccagcgcccccagccccgcccccaagcagagcttcctgttcggcacccagaacaccagccccagcagccccgccgcccccgccgccagcagcgccccccccatgttcaagcccatcttcaccgccccccccaagagcgagaaggagggccccaccccccccggccccagcgtgaccgccaccgcccccagcagcagcagcctgcccaccaccaccagcaccaccgcccccaccttccagcccgtgttcagcagcatgggcccccccgccagcgtgcccctgcccgcccccttcttcaagcagaccaccacccccgccaccgcccccaccaccaccgcccccctgttcaccggcctggccagcgccaccagcgccgtggcccccatcaccagcgccagccccagcaccgacagcgccagcaagcccgccttcggcttcggcatcaacagcgtgagcagcagcagcgtgagcaccaccaccagcaccgccaccgccgccagccagcccttcctgttcggcgccccccaggccagcgccgccagcttcacccccgccatgggcagcatcttccagttcggcaagccccccgccctgcccaccaccaccaccgtgaccaccttcagccagagcctgcacaccgccgtgcccaccgccaccagcagcagcgccgccgacttcagcggcttcggcagcaccctggccaccagcgcccccgccaccagcagccagcccaccctgaccttcagcaacaccagcacccccaccttcaacatccccttcggcagcagcgccaagagccccctgcccagctaccccggcgccaacccccagcccgccttcggcgccgccgagggccagccccccggcgccgccaagcccgccctggcccccagcttcggcagcagcttcaccttcggcaacagcgccgcccccgccgccgcccccacccccgccccccccagcatgatcaaggtggtgcccgcctacgtgcccacccccatccaccccatcttcggcggcgccacccacagcgccttcggcctgaaggccaccgccagcgccttcggcgcccccgccagcagccagcccgccttcggcggcagcaccgccgtgttcttcggcgccgccaccagcagcggcttcggcgccaccacccagaccgccagcagcggcagcagcagcagcgtgttcggcagcaccacccccagccccttcaccttcggcggcagcgccgcccccgccggcagcggcagcttcggcatcaacgtggccacccccggcagcagcaccaccaccggcgccttcagcttcggcgccggccagagcggcagcaccgccaccagcacccccttcgccggcggcctgggccagaacgccctgggcaccaccggccagagcacccccttcgccttcaacgtgagcagcaccaccgagagcaagcccgtgttcggcggcaccgccacccccaccttcggcctgaacacccccgcccccggcgtgggcaccagcggcagcagcctgagcttcggcgccagcagcgcccccgcccagggcttcgtgggcgtggcccccttcggcagcgccgccctgagcttcagcatcggcgccggcagcaagacccccggcgccagacagagactgcaggccagaagacagcacaccagaaagaagtag

SEQ ID NO: 247879 - DNA, 2955 bp, Artificial Sequence
  derived and/or modified sequence
atggtatgctccccagtcaccgtgcgcatcgcgccaccggacaggagattttctagatcggccattcccgagcaaatcatctcaagcacactgagcagtccgagcagtaatgcgcctgacccatgtgcaaaggagaccgttttatctgccttaaaggaaaaagagaagaagagaactgttgaagaagaagaccagatctttctcgacggccaagagaacaaacgtcgcaggcatgatagtagcggatctgggcatagcgcctttgaaccactcgtggctaacggagtgcccgccagttttgtgcccaagcctgggtcactgaaacgtggtctgaatagccagagcagcgacgatcacctgaataaacgctccagatcaagtagcatgtccagcctgaccggcgcctacgcttctgggattccaagcagctcaagaaacgcgattacgagcagttacagttcgacacgcgggatatcccagctctggaaacggaatggcccctcctctagcccttttagcagcccagcctccagccgaagccagacacccgagcgaccagctaagaagattcgcgaggaagaactgtgtcatcactcatcttctagtaccccattggccgccgaccgggaaagccagggggagaaggccgcagatactacaccaaggaagaaacagaacagcaattctcagagtacacccggatccagtgggcaacggaagcggaaagttcaactgctgccttctcgaaggggcgaacaattgaccctgccccctcctccccagctcggttatagcatcaccgcagaagatttggacctagaaaagaaggccagcttacagtggtttaaccaagctctagaggataagagcgatgcagctagtaatagcgtgactgagacgccccccatcacacagccatcctttaccttcactctgcctgccgcagcccccgcatcacctcctaccagcctccttgcaccatcgacaaacccactcttggaatctctaaaaaagatgcagacccccccatccttgccaccttgtccagagtcggcaggcgcagctacaactgaggctttatcacctcccaagacaccttccctcctcccacccctggggttatctcagtcaggcccaccaggactgctgccttctccctcatttgacagcaaacctcccacaactctgcttgggctgattcctgctccaagcatggtgccggcgaccgacactaaggctcctcccacactgcaggcggagacagccacgaagccacaggcgaccagcgctccatcccctgctccaaaacagtccttcttgttcggtacacagaacacatctccttcgagcccagcagcccctgctgcttcatcagctccaccaatgttcaaaccaatattcacggcgccaccgaaatcagagaaggaagggcctacaccacctggaccctcggtgacagcaactgctccctcctcatcctccctgcccacaacaacaagcactacggctcctactttccagcctgtattttcttccatgggaccgccagcaagcgtgcctttgccagctcctttctttaaacagacgactaccccagcaaccgcccccaccaccacagccccactcttcaccggcctggctagtgctacatctgcagtcgcaccgattactagcgcttctccgagcactgacagtgctagcaaaccggccttcggatttggcatcaatagcgtgtcctcttccagcgtgtctaccaccacgagtacagctacggctgctagccagccctttctgtttggagctcctcaggctagcgccgcctccttcactcctgctatgggatctatcttccagtttggaaaaccccctgcactccccaccaccacaaccgtgacgacgttctcccagagcctgcacacggcggtgccaacagcgacgagttcatcggctgcagactttagtggatttgggtcaaccctggccaccagtgccccagcaaccagcagccagcctaccctgacattttctaacacaagcacacccacgtttaacattcctttcgggtcatccgctaagagcccactgccctcatacccaggggccaatccccagcccgcctttggggccgcggaaggacaaccaccgggcgcagctaaacccgcattagctccctcgtttggcagctcattcaccttcgggaactctgctgctccagctgcagcccctacaccagcacccccctcgatgattaaggttgttcccgcatacgtacctacaccaatccatcccatcttcgggggggccacccattctgcatttggcctcaaggccacagcaagtgctttcggcgcccctgcaagctcacagcctgcgtttggcggaagtacagctgttttttttggtgccgctaccagctccggattcggagcaactacacaaacagcaagctctggctcctcatcatccgtgtttggcagcaccaccccctccccattcacatttggtgggtcggccgcgcccgcaggtagtgggtcctttggtatcaatgttgcaacaccgggttcttctaccactaccggcgccttcagctttggtgcaggacaatcaggttctaccgcaacatccacgccattcgcagggggtctcggacagaatgcacttggcaccacgggtcaaagtacaccatttgccttcaatgtctcaagtacaaccgaatccaaacccgtgtttggtggcacagccactcctacttttggtctcaatacacctgcacctggcgttggaacaagcgggagttccctgtccttcggcgcaagctcagcccccgcccagggatttgtcggagtggctccttttggtagtgctgccctgagcttttctattggagccgggtctaagactcccggagcgcgccagcgcctgcaggctcggcggcagcacacacgtaagaagtag

SEQ ID NO: 247880 - DNA, 2955 bp, Artificial Sequence
  derived and/or modified sequence
atggtgtgctcacccgtaacagtcaggatcgcacctcccgataggaggttcagccgatctgccattcctgagcagattatttcttctactctctctagtcctagttcaaatgcccccgatccttgcgccaaggaaaccgtgctgagtgcgctcaaggaaaaggagaagaagcggacggtcgaagaagaggaccagatctttctggacggccaggagaataaacgtcgcagacacgactcatccggatctggtcacagtgcatttgaacccctggtggctaacggcgtccctgcctcgttcgtgcccaagcccgggagtctaaaacggggcctcaacagtcagagcagcgacgaccatctgaacaaacggtcaagatccagcagtatgtcctctttgactggcgcctatgcttctggtataccatctagttctagaaacgcaatcaccagtagctacagctccacaagaggaatcagccagctctggaaaaggaatgggccttcttcctcgcccttcagctcccccgccagctcacgctcgcagactcccgagcgaccggccaagaaaattagggaggaggaattgtgccaccattcaagctcgtcaacgcctctcgctgctgatcgtgaaagtcagggagaaaaggcggcagacactacccctcggaagaagcagaacagtaactctcaatcgaccccgggttcctctggtcaacggaagcggaaggtacagcttctgccttcccgaagaggcgagcagctgactctgccaccacccccccaactcggctactcaattactgctgaagacctggacctggagaaaaaggcttcactgcagtggttcaaccaggccctggaggataagagcgacgccgcttcaaattcagtaaccgaaactcctcccatcacccagccctcatttactttcacactgccagctgccgccccggcctcacctccgacctcgctgttggctccgtccacaaatccacttttggaatccctcaaaaagatgcagactccccccagccttccgccttgcccggaatccgccggcgctgcaacaacggaggccctgtcaccaccaaagactccctcccttctacctcctctgggattaagtcaatctggccctcccggactgttaccctcacctagttttgatagtaagccgccgactacactgctgggtctgattccagctccctccatggtgcctgcaaccgataccaaagctccaccaacgcttcaggccgagactgccacgaagccccaagccacctcagcacccagccccgccccaaaacagtcatttttgtttggaacccaaaatacctctccctctagtcccgctgctcctgcagcctcctctgctccccccatgttcaaacccatattcaccgcaccccccaaaagcgaaaaggaaggccctacaccgcctggtcccagcgtcacagcaacggcccccagttcatcaagtttgccgacaacaacttctacaacggcaccaacatttcaaccggtgtttagctctatggggcctcctgctagtgtgcctttacccgctccattctttaaacagaccaccaccccagctaccgcaccaactaccactgcccctctgtttaccggcctagctagcgcaactagtgctgttgcgcctatcaccagcgcaagcccaagcactgacagcgccagcaagcccgccttcgggttcgggattaatagcgtatcatctagtagtgtgtctactaccacgtccactgccacggccgcttcacaacctttcctctttggggcccctcaggcctctgcggccagcttcacgcctgcgatgggatctatttttcagtttggtaaaccccccgcgcttccaactactacaacagtgacaacattctcacagagcctccatacggctgttcccaccgccacctccagttcagcagctgactttagcggttttggaagtacactggcaacctcagcccctgcgacctcttctcagcctacattgaccttcagtaataccagtactccaacgttcaatatcccttttggcagtagcgctaagagtcctcttccgtcctatccaggcgcaaatcctcagcctgctttcggcgctgccgaagggcagcctccaggggcagccaagccggcactcgccccctccttcggctcctccttcacctttggcaacagcgccgctcccgctgctgctcccacaccggcccccccctccatgattaaagtggtcccagcctatgtgccaacacctatccacccaatctttggcggcgccactcactccgcttttggactgaaagcaactgccagcgcgttcggtgccccagccagtagtcagccagctttcggtggatccactgctgtgtttttcggagccgcaacctctagcgggtttggcgccacaacgcagaccgccagtagcggctcgtctagctcagtgtttggcagcactacgccttccccatttacgtttggcggctccgctgctcccgcggggagcggctcttttggaattaacgtcgccacaccagggtcatccaccactacaggagcctttagctttggtgcaggccagagcggatcgacagccacgtccacgccctttgccggcgggttagggcagaatgctctgggcaccacaggccagtctaccccttttgcatttaacgttagcagtacaacagagtccaaacccgtatttgggggaaccgccacacctacatttggtctcaacacacccgctccgggagtgggaaccagcggatccagtctgagttttggggcttctagcgctcccgcccagggctttgtgggcgtcgcccccttcggctctgccgcgctctcgtttagcatcggcgcggggagcaagacaccaggggctcgccagcgactccaggccaggcgccagcacacaagaaagaagtag

SEQ ID NO: 247881 - DNA, 2955 bp, Artificial Sequence
  derived and/or modified sequence
atggtgtgcagccctgtgacagtgcgcatcgcccccccagaccggcgcttcagccgcagcgccatccctgagcagatcatcagcagcaccctgagcagccccagcagcaatgccccagacccctgtgccaaggagaccgtgctgagcgccctgaaggagaaggagaagaagaggacagtggaggaggaggaccagatcttcctggatggccaggagaacaagagaagaagacatgacagcagcggcagcggccacagcgcctttgagcccctggtggccaacggggtgcctgccagctttgtgcccaagccaggcagcctgaagaggggcctgaacagccagagcagtgatgaccacctgaacaagaggagccgcagcagctccatgagcagcctgactggagcctatgccagcggcatccccagcagcagcagaaatgccatcaccagcagctacagcagcacccggggcatcagccagctgtggaagagaaatggccccagcagcagccccttcagcagccctgccagcagccgcagccagaccccagagaggcctgccaagaagatccgggaggaggagctgtgccaccacagcagcagcagcacccccctggccgctgaccgggagagccagggcgagaaggctgctgacaccacccccaggaagaagcagaacagcaacagccagagcaccccaggcagcagcggccagaggaagaggaaggtgcagctgctgcccagcagaagaggagagcagctgaccctgcccccaccaccccagctgggctacagcatcacagctgaggacctggacctggagaagaaggccagcctgcagtggttcaaccaggccctggaggacaagagtgatgctgccagcaacagcgtgacagagaccccacccatcacccagcccagcttcaccttcaccctgcctgctgctgccccagccagcccccccaccagcctgctggcccccagcaccaaccccctgctggagagcctgaagaagatgcagaccccacccagcctgcccccctgcccagagagcgctggggccgccaccacagaggccctgagcccccccaagacccccagcctgctgccccccctgggcctgagccagagcggccccccaggcctgctgcccagccccagctttgacagcaagccacccaccaccctgctgggcctcatcccagcccccagcatggtgcctgccacagacaccaaggccccacccaccctgcaggccgagacagccaccaagccccaggccaccagcgcccccagccctgcccccaagcagagcttcctgtttggcacccagaacaccagccccagcagccctgctgccccagctgccagcagcgccccacccatgttcaagcccatcttcaccgccccacccaagtctgagaaggagggccccaccccacctggccccagcgtgacagccacagcccccagcagcagcagcctgcccaccaccaccagcaccacagcccccaccttccagcccgtcttcagctccatgggccccccagcctctgtgcccctgcctgcccccttcttcaagcagaccaccaccccagccacagcccccaccaccacagcccccctcttcaccggcctggccagcgccaccagcgctgtggcccccatcaccagcgccagccccagcacagattctgccagcaagccagcctttggatttggcatcaacagcgtgagcagcagctctgtgtccaccaccaccagcacagccacagctgccagccagcccttcctgtttggagccccccaggccagcgctgccagcttcaccccagccatgggcagcatcttccagtttgggaagcccccagccctgcccaccaccaccaccgtgaccaccttcagccagagcctgcacacagctgtgcccacagccaccagcagcagcgctgctgacttcagcggcttcggcagcaccctggccaccagcgccccagccaccagcagccagcccaccctgaccttcagcaacaccagcacccccaccttcaacatccccttcggcagcagcgccaagagccccctgcccagctacccaggggccaacccccagcctgcctttggagctgctgagggccagcccccaggagctgccaagccagccctggcccccagctttggcagcagcttcaccttcggcaacagcgctgccccagctgctgcccccaccccagccccacccagcatgatcaaggtggtgcctgcctacgtgcccacccccatccaccccatctttggaggagccacccacagcgccttcggcctgaaggccacagccagcgccttcggggccccagccagcagccagcctgccttcggcggcagcacagctgtgttcttcggggccgccaccagcagcggctttggagccaccacccagacagccagcagcggcagcagcagctctgtgtttggcagcaccacccccagccccttcaccttcggcggcagcgctgccccagctggcagcggcagctttggcatcaacgtggccaccccaggcagcagcaccaccactggagccttctcctttggagctggccagagcggcagcacagccaccagcaccccatttgctgggggcctgggccagaatgccctgggcaccaccggccagagcaccccatttgccttcaacgtgagcagcaccacagagagcaagcctgtgtttggaggaacagccacccccaccttcggcctgaacaccccagcccctggggtgggcaccagcggcagcagcctgagctttggagccagcagcgccccagcccagggctttgtgggcgtggcccccttcggcagcgctgccctgtccttcagcattggagctggcagcaagacccctggggcccggcagaggctgcaggcccggcggcagcacaccaggaagaagtag

SEQ ID NO: 247882 - DNA, 2955 bp, Artificial Sequence
  derived and/or modified sequence
atggtgtgcagccccgtgaccgtgcggatcgccccccccgaccggagattctcccgttctgcaattcctgagcagatcatcagttccaccctgagctccccctctagcaatgcacccgatccttgtgcaaaagaaactgtgttgagtgccctcaaggaaaaagaaaagaagcggaccgtagaggaggaagaccagatttttctcgacggtcaggagaataagcgcaggcgacacgattcaagcgggagtggccacagtgctttcgagcctctcgttgctaacggcgtgccagcgtcgtttgtgccaaagccaggaagcctaaaaagagggctaaattctcagtcctctgacgatcatctgaataagcggagtcgatcttcctccatgtcgtccctgaccggagcatacgcctctggaatccccagctcatcacgtaacgctataacctcctcctattccagcactcgcggtatatctcaactctggaagcgaaacggcccaagctcatcccccttctcctcacccgctagtagcaggagccagacgcctgaacggcccgcgaaaaaaatccgcgaggaggagttgtgtcatcattcctcaagctcgactccactggccgcagatcgcgaatctcaaggcgagaaagccgcggacacgacaccacgcaaaaagcagaactcaaacagtcagagtacacctggcagttctggccagcggaaacgaaaagttcagcttttaccgtcccgcaggggagaacaactaacactgcccccgccacctcaattggggtattcgataacagccgaggacctcgacttagagaaaaaggctagcttgcagtggttcaaccaggccctggaggacaaatccgatgccgcgagcaacagcgtcacagaaactccccctataacccaaccaagcttcacgttcaccctcccggctgctgcacccgccagtccccctactagcctattggcaccctctacgaatcccctactggagagtttgaagaagatgcagactccacctagccttcccccatgcccagagagtgccggggccgccaccacggaagctctgagcccaccaaagacacctagtttgttaccacccctgggcctgagccaatcaggccccccgggactgctcccttcccctagctttgacagtaagcctcctaccactctgctcggactcatccccgctccctcaatggtccctgctaccgatactaaagctccgcccactctccaagcagagaccgccaccaaaccacaagcaaccagcgcaccaagcccagctccaaagcaatccttcctctttggcacacagaataccagcccatcctctcccgccgctccggcagcctcctcagcacctcctatgttcaagcccattttcaccgcgccacctaagtctgagaaggagggtccaacaccccctggaccttccgtcacggccaccgccccctcatccagttcactcccaacgaccacctctactacggcccccaccttccagccagtcttctcatctatgggacctccagcttcggtgccgcttccggccccattcttcaaacagactacaacacccgcaacagcacccacgacaaccgccccactgtttacaggcctagccagtgctactagcgctgtcgcccccataaccagcgcgtcaccatccacggacagtgcttctaaacctgccttcgggttcggtatcaattctgtgtcctcatcttccgtatccaccacaacatctacagccactgccgcgagccagccgttcctcttcggggccccccaggcaagcgccgcaagtttcacccctgccatgggttccatcttccagttcggcaaaccccctgccctgcccaccaccacaaccgtgactaccttttcccagagcctgcacactgccgtgccgaccgcgacgagctcctccgctgccgatttttccggattcgggtccaccctggcgaccagcgcccctgctacatcgtctcagcctaccctaacattcagcaacacatccaccccaacattcaatatcccctttggctcctcagcgaaatctcctctgcctagctacccaggagccaatccacaaccagcatttggggccgcagaggggcagcctcctggtgctgctaaacctgctcttgcgccttcatttggaagttcttttaccttcggaaacagcgcagcgcccgccgcagcgccgactcccgcaccgccctctatgatcaaagttgtgcctgcatacgtgcctaccccgatacacccaatttttggcggcgctacccattctgcattcggcctgaaggccaccgcctcagcttttggtgcgcccgccagctcccaacccgcttttggcggtagcactgcggtgttcttcggagccgctaccagttccggattcggcgctaccacacagaccgcctcatctgggagctcttcctctgtgtttgggtctactactccgagcccatttacatttggcggcagtgccgcacctgcgggaagtggaagtttcgggataaatgtggccaccccgggcagcagtaccacaactggagccttttcttttggggccggccagtctggaagtactgccacatccacacccttcgccggtggactaggtcagaacgccctgggaaccacaggacagagcaccccattcgcttttaacgtgtcgagcactactgaatccaagcctgtcttcgggggcacagctaccccaacgttcggactgaacactccggcacctggggttggtaccagtggctctagcctgtcgtttggagcatcatcggcccctgcgcagggctttgtgggagtggccccatttggcagtgctgccctcagctttagcattggcgccggcagtaaaacaccaggcgccagacaacgtttacaagcccggagacaacacacaagaaaaaaatag

SEQ ID NO: 247883 - DNA, 2955 bp, Artificial Sequence
  derived and/or modified sequence
atggtgtgcagccccgtgaccgtgcggatcgccccccccgaccggaggttctctcgctccgcaatccccgaacagatcattagttccacactgtcgtcaccctcttccaatgctccagacccatgcgccaaggaaaccgtcttatccgccttgaaagagaaagagaaaaagcggaccgtagaggaggaagaccagatatttctggatgggcaggagaacaagaggaggcggcacgatagctccggcagcggacactctgccttcgagcccttagtggctaacggcgtccctgccagctttgtgcctaaaccaggctctctgaagcgtggactcaactcgcagtcctccgatgaccacctcaataagcgcagccgctccagttctatgtcctccctaacgggcgcatatgcctctggtattccttcctccagtcggaacgccataacatcttcatattccagcacccgcggaatcagccagctgtggaagcgcaatggcccaagctcctctccattctcgagcccggcctccagccggtctcagacacctgagcgtcctgctaagaaaatccgagaagaggagttgtgccatcactcctcatcaagcacaccgctggccgccgatcgagagtcccaaggcgaaaaagcggcagataccaccccgcgcaagaagcagaattccaattcccagtctactccaggcagcagcggacagcggaaacgcaaggtgcaactgctacccagccggcgtggagaacaactgactcttcccccgcctcctcagttgggctattcaataacagctgaagatctcgatctagagaagaaagcatccctccagtggtttaatcaggccctggaggacaagtctgacgcagcctccaattctgtgaccgaaactcctcccatcacacagccaagcttcacctttacactccccgccgccgcacccgcatctcctccaacaagcctgttggccccgagcaccaacccgctgctcgagtccttgaagaagatgcagacaccaccatcattgcccccttgtccagagagcgcgggcgctgccaccacagaagctctgagtcctcccaagactccctcgcttctgccgcctctgggactgtcccagagcgggcctcctggcttactcccttcccccagcttcgatagcaaacccccaaccacccttttgggactgattcccgcgccttccatggtacccgcgactgacacaaaggcgccgcccactttgcaggctgagacagctaccaaacctcaggccacttcagctccttctccggcgcccaaacagagctttctgttcggcacacagaacacgtcacctagttctccagcagctcccgccgcaagctccgcgccaccgatgtttaagcccatctttaccgccccccctaagtcggagaaggaaggccccaccccacccggaccatcggtaacagccactgctccctcgagttcctctcttccaactaccacctcaactacagctcccactttccagcctgtgttctcgtccatggggccaccagcatctgtgcccctccctgccccattttttaagcaaactaccacacctgccactgctcctaccacaacagctccgttgtttactggtttagcatcggccacctcagctgtggctcctattacgagcgcctcccccagcaccgactcagccagcaagcctgctttcggatttggcatcaacagtgtgtcatccagctcagtcagcacaactacttctacagccaccgctgcgagccagcccttccttttcggcgcccctcaggcctctgcggcaagttttacccctgccatgggtagcatattccagttcgggaaaccccctgccctgcctaccaccactacagtgaccacatttagccagtcactgcatacagccgtgcccaccgcaacctccagctccgcggccgatttttcaggcttcggaagcacactcgccaccagtgcacccgctacctcatcccagcctactctaacttttagtaatacctcgacgcccacatttaacatcccctttggatcgtcagccaagagccccctgcctagctacccaggcgccaatccccaacctgcattcggtgcggcagaggggcaacctccaggcgcggcgaagcccgctctggcccccagcttcggctcctccttcactttcgggaacagtgccgcccccgccgctgctccgactccggcgccaccttccatgattaaagttgtacctgcatacgtgcccacaccaatacaccctatcttcggaggggccactcactccgccttcggccttaaagccacagcatccgcctttggcgcacccgctagctcgcagccagccttcggcggatccactgctgttttttttggcgccgcgacatcaagcggattcggtgccaccacccaaactgcttcatctgggtcctctagtagtgtgttcggcagcacgacccccagccccttcacattcggcggctcggctgctccagcgggctcaggaagcttcggaataaacgtcgccacgccagggtcatccaccaccacaggggctttctcattcggggctgggcaatcgggatcaactgctacctctacacctttcgccgggggcttggggcagaacgcccttgggaccacggggcaatccaccccttttgcttttaatgtatcatccactaccgaatcaaaaccggtgttcggcggaacagcaacccccacatttggccttaatactcccgccccaggcgtggggactagcgggtcaagtttgagtttcggggcgtcttcagcccctgcacagggcttcgtgggggtggcaccattcggtagcgccgctttaagcttctcaattggtgctggtagcaagacccccggggccaggcagcgcttacaggctcgacgacaacacacaaggaagaaatag

SEQ ID NO: 247884 - DNA, 2955 bp, Artificial Sequence
  derived and/or modified sequence
atggtctgtagcccagttactgtgaggatagcgccacccgatcggaggtttagccgcagtgcaatccccgagcaaattatatctagcaccctctcttccccctcttctaacgctcccgacccttgtgcgaaagagaccgttttgtctgcgctcaaagaaaaggagaaaaaaagaacagtagaggaggaggatcagatcttccttgacgggcaggaaaacaagcggagaagacacgatagctccggcagtggccattccgcctttgaaccccttgtcgcaaatggcgtgcctgcctcgtttgtccccaagccaggaagtctgaaacggggtctgaacagtcaatctagcgatgaccatttgaacaagaggtctagaagctccagtatgtccagtctgactggggcatatgcctccggaattccctcaagctctagaaatgccataacaagcagctacagctccaccagaggaatttcacagctgtggaaacggaacggccctagctcttccccgttcagttcgccagcatcatcaaggtcgcagacgcccgagcggcctgctaagaagatcagggaggaggagctctgtcatcatagctcttcttcaacacccctggctgccgatcgcgaatcccaaggggaaaaagctgccgacacaactcccagaaagaagcagaacagcaattcccaaagcaccccaggctcctcgggacagcggaaacgcaaagtacagttactgccatcccgacgaggcgagcaactcactttaccacctcccccacagttaggatactcgatcactgccgaagacttggacctggagaaaaaagcttctctgcagtggttcaaccaggccctggaggataaaagcgacgctgcctccaactccgttacggaaaccccacccatcacccagccatccttcacgttcacactgcctgctgccgctccggctagtcctccgacctccctgctggcgccttctaccaatccgctgctcgaaagcttgaagaagatgcaaactccgcctagccttcctccttgtcctgagtccgctggtgccgctacaactgaggcactgtcaccgccaaaaaccccaagtctgctgccccctctggggctcagccagtctggccctcccggacttctcccaagccctagcttcgactcaaagccccctactaccctccttggacttatccctgctcccagcatggttccagccactgatacaaaagctcctccgaccctccaagctgaaacggcaaccaaaccccaggcaacctcagccccatcccctgctcccaagcagtcttttctgtttggaacccagaatacatccccaagctcccccgctgcacccgcagcaagctccgccccacccatgttcaagccaatattcaccgctcccccaaagagcgagaaggaaggacctacgcccccagggccttcggtgactgcaaccgctccaagtagcagttcattgcccacaaccacttctacgaccgcgccaactttccagccagtgttctcctcaatgggtccaccggcttcagttcccctgccggctcctttcttcaagcagactactactcccgcaacagcgcctacaaccacggctcctctctttacaggactagcctccgctacctccgcagttgcccctatcacatccgcgagcccttccacggatagtgccagtaagccagccttcggcttcggcattaactcagtgtccagctcctctgtatcaaccactacgtcaacagcaacggccgctagtcagccattcctgtttggagctcctcaggcatcagcagcgtctttcactcctgcaatgggctccatctttcagtttgggaagcccccagcgctgcctaccactaccactgtgactactttctcccagtcgctgcacaccgcagtcccaacagctaccagtagctccgccgcagacttttcgggcttcggctctactctggccacttccgcccctgcaacttcaagccagccaactctcacctttagcaatacttcaactccgacttttaacatccctttcggcagctcagctaagagccctctgccaagctaccccggagccaaccctcagccggcattcggcgctgcagagggccaaccaccaggggcagccaagccagcactagccccttcgttcggttcttccttcacattcggtaacagtgccgctccggctgctgccccaacacctgctccaccatccatgattaaggtggttccagcctacgtgcccactccgatccatcccattttcggcggagcaacccactccgcgtttggtctgaaggcaactgcctccgccttcggggcacccgcaagcagtcagcctgcttttgggggatcgaccgccgtgttcttcggagctgccacctcaagcgggtttggagcaaccacacagaccgccagttccggcagctctagctctgtcttcggttccactacacccagcccattcacctttggtggttccgcagcccctgcgggttccggttccttcggcattaacgtcgccacccccggatccagtaccaccaccggagcattctctttcggggctggccagtcaggatctacagccactagcactccttttgcgggagggttgggccaaaatgccctcgggacgacggggcaaagcactccgttcgcattcaatgtgtctagcacaaccgaaagcaagccagtgttcggtggcaccgccaccccaaccttcggactgaacacaccagcaccaggcgtgggcactagcggttcaagtctttccttcggagcctcctccgcacctgcccaaggattcgtgggagtggccccatttggcagcgccgctctgtcattttccataggagccggatctaaaacaccaggagctagacagagactacaggcccgaagacagcacacgaggaaaaaatag

SEQ ID NO: 247885 - DNA, 2955 bp, Artificial Sequence
  derived and/or modified sequence
atggtctgctcacccgtgaccgtgaggattgccccacccgatagaaggttttccagatctgcaatccctgagcaaataatcagcagcactctgagctctccgtctagcaacgcgcctgatccgtgtgcaaaagagacggtgctttcagccctgaaggagaaggagaagaagcgcacagtcgaagaggaagatcagatatttctcgacgggcaagaaaataagcgacgacgacatgactcgtctgggagcggacactctgccttcgagccactggttgccaacggagtgcctgcctcatttgtccctaagcccggttccctgaagaggggattaaactctcagtcttccgacgaccatctgaacaaacgctcaaggtcatcctccatgtctagcttaaccggcgcttacgcatcaggcattccttcatcttccagaaacgccatcacttcaagttatagctccaccagggggatctcacagttatggaaaagaaacggtcccagttcaagcccattttcctcacccgcttctagccggtcccaaacaccagaacgacccgcaaagaagattcgagaagaagaactttgccaccactcttccagttccacacctttagcagccgaccgggaatcccagggcgagaaagccgcagacaccactccgaggaaaaaacagaattctaactcccaaagtacgccgggatcctctggacagcgcaagcgcaaggtccagcttctgccgagccgtagaggcgaacagctcaccctgccgccacctcctcagcttgggtattccatcactgcggaggatcttgaccttgaaaaaaaggcttctctgcaatggtttaaccaagcactggaagacaagagtgacgctgcaagtaactctgtcactgagacacccccaatcactcagccttcatttactttcacactgccagcggcagcccctgcatctccccctacctccttactggctccttctaccaatccactgctggaatctctcaaaaagatgcagacccctccttccttacctccttgccctgagtctgccggagcagctacgactgaggctctaagcccgcctaaaacaccctccctgctgccaccacttgggcttagccagtccggcccacctggtcttctgccctctcccagttttgatagcaagccacctacaactctgttggggctgatacccgctcctagcatggtgccagccactgatactaaggccccacctactctgcaggcagaaacagctacaaaaccccaggctaccagtgccccaagccctgctcctaagcagagcttcttgtttggcactcagaacaccagtccttcaagcccggcagcacccgctgccagtagcgctccaccaatgttcaagcctatcttcaccgcaccacccaaaagtgaaaaggaaggcccaacacctccgggaccaagcgttacagcaacagccccatcatcttctagtctgcctacaacaacgtctactacagcccctactttccagcccgtgttttctagtatgggaccccctgccagtgtcccattgccagcccctttctttaagcagaccacaaccccagccaccgcccctacaacaacggcccctcttttcacaggtttggcgtccgcaacttctgcagttgctccaattacctccgcgagtcccagtactgactctgcaagcaagcctgcctttggtttcggcatcaatagcgttagtagctctagtgtgtcaactaccacgtcaaccgctacagcggcaagccagccctttctgttcggggctcctcaagcgtccgccgcaagcttcacgcccgcaatgggaagcatttttcagtttgggaagccacctgcacttcctaccaccacaacagtgacaacctttagccagtctctgcacactgctgtccctacagcaacaagctccagcgctgcggacttctcgggctttggatccacccttgccacctccgccccagccacatcatcccagccaactctcacattttcaaatacttcaacgcctacttttaacatccctttcggctcttcagccaaatcgcccctgccctcgtacccaggagcaaatcctcaacccgcatttggagcggcagaaggacagccaccaggagctgctaagcctgctctggcaccctcctttggaagtagttttacatttgggaatagcgctgcgccagccgcagcacccactccggctccgccttctatgattaaggtcgtcccagcttacgtgccaactcctatccacccaatcttcgggggagcgacccacagcgctttcggcctcaaagccaccgcctctgcttttggggcaccagcctctagccagcctgcattcggcggatccaccgcggtattctttggcgctgcaacaagttcgggattcggggcaacgacacagaccgccagttccggatctagcagcagcgtttttggtagcacgacgccttccccattcacctttggcggaagcgctgccccagccggatctggaagcttcggcatcaatgtggctactcctggctctagcacaactacaggcgcattttcattcggcgcaggacagtccggtagcaccgcaactagtaccccattcgccggaggattagggcaaaatgctcttggaactacgggccaaagcaccccttttgcctttaacgtgtcctccaccacagagtcgaagcccgtgttcggcggtactgccacaccaactttcgggctgaatacacccgctcctggagtaggcacttcaggatcttcactgtcctttggcgcatcctcagctccagcccagggattcgtgggagtggctccttttgggagtgctgcattatcctttagtataggagcaggtagcaaaacgccaggggctcgccagagattgcaggctcggcgacagcatacgcggaagaagtag

SEQ ID NO: 247886 - protein, 341 aa, Artificial Sequence
  derived and/or modified sequence
MNIVVEFFVVTFKVLWAFVLAAARWLVRPKEKSVAGQVCLITGAGSGLGRLFALEFARRRALLVLWDINTQSNEETAGMVRHIYRDLEAADAAALQAGNGEEEILPHCNLQVFTYTCDVGKRENVYLTAERVRKEVGEVSVLVNNAGVVSGHHLLECPDELIERTMMVNCHAHFWTTKAFLPTMLEINHGHIVTVASSLGLFSTAGVEDYCASKFGVVGFHESLSHELKAAEKDGIKTTLVCPYLVDTGMFRGCRIRKEIEPFLPPLKPDYCVKQAMKAILTDQPMICTPRLMYIVTFMKSILPFEAVVCMYRFLGADKCMYPFIAQRKQATNNNEAKNGI

SEQ ID NO: 247887 - DNA, 1026 bp, Artificial Sequence
  derived and/or modified sequence
atgaacatcgtcgtagaatttttcgtggttaccttcaaagtgttatgggccttcgtcctggccgccgctcgctggctcgtgaggccaaaagaaaaatccgtggctggacaggtttgcctgatcactggcgcgggaagcgggctggggagactgtttgcactcgagtttgcccgccggcgtgcgttactagtgctgtgggacatcaatacacagtccaacgaagagaccgccggcatggtacggcatatatacagagacttggaagccgctgacgcggccgccttgcaggcgggcaacggtgaggaagaaatactgcctcattgcaatttgcaggtgttcacgtacacgtgcgacgttggcaaaagggaaaacgtctacctgaccgccgagagggtccggaaggaggtcggagaagtttccgtgctggtcaataacgcgggcgttgtgtcaggccaccatttgcttgagtgcccggacgagctcattgaaagaaccatgatggttaattgtcacgcccacttctggaccacaaaggcatttctcccaaccatgttagagattaatcacgggcacattgttactgtcgctagctctctcggcctcttttccacagccggtgtggaagactattgtgccagcaaattcggtgtcgtgggctttcatgaaagcctctcacatgagttgaaggcggctgaaaaggacggcattaagacaaccctggtgtgtccatatctggtggacaccgggatgttccgagggtgtcgaattcggaaggaaattgaaccttttctacccccactgaagcctgactattgtgttaaacaggctatgaaggccatcctcaccgaccaacccatgatatgcacaccccgacttatgtacatagtgactttcatgaaatctatcctcccattcgaagcggttgtctgtatgtacagattcctaggcgctgacaagtgtatgtatccgttcattgcccagaggaagcaggctactaacaacaatgaggctaagaatgggatatag

SEQ ID NO: 247888 - DNA, 1026 bp, Artificial Sequence
  derived and/or modified sequence
atgaacatcgtggtggagttctttgtggtgaccttcaaggtgctgtgggcctttgtgctggccgccgcccgctggctggtgcggcccaaggagaagtctgtggccggccaggtgtgcctgatcaccggggccggcagcggcctgggccgcctgtttgccctggagtttgccaggagaagagccctgctggtgctgtgggacatcaacacccagagcaatgaggagacagctggcatggtgcgccacatctacagagacctggaggccgcagatgctgctgccctgcaggccggaaatggagaggaggagatcctgccccactgcaacctgcaggtgttcacctacacctgtgatgtgggcaagagagaaaatgtgtacctgacagctgagcgggtgaggaaggaggtgggggaggtgtctgtgctggtgaacaatgctggggtggtgtctggccaccacctgctggagtgcccagatgagctgattgaaagaaccatgatggtgaactgccacgcccacttctggaccaccaaggccttcctgcccaccatgctggagatcaaccacggccacatcgtgacagtggccagcagcctgggcctcttcagcacagctggggtggaggactactgtgccagcaagtttggagtggtgggcttccacgagagcctgagccatgagctgaaggctgctgagaaggatggcatcaagaccaccctggtgtgcccctacctggtggacaccggcatgttccggggctgccgcatcaggaaggagattgagcccttcctgccccccctgaagccagactactgtgtgaagcaggccatgaaggccatcctgacagaccagcccatgatctgcaccccccggctgatgtacatcgtgaccttcatgaagagcatcctgccctttgaagctgtggtgtgcatgtaccgcttcctgggcgctgacaagtgcatgtaccccttcatcgcccagaggaagcaggccaccaacaacaatgaggccaagaatggcatctag

SEQ ID NO: 247889 - DNA, 1026 bp, Artificial Sequence
  derived and/or modified sequence
atgaacatcgtggtggagttcttcgtggtgaccttcaaggtgctgtgggcctttgtgctcgcagctgcccgctggctcgtgcgccccaaggagaagagcgtcgcagggcaggtgtgcctgataacgggcgctggtagcggcctggggcggctgttcgccctggaatttgcccgcagacgagccctgctcgtgctctgggatataaatacacagagcaacgaggagacagctggaatggtgaggcacatttatcgagatctggaagccgccgatgcagcagccctgcaggctggcaatggcgaagaagagattctgcctcattgtaacctgcaagtctttacctacacatgcgatgtcggaaagcgggaaaacgtttacttgactgccgagcgcgtcagaaaggaagtgggagaagtgtcagtcctcgtaaacaacgcaggggtcgtgtccggtcaccacctgctggagtgtccagatgagttgatcgaacgtactatgatggtgaattgccacgcacatttctggacgacaaaagccttcctgccgaccatgttggaaataaatcacggtcatatcgttaccgtggctagtagtctcggactcttctctaccgcaggagttgaagactattgtgcttcgaagttcggggtagttggctttcacgagagcctgtctcatgagcttaaagctgcagaaaaagatggaatcaaaacaactcttgtgtgtccttacctcgttgataccggtatgttcaggggatgccggattcggaaagagattgaacctttcttacctccactgaagccggactactgtgtgaagcaagcaatgaaggccatcttaaccgatcaaccaatgatttgtaccccccgactaatgtacattgttacctttatgaaaagcatcctcccctttgaagcggtagtctgcatgtacaggttcctaggggccgacaagtgcatgtatcctttcatcgcccagcggaagcaggccacaaataacaacgaggcaaaaaatgggatatag

SEQ ID NO: 247890 - DNA, 1026 bp, Artificial Sequence
  derived and/or modified sequence
atgaacatagtcgtagaattctttgtggttaccttcaaggtgttgtgggcatttgtgctcgcagctgcgaggtggctcgtgcgccctaaagagaagtctgtggcaggacaagtatgtttgatcaccggggcagggagcggcctcggaagactctttgccctagagttcgccagaaggagagcattactcgtactgtgggacataaacacccagtccaatgaggagactgcaggaatggtgaggcacatttatcgggatctagaggcagccgatgcggctgctctgcaggccggaaacggagaggaagagatcttgccacattgcaatttgcaggtgttcacctatacctgcgacgtaggcaagagggagaatgtttacctgacggctgagagagtgagaaaagaggtcggagaggtgagtgtgttagtgaacaatgcaggcgttgtcagcggccatcacctcctggaatgtcccgacgaattgatcgaaaggacgatgatggtgaactgtcatgctcatttttggactactaaggcctttcttccaacaatgctggaaattaaccatgggcatatcgtcacagtggcgagttcactgggcctgttcagtacagcgggagtggaagactactgtgcctccaaattcggagtggtggggtttcatgagagtctgtctcacgaactaaaagccgctgaaaaagatggcattaaaactacccttgtgtgcccttatctggtggacaccggcatgtttcgaggttgccgtatccggaaggaaatcgagccctttttgcctcccttgaagccggactactgcgttaaacaggccatgaaggctatcctcactgaccagcctatgatatgcacaccaagacttatgtacatagtgacctttatgaagtcgatcttgcctttcgaagctgtggtgtgtatgtacaggttcctcggagctgacaagtgcatgtatccattcatcgctcagaggaaacaagcaactaataataatgaggccaagaatgggatctag

SEQ ID NO: 247891 - DNA, 3949 bp, Artificial Sequence
  derived and/or modified sequence
cggagcgctctgacttgcaagcgggctgcgctgcggagcccagtgcccgagtgacacccgcggagagtgcagggccggggaacgcgagccctcgggggcagctgcaaggcgttgggcagcgcttgcctgcgccgagcgagtctccccttcccggcgctccgccgccccgcaccccactctcccaccctctcgcaacttgggtcgagttgacaactcccgcggcagcccgctggcccgtgccgcctccgctgcgcacccctcccccggggtgagagggagccggcgcgccggttccggggacgctcgggcggcagcagcttggccatgagggcagttcgagtagtctaactcgcggctgtcaccgccactgcagcggagccggccggccgggcgctgcgggacgggcgggcggctgccggcaggaggcgccgagccgggtgactgccgcggcgggcacagtccggggccacagcgccgagcccgggcgggagtggccccgcgcaggcagggagcggcgccgcgcactccaacccggcgggcacctcgggggcgggcgcggggcgcagccttctcgtcccggcctctgtgacaagcgccccggagccgggagcccgattgccgggctcggggtgggcgcggacgcaggcactgggctcgtgcggggccccgggcgtcgcgatgaacatcgtggtggagttcttcgtggtcactttcaaagtgctctgggcgttcgtgctggccgcggcgcgctggctggtgcggcccaaggagaagagcgtggcgggccaggtgtgcctcatcaccggcgccggcagcggcctgggccgcctcttcgcgctggagttcgcccggcgtcgggcgctgctggtgctgtgggacatcaacacgcaaagcaacgaggagacggctggcatggtgcgccacatctaccgcgacctggaggcggccgacgccgctgcgctgcaagctgggaatggtgaggaagaaattctgccccactgtaacttgcaggtttttacctacacctgtgacgtggggaagagggagaacgtctacctgacggctgaaagagtccgcaaggaggttggcgaagtctcagtcctggtcaataatgctggtgtggtctctgggcatcaccttctggaatgtcctgatgagctcattgagagaaccatgatggtcaattgccatgcacacttctggaccactaaggcttttcttcctacgatgctggagattaatcatggtcatattgtgacagttgcaagttccttgggattgttcagtactgccggagttgaggattactgtgccagtaaatttggagttgtgggttttcatgaatccctgagccatgaactaaaggctgctgaaaaggatggaattaaaacaaccttggtttgcccttatcttgtagacactggcatgttcagaggctgccgaatcaggaaagaaattgagccttttctgccacctctgaagcctgattactgtgtgaagcaggccatgaaggccatcctcactgaccagcccatgatctgcactccccgcctcatgtacatcgtgaccttcatgaagagcatcctaccatttgaagcagttgtgtgcatgtatcggttcctaggagcggacaagtgtatgtacccctttattgctcaaagaaagcaagccacaaacaataatgaagcaaaaaatggaatctaagaatctttttgtatggaatattacttctatcagaagatgatcaagatgtttcagtccagtgcacatcagcattgctgacattttatggattctaaacttgtgttgtttcttttttaaatcaactttttaaaaaaataaagtgtaaattaaccgactagagtacttggaaaatgtgatcagtacaagtgaacttaggttgttgccaacagggtccttttaggcagaacccagaaaccagtcaaatctgtagagaagcagtgtgacatcttcaggttaccattattttttaatgagcaggaagtctagaaatgataactagactgtatgtttcatgtgtgtgatttttcagaattcccagagtttactcattcttgttattaaactctagccagttgacatcttcgcaatttcaaggactgatagtgctgtattttctcacgttttctaagtttccgttttgcaaggcctaggtgactttttcatggtgtttgtatgtttagctcttttgaaaaggaattttgaaatctccatcaactgaagtaaatgatgtctgagtgttacagtaaaggtgaccaagtctctttcttaaagtcacaatgactaaagtattagttgaatttttttttttttttttttgatggagtctcgctctgtcaccaggctggagtgcagtagcacaatcacggctcactgcaatctctgcctcccagtttcaagtgattctgctgtctcagcctcccaagtagctgggactacaggcatgcgccaccacgcccagctaatttttgtatttttagtagagacggggtttcaccatgttggtcaggatggtctccatctcttgacattgtgatccacctgcctcggcctcccaaagtgctgggattacaggcatgagccactgcacccagccttgaatttttaattttatctctgatatacttcattaagtgtctggagacctaattatcctaaaagatcatacattttctacctatgaattttgctgcatacagaaagtgccctttcctcaggaagttgctgtgtttcatttctttggatggactcttatctagaatacatagcagctctgcaaaggaacagtttttaaaaatgggaacttctacattgaaaagtccccatttttgtgccaactatgattagtgagaggaagaaatcttattctatggcatatgtatggaagggtgtaaagattcttttgaaaggtttattcacattgtagaacagcaaatgacatttttacagtatttttttgtaaagcaaactattttgtgccttgaatttggtatatgtgtattagtgaaacattgtaaaggtgaacttctacctctgtatctaaatgtataccatccacttgtaaatgactataaactattatgtgattgcttttttttttagaatgtcttgtttaaatagtggccaatgtttaaggctgttaaaataagccaacttttactaattggggagttttataaatgactgattaaatttaaagaattaacttacatgcaattgtgtgattattagttatcagcagtgttgtaaggaaaattattgtgtttttttttatgatcattatcccactttaggtaaagaaaaatattggaatggaatagtgttgggaaacagacattaacaacctagggtgcctgcactcaaatagccgatgttactgtccctagattagagacttgattaagggcttgtttgtaccaaaagtggggaaacaatgccatgacctgtgttttagtttggctgcaccacagatcaaatctgcactgtgtctacatataggaaaggtcctggtgtgtgctaatgttcccaatgcaggacttgaggaagagctctgttatatgtttccatttctctttatcaaagataaccaaaccttatggcccttataacaatggaggcactggctgcctcttaattttcaatcatggacctaaagaagtactctgaagggtctcaacaatgccaggtggggacagatatactcagagattatccaggtctgcctcccagcgagcctggagtacaccagaccctcctagagaaatctgttataatttaacaacccacttatccaccttaaaactgaggaaagtcgtctttacatctaattttattcttgtgtgttataacttaaacctatttctatttttgtttgttattgcccttataagggtgtccatctccaagttcaataaactaattcatttaa

SEQ ID NO: 247892 - DNA, 1026 bp, Artificial Sequence
  derived and/or modified sequence
atgaacatcgtggtggagttcttcgtggtgaccttcaaggtgctgtgggccttcgtgctggccgccgccagatggctggtgagacccaaggagaagagcgtggccggccaggtgtgcctgatcaccggcgccggcagcggcctgggcagactgttcgccctggagttcgccagaagaagagccctgctggtgctgtgggacatcaacacccagagcaacgaggagaccgccggcatggtgagacacatctacagagacctggaggccgccgacgccgccgccctgcaggccggcaacggcgaggaggagatcctgccccactgcaacctgcaggtgttcacctacacctgcgacgtgggcaagagagagaacgtgtacctgaccgccgagagagtgagaaaggaggtgggcgaggtgagcgtgctggtgaacaacgccggcgtggtgagcggccaccacctgctggagtgccccgacgagctgatcgagagaaccatgatggtgaactgccacgcccacttctggaccaccaaggccttcctgcccaccatgctggagatcaaccacggccacatcgtgaccgtggccagcagcctgggcctgttcagcaccgccggcgtggaggactactgcgccagcaagttcggcgtggtgggcttccacgagagcctgagccacgagctgaaggccgccgagaaggacggcatcaagaccaccctggtgtgcccctacctggtggacaccggcatgttcagaggctgcagaatcagaaaggagatcgagcccttcctgccccccctgaagcccgactactgcgtgaagcaggccatgaaggccatcctgaccgaccagcccatgatctgcacccccagactgatgtacatcgtgaccttcatgaagagcatcctgcccttcgaggccgtggtgtgcatgtacagattcctgggcgccgacaagtgcatgtaccccttcatcgcccagagaaagcaggccaccaacaacaacgaggccaagaacggcatctag

SEQ ID NO: 247893 - protein, 888 aa, Artificial Sequence
  derived and/or modified sequence
MPVRRGHVAPQNTFLDTIIRKFEGQSRKFIIANARVENCAVIYCNDGFCELCGYSRAEVMQRPCTCDFLHGPRTQRRAAAQIAQALLGAEERKVEIAFYRKDGSCFLCLVDVVPVKNEDGAVIMFILNFEVVMEKDMVGSPAHDTNHRGPPTSWLAPGRAKTFRLKLPALLALTARESSVRSGGAGGAGAPGAVVVDVDLTPAAPSSESLALDEVTAMDNHVAGLGPAEERRALVGPGSPPRSAPGQLPSPRAHSLNPDASGSSCSLARTRSRESCASVRRASSADDIEAMRAGVLPPPPRHASTGAMHPLRSGLLNSTSDSDLVRYRTISKIPQITLNFVDLKGDPFLASPTSDREIIAPKIKERTHNVTEKVTQVLSLGADVLPEYKLQAPRIHRWTILHYSPFKAVWDWLILLLVIYTAVFTPYSAAFLLKETEEGPPATECGYACQPLAVVDLIVDIMFIVDILINFRTTYVNANEEVVSHPGRIAVHYFKGWFLIDMVAAIPFDLLIFGSGSEELIGLLKTARLLRLVRVARKLDRYSEYGAAVLFLLMCTFALIAHWLACIWYAIGNMEQPHMDSRIGWLHNLGDQIGKPYNSSGLGGPSIKDKYVTALYFTFSSLTSVGFGNVSPNTNSEKIFSICVMLIGSLMYASIFGNVSAIIQRLYSGTARYHTQMLRVREFIRFHQIPNPLRQRLEEYFQHAWSYTNGIDMNAVLKGFPECLQADICLHLNRSLLQHCKPFRGATKGCLRALAMKFKTTHAPPGDTLVHAGDLLTALYFISRGSIEILRGDVVVAILGMGWGAGTGLEMPSAASRGASLLNMQSLGLWTWDCLQGHWAPLIHLNSGPPSGAMERSPTWGEAAELWGSHILLPFRIRHKQTLFASLK

SEQ ID NO: 247894 - DNA, 3558 bp, Artificial Sequence
  derived and/or modified sequence
ccgcggccgggccgagccgcaggcgctgcccgagccgcgggcgctggagcggctgtcggcgcggtggcaggcgggagccaggagtccggggctcgggcgggcggagcgcagcgcggggacgcggcggagcgggccccgcggctcggcgggggccggcagacaggtgtgccggcggcgggcggctcgcgctcaggcggctccaggccgggcccggggtccggagcggggagccgggagccgagcgaggacccggcgcccgcagtccagtcttggccgcgcccgtgctcggcttggccgcggggtgcggggaccacggcccggccgggccacccgaagcctagtgctgggccgggccgggccggggtgggtgggggcccgcccggcccgcccatgggctcaggatgccggtgcggaggggccacgtcgcgccgcagaacaccttcctggacaccatcatccgcaagtttgagggccagagccgtaagttcatcatcgccaacgctcgggtggagaactgcgccgtcatctactgcaacgacggcttctgcgagctgtgcggctactcgcgggccgaggtgatgcagcgaccctgcacctgcgacttcctgcacgggccgcgcacgcagcgccgcgctgccgcgcagatcgcgcaggcactgctgggcgccgaggagcgcaaagtggaaatcgccttctaccggaaagatgggagctgcttcctatgtctggtggatgtggtgcccgtgaagaacgaggatggggctgtcatcatgttcatcctcaatttcgaggtggtgatggagaaggacatggtggggtccccggctcatgacaccaaccaccggggcccccccaccagctggctggccccaggccgcgccaagaccttccgcctgaagctgcccgcgctgctggcgctgacggcccgggagtcgtcggtgcggtcgggcggcgcgggcggcgcgggcgccccgggggccgtggtggtggacgtggacctgacgcccgcggcacccagcagcgagtcgctggccctggacgaagtgacagccatggacaaccacgtggcagggctcgggcccgcggaggagcggcgtgcgctggtgggtcccggctctccgccccgcagcgcgcccggccagctcccatcgccccgggcgcacagcctcaaccccgacgcctcgggctccagctgcagcctggcccggacgcgctcccgagaaagctgcgccagcgtgcgccgcgcctcgtcggccgacgacatcgaggccatgcgcgccggggtgctgcccccgccaccgcgccacgccagcaccggggccatgcacccactgcgcagcggcttgctcaactccacctcggactccgacctcgtgcgctaccgcaccattagcaagattccccaaatcaccctcaactttgtggacctcaagggcgaccccttcttggcttcgcccaccagtgaccgtgagatcatagcacctaagataaaggagcgaacccacaatgtcactgagaaggtcacccaggtcctgtccctgggcgccgacgtgctgcctgagtacaagctgcaggcaccgcgcatccaccgctggaccatcctgcattacagccccttcaaggccgtgtgggactggctcatcctgctgctggtcatctacacggctgtcttcacaccctactcggctgccttcctgctgaaggagacggaagaaggcccgcctgctaccgagtgtggctacgcctgccagccgctggctgtggtggacctcatcgtggacatcatgttcattgtggacatcctcatcaacttccgcaccacctacgtcaatgccaacgaggaggtggtcagccaccccggccgcatcgccgtccactacttcaagggctggttcctcatcgacatggtggccgccatccccttcgacctgctcatcttcggctctggctctgaggagctgatcgggctgctgaagactgcgcggctgctgcggctggtgcgcgtggcgcggaagctggatcgctactcagagtacggcgcggccgtgctgttcttgctcatgtgcacctttgcgctcatcgcgcactggctagcctgcatctggtacgccatcggcaacatggagcagccacacatggactcacgcatcggctggctgcacaacctgggcgaccagataggcaaaccctacaacagcagcggcctgggcggcccctccatcaaggacaagtatgtgacggcgctctacttcaccttcagcagcctcaccagtgtgggcttcggcaacgtctctcccaacaccaactcagagaagatcttctccatctgcgtcatgctcattggctccctcatgtatgctagcatcttcggcaacgtgtcggccatcatccagcggctgtactcgggcacagcccgctaccacacacagatgctgcgggtgcgggagttcatccgcttccaccagatccccaatcccctgcgccagcgcctcgaggagtacttccagcacgcctggtcctacaccaacggcatcgacatgaacgcggtgctgaagggcttccctgagtgcctgcaggctgacatctgcctgcacctgaaccgctcactgctgcagcactgcaaacccttccgaggggccaccaagggctgccttcgggccctggccatgaagttcaagaccacacatgcaccgccaggggacacactggtgcatgctggggacctgctcaccgccctgtacttcatctcccggggctccatcgagatcctgcggggcgacgtcgtcgtggccatcctgggtatggggtggggggcgggcactggactggaaatgccctctgcagcctcaagaggtgcgagccttctgaatatgcagtcactggggctgtggacctgggactgcctgcagggtcactgggctcctttaattcacctaaactcaggccctccaagcggggccatggagaggagccccacgtggggtgaggctgctgaactctggggttcccacattctccttcccttcaggatccgccacaaacagacactttttgcttccttaaagtaggatcaaatctagatcctctagcctgggcagtagaggaagaaatgctagcctggaagctcggcatttggtttcactaagggccatgtggttccctgcagcctcatgcctggccccttgacacatccaaagcaaagggagtcctgccccctccccccacttcctttctaccctgcctgtgcacagtgggtgggttggtgtgtctggacactgaggacttcctccccctttgcctgtccttccctcggccctgtgtgcctcagggcagatatagcaagctctttcgaccatagttgatggtaggacattttagactttgtttctcagctctgtacaaacacaaatacacacccccacaaaactaaaatcaaagtttcactacataacactgggccttactgcatgtggttcattctagcatttctgttctgtgctgtgctaagctatactactgtatgttctttcagtaaaaaaaaaaaaaaaaaaaaaaaaa

SEQ ID NO: 247895 - DNA, 300 bp, Artificial Sequence
  derived and/or modified sequence
atgagctgtcaacagaatcagcagcagtgccagccacccccgaagtgccccattcccaagtatccacccaagtgcccaagcaaatgtgcaagtagttgtccaccacctatttcaagctgctgcggttcgtctagtggcggatgtgggtgctgctcttcagaaggcggaggatgttgcctgtcccaccacagacatcacagaagccactgtcaccgacctaaaagcagcaattgctacggctccggttctggacagcagagcggcggctccggctgttgtagtggcggaggttgctgctag

SEQ ID NO: 247896 - DNA, 2667 bp, Artificial Sequence
  derived and/or modified sequence
atgccagtccgccgcggacatgtggcgcctcagaataccttcctggacaccatcatccggaaattcgaaggccagtcgagaaagttcatcatcgcaaatgcgcgggtagaaaactgcgcggttatttactgcaatgacggtttttgcgagttatgcggatactctagagccgaggtgatgcaaagaccttgtacttgtgatttcctccacggacctaggacgcagcgccgcgccgccgcccaaatcgcacaggcacttctcggagctgaagagcggaaagtagaaattgcattctatagaaaggacgggtcgtgttttctgtgcttagtggatgtggtgcccgttaagaatgaagatggtgcagtcatcatgtttatactgaattttgaggtcgtcatggaaaaagacatggttgggtctccggcgcacgataccaaccacaggggacctcctacatcttggctcgcccccgggcgcgccaagacttttcggctcaagcttcctgctttgctagctcttactgcgcgagagagctctgttcggagtgggggggccggcggagcaggagcacccggcgccgtcgtggtggacgtggatttgacgccggccgccccgagctccgaatcgctggctctcgatgaggttaccgccatggacaaccacgtggccggtctcgggcctgcagaggagcggagagctcttgtgggcccaggcagtcctcctcggagtgcgcctgggcagctgccatctcccagagcccactccctgaacccggacgcttctggatcatcatgcagcctggcccgcactcgctcgcgggagagctgtgccagtgtgcgaagggcttcttcggccgatgatattgaggccatgcgtgctggcgtcttaccgcccccccctcggcacgccagcaccggcgctatgcaccctttaagaagtggcctcctgaactctacctcggactccgacctggtgcggtacagaactatcagcaaaattcctcaaataacccttaacttcgtagatctgaagggggatccctttctagcctctccaacaagtgaccgggagattatcgccccaaagattaaggaacggacccacaacgtgaccgagaaggtgacacaagtactgtcactgggagctgacgttctacccgagtacaaactgcaggccccgcggatacaccgatggacaattctgcactattcacccttcaaggctgtttgggactggctaatactcctactggtgatctatactgctgtgttcactccttatagtgcagctttcctgcttaaggaaacagaggagggaccccctgcaaccgagtgcggatacgcgtgtcagccccttgcagtcgttgacctcattgtggatatcatgttcatagtggacattttaatcaacttcagaaccacctatgtgaacgcgaacgaggaggttgtgtctcacccaggacgcattgctgtgcattattttaaagggtggttcctgatcgacatggtcgcagccattcccttcgatctgttgatttttggatctggcagtgaagagctgatcgggttgctgaagacagcacgcctcctgcgtctggtacgtgtggcgcgtaaactggaccgctactccgagtatggagcagcggtgttattcttgttaatgtgcacctttgcactgatcgctcattggctcgcttgcatctggtacgccatcgggaacatggaacaaccccacatggacagtagaataggctggttacacaacttgggggatcaaatcggaaagccgtataatagcagtggtctcggtggcccttccattaaggacaaatacgtcactgctttgtattttaccttctcctccctgacctccgtgggtttcggtaatgtttctcctaataccaactccgaaaaaatcttttctatatgtgtgatgttaattggaagcctgatgtacgcgtccatatttggaaacgtgagtgcaattatacagagactctattccggcacagcaaggtaccacacacagatgttgagagtacgggagttcatccggtttcaccagattcccaacccactgcggcagcggctggaggaatatttccagcatgcctggagctacacgaacggtatcgatatgaatgcagttttgaaaggttttccggaatgtttgcaagcggatatttgtctacacctcaaccgatcactgcttcagcattgcaagccgtttcgcggtgctaccaaggggtgtttacgagccttggcgatgaagttcaagacaacacacgccccaccaggggacactctggttcacgctggggacttgttaacagcactgtatttcatatcccggggaagcatcgagattctgagaggcgacgttgtagtggcaattctcggcatgggctggggcgctggcacagggttagagatgccttcagcagctagcaggggtgcctcactgttgaacatgcagtcattaggcctctggacctgggactgcctgcaaggtcactgggccccattgatccatctcaattccggcccacctagcggcgccatggaaagaagtcctacttggggcgaggctgctgaactctggggaagccacatcctcctcccgttccgcataaggcataagcagaccttgttcgcgtctctgaagtag

SEQ ID NO: 247897 - DNA, 2667 bp, Artificial Sequence
  derived and/or modified sequence
atgcctgtgcggcggggccacgtggccccccagaacaccttcctggacaccatcatcaggaagtttgagggccagagcaggaagttcatcatcgccaatgcccgggtggagaactgtgccgtcatctactgcaatgatggcttctgtgagctgtgtggctacagcagagctgaggtgatgcagaggccctgcacctgtgacttcctgcacggccccaggacccagaggagagctgctgcccagatcgcccaggccctgctgggcgctgaggagaggaaggtggagatcgccttctacaggaaggatggcagctgcttcctgtgcctggtggatgtggtgcctgtgaagaatgaagatggagctgtgatcatgttcatcctgaactttgaggtggtgatggagaaggacatggtgggcagccctgcccatgacaccaaccaccggggcccccccacctcctggctggcccctggccgggccaagaccttccggctgaagctgcctgccctgctggccctgacagcccgggagagctctgtgcgcagcggcggggccggcggggccggggcccctggagctgtggtggtggatgtggacctgaccccagctgcccccagcagcgagagcctggccctggatgaggtgacagccatggacaaccacgtggccggcctgggccctgctgaggagcggcgggccctggtgggccctggcagcccccccaggtctgcccctggccagctgcccagcccccgggcccacagcctgaacccagatgccagcggcagcagctgcagcctggcccggaccaggagccgggagagctgtgcctctgtgcggcgggccagcagcgcagatgacatcgaggccatgagagctggggtgctgcccccaccacccaggcatgccagcactggagccatgcaccccctgcggagcggcctgctgaacagcaccagtgacagcgacctggtgcgctaccgcaccatcagcaagatcccccagatcaccctgaactttgtggacctgaagggggaccccttcctggccagccccaccagtgaccgggagatcatcgcccccaagatcaaggagaggacccacaacgtgacagagaaggtgacccaggtgctgagcctgggcgcagatgtgctgcctgagtacaagctgcaggccccccgcatccaccgctggaccatcctgcactacagccccttcaaggctgtgtgggactggctgatcctgctgctggtgatctacacagctgtgttcaccccctacagcgctgccttcctgctgaaggagacagaggagggccccccagccacagaatgtggctacgcctgccagcccctggccgtggtggacctgattgtggacatcatgttcatcgtggacatcctgatcaacttccgcaccacctacgtgaatgccaatgaggaggtggtgagccaccctggaagaattgctgtgcactacttcaagggctggttcctgattgacatggtggccgccatcccctttgacctgctgatctttggaagtggcagcgaggagctgattggcctgctgaagacagcccggctgctgcggctggtgcgggtggccaggaagctggaccgctacagtgaatatggagctgctgtgctcttcctgctgatgtgcacctttgccctgattgcccactggctggcctgcatctggtacgccatcggcaacatggagcagccccacatggacagcagaattggctggctgcacaacctgggggaccagatcggcaagccctacaacagcagcggcctgggcggccccagcatcaaggacaagtatgtgacagccctgtacttcaccttcagcagcctgacctctgtgggctttggaaatgtgagccccaacaccaacagcgagaagatcttcagcatctgtgtgatgctgattggcagcctgatgtatgccagcatctttggaaatgtgtctgccatcatccagaggctgtacagcggcacagcccgctaccacacccagatgctgcgggtgcgggagttcatccgcttccaccagatccccaaccccctgcggcagaggctggaggagtacttccagcacgcctggagctacaccaatggaattgacatgaatgctgtgctgaagggcttccctgagtgcctgcaggccgacatctgcctgcacctgaacagaagcctgctgcagcactgcaagcccttccggggggccaccaagggctgcctgcgggccctggccatgaagttcaagaccacccacgcccctcctggggacaccctggtgcacgccggggacctgctgacagccctgtacttcatcagccggggcagcattgagatcctgcggggagatgtggtggtggccatcctgggcatgggctggggcgccggcaccggcctggagatgcccagcgctgccagcagaggagccagcctgctgaacatgcagagcctgggcctgtggacctgggactgcctgcagggccactgggcccccctcatccacctgaacagcggccccccatctggggccatggagaggagccccacctggggcgaggccgctgagctgtggggcagccacatcctgctgcccttccgcatccgccacaagcagaccctgtttgccagcctgaagtag

SEQ ID NO: 247898 - DNA, 2667 bp, Artificial Sequence
  derived and/or modified sequence
atgcccgtgcggcggggccacgtggccccccagaacaccttcctggacacgatcattcgcaaattcgaaggacagtcacgaaagttcattatcgcgaacgccagggttgaaaactgcgcggtcatctactgtaacgacggattttgtgagttatgcgggtattcaagagccgaagtcatgcagcggccttgcacttgtgactttctccacggacctcgcacccaacgaagagccgccgcccagatcgcccaggcactccttggcgcggaagagaggaaggttgagattgctttctaccggaaggatggttcctgctttctgtgtctggttgacgtggtacccgtgaaaaacgaagatggtgcagttatcatgttcatcctgaatttcgaagtggtcatggaaaaggacatggtgggcagtcccgcacacgataccaatcatagagggcccccaacatcttggctcgccccagggcgggccaagacattccggttaaagttacccgccctgttagctctgaccgcgcgcgaatcgtcagttaggtctggcggtgccgggggggcgggggcccccggagctgtcgtcgtggacgttgacctgacgccagccgccccgagcagtgagtccctggccctggacgaagtgactgctatggacaatcacgttgctggcctcgggcctgccgaagaacgacgggcactggtcggcccaggcagtccgccccggtccgcacctggacagctgccttcccccagggctcattcactcaacccggacgcctctggatcaagctgttcattggctcgcacaaggagtagggagagttgcgcttccgttaggcgagcatcttccgccgatgacatagaggcaatgcgggcaggagtgctccctcctccaccacggcacgcgagcacgggtgccatgcaccccctgagatcgggactcttgaactcgacctcagacagcgacctggtgcggtaccgaacaatatcaaaaatacctcaaatcacattgaattttgtggacttgaagggagaccccttcctcgcttcccccacctccgacagagagatcatcgccccaaagataaaggagcggacacataacgtcaccgaaaaggtgacacaggtcctaagcttaggggccgatgtgctgcctgaatataagctgcaggcacccagaatacatcgctggacaatcttacactactctcctttcaaagccgtctgggattggcttatcttattactggttatctacacagcagtgttcacaccctacagtgccgccttcctgcttaaagagacagaggagggaccgcctgcaactgaatgtgggtatgcatgtcagccccttgcagtcgtggacctgatcgtggacatcatgttcattgtcgacattcttatcaatttccgcacgacttacgtcaatgccaatgaggaggtggtttcccatcccgggcggattgctgttcactacttcaagggctggttccttattgatatggttgccgccatcccgttcgacctactgatcttcggcagtggctcagaggagctgataggcctgctcaagacagcgcggctcctccgcctggtacgcgttgctcgaaagctggataggtacagcgaatacggcgcagcagttttgttcctcctgatgtgtacatttgcactcattgctcactggctggcttgtatctggtatgctattggtaacatggagcagcctcatatggattctaggatcgggtggcttcacaacttgggcgatcagattggcaagccctataactcatcaggcctgggaggacctagcatcaaggataaatacgtgactgccctgtactttaccttcagctcactgacctcagtgggatttggcaacgttagccccaataccaatagcgaaaagattttttccatctgcgttatgctgatcggctcattgatgtacgcatcaatcttcggcaacgtttctgccattatccagcgactgtacagcggtacggctaggtaccacacccagatgctacgggtccgggaattcatacgctttcatcagattcccaatccgctgcgtcaaagacttgaggagtacttccagcacgcatggtcctacactaacggaatagatatgaatgctgttctgaaggggttccccgaatgcctacaggctgatatttgcctccacctgaaccgcagcttgctgcagcattgtaagccattccgcggagctacaaaaggatgtttgcgggctctggccatgaaattcaagacaactcatgcaccgcctggggatacactggtacacgccggagacttgcttaccgccctatatttcatttcgcgcgggtctatagaaattcttcgcggggatgtagtggttgctattctcggcatgggctggggcgctggcaccggtttggaaatgccctctgcggcctctcggggagcctccctgctgaatatgcagtctctgggcctatggacttgggattgtcttcagggccactgggcacctctgatccacctgaactccgggcctccatctggcgccatggagaggagtccaacctggggcgaggccgcagagctttgggggagccacattctgctaccatttcgtatcaggcataaacagaccctcttcgccagtctgaagtag

SEQ ID NO: 247899 - DNA, 3145 bp, Artificial Sequence
  derived and/or modified sequence
ccatgggctcaggatgccggtgcggaggggccacgtcgcgccgcagaacaccttcctggacaccatcatccgcaagtttgagggccagagccgtaagttcatcatcgccaacgctcgggtggagaactgcgccgtcatctactgcaacgacggcttctgcgagctgtgcggctactcgcgggccgaggtgatgcagcgaccctgcacctgcgacttcctgcacgggccgcgcacgcagcgccgcgctgccgcgcagatcgcgcaggcactgctgggcgccgaggagcgcaaagtggaaatcgccttctaccggaaagatgggagctgcttcctatgtctggtggatgtggtgcccgtgaagaacgaggatggggctgtcatcatgttcatcctcaatttcgaggtggtgatggagaaggacatggtggggtccccggctcatgacaccaaccaccggggcccccccaccagctggctggccccaggccgcgccaagaccttccgcctgaagctgcccgcgctgctggcgctgacggcccgggagtcgtcggtgcggtcgggcggcgcgggcggcgcgggcgccccgggggccgtggtggtggacgtggacctgacgcccgcggcacccagcagcgagtcgctggccctggacgaagtgacagccatggacaaccacgtggcagggctcgggcccgcggaggagcggcgtgcgctggtgggtcccggctctccgccccgcagcgcgcccggccagctcccatcgccccgggcgcacagcctcaaccccgacgcctcgggctccagctgcagcctggcccggacgcgctcccgagaaagctgcgccagcgtgcgccgcgcctcgtcggccgacgacatcgaggccatgcgcgccggggtgctgcccccgccaccgcgccacgccagcaccggggccatgcacccactgcgcagcggcttgctcaactccacctcggactccgacctcgtgcgctaccgcaccattagcaagattccccaaatcaccctcaactttgtggacctcaagggcgaccccttcttggcttcgcccaccagtgaccgtgagatcatagcacctaagataaaggagcgaacccacaatgtcactgagaaggtcacccaggtcctgtccctgggcgccgacgtgctgcctgagtacaagctgcaggcaccgcgcatccaccgctggaccatcctgcattacagccccttcaaggccgtgtgggactggctcatcctgctgctggtcatctacacggctgtcttcacaccctactcggctgccttcctgctgaaggagacggaagaaggcccgcctgctaccgagtgtggctacgcctgccagccgctggctgtggtggacctcatcgtggacatcatgttcattgtggacatcctcatcaacttccgcaccacctacgtcaatgccaacgaggaggtggtcagccaccccggccgcatcgccgtccactacttcaagggctggttcctcatcgacatggtggccgccatccccttcgacctgctcatcttcggctctggctctgaggagctgatcgggctgctgaagactgcgcggctgctgcggctggtgcgcgtggcgcggaagctggatcgctactcagagtacggcgcggccgtgctgttcttgctcatgtgcacctttgcgctcatcgcgcactggctagcctgcatctggtacgccatcggcaacatggagcagccacacatggactcacgcatcggctggctgcacaacctgggcgaccagataggcaaaccctacaacagcagcggcctgggcggcccctccatcaaggacaagtatgtgacggcgctctacttcaccttcagcagcctcaccagtgtgggcttcggcaacgtctctcccaacaccaactcagagaagatcttctccatctgcgtcatgctcattggctccctcatgtatgctagcatcttcggcaacgtgtcggccatcatccagcggctgtactcgggcacagcccgctaccacacacagatgctgcgggtgcgggagttcatccgcttccaccagatccccaatcccctgcgccagcgcctcgaggagtacttccagcacgcctggtcctacaccaacggcatcgacatgaacgcggtgctgaagggcttccctgagtgcctgcaggctgacatctgcctgcacctgaaccgctcactgctgcagcactgcaaacccttccgaggggccaccaagggctgccttcgggccctggccatgaagttcaagaccacacatgcaccgccaggggacacactggtgcatgctggggacctgctcaccgccctgtacttcatctcccggggctccatcgagatcctgcggggcgacgtcgtcgtggccatcctgggtatggggtggggggcgggcactggactggaaatgccctctgcagcctcaagaggtgcgagccttctgaatatgcagtcactggggctgtggacctgggactgcctgcagggtcactgggctcctttaattcacctaaactcaggccctccaagcggggccatggagaggagccccacgtggggtgaggctgctgaactctggggttcccacattctccttcccttcaggatccgccacaaacagacactttttgcttccttaaagtaggatcaaatctagatcctctagcctgggcagtagaggaagaaatgctagcctggaagctcggcatttggtttcactaagggccatgtggttccctgcagcctcatgcctggccccttgacacatccaaagcaaagggagtcctgccccctccccccacttcctttctaccctgcctgtgcacagtgggtgggttggtgtgtctggacactgaggacttcctccccctttgcctgtccttccctcggccctgtgtgcctcagggcagatatagcaagctctttcgaccatagttgatggtaggacattttagactttgtttctcagctctgtacaaacacaaatacacacccccacaaaactaaaatcaaagtttcactacataacactgggccttactgcatgtggttcattctagcatttctgttctgtgctgtgctaagctatactactgtatgttctttcagt

SEQ ID NO: 247900 - DNA, 2667 bp, Artificial Sequence
  derived and/or modified sequence
atgccagttagacggggtcacgttgctcctcaaaacaccttcttggacaccatcatcaggaaattcgagggtcagtctcgcaagtttattatcgccaatgctagggtggaaaattgcgctgtaatctattgcaacgacggtttttgcgaactgtgcggatatagtcgggctgaggtgatgcagagaccgtgtacctgcgactttttgcacggaccaaggacacagaggcgcgcagctgcacagatcgcgcaggcactcttgggagcagaggagagaaaggtggagattgccttctataggaaggacggcagttgtttcctgtgtttggtcgatgtggtgcctgtgaagaacgaggatggagccgtaatcatgttcatcttgaacttcgaagtggttatggagaaggacatggtgggaagtccagctcacgatactaaccatcgcggacccccaacttcctggctcgccccagggcgagccaagacctttcgactcaagctgcccgcactgctcgctctcacggctcgggagtcttcagtgcgaagcgggggtgcgggaggggcaggcgcaccaggcgcagtggtggtggatgtagatctgactcctgctgcgccttcttccgagagcctcgctctagacgaggtgaccgccatggacaaccacgtcgctggcctgggccctgccgaggagcgcagagctctggtgggccctggatccccccctcggtccgctcctggacagcttcctagcccccgagcccactcactcaacccggatgctagcggatccagctgctcgctcgctcgcacgcgttctagagaatcatgcgcttccgtgcgcagggcatccagcgcagacgatatcgaggccatgagggccggagtgcttccccctccccctaggcacgcatccacgggcgcaatgcatcccctccggagcggactgctgaacagcacgtccgacagcgacctcgtgagatacagaactatctcaaagatcccccagatcactctgaacttcgtggacttgaagggcgatcccttcctggcctcccccaccagcgatagagagataattgccccaaaaattaaagagagaacccataatgtcacggagaaggttacccaggtactatcacttggagcagacgtactgcccgaatacaaactacaggcacctcgtatccatagatggaccatcctgcattattctccttttaaagccgtctgggactggctgatcttactcctggtaatctatactgctgtattcactccttacagtgctgcattcctgctcaaggaaacagaggagggcccacccgcaacagagtgtggttacgcatgccagccactcgccgtcgtggaccttatcgtggatattatgttcattgtcgacatactcattaatttccggactacatatgtgaacgcaaatgaggaagtggtttcgcaccctggcagaattgcagtgcactattttaaaggctggttcctcatcgacatggttgctgcgatcccttttgacctactcatcttcgggtcaggttcagaggagctcatcgggcttctcaaaacggcccgactactcagactggttagggtcgccaggaaattggaccggtatagcgaatatggcgctgcggtgctcttcttgctgatgtgcactttcgcactcatcgctcactggctggcctgcatctggtacgctatcggcaacatggaacagcctcacatggactctaggataggctggctccacaatcttggagaccagatcggcaagccttacaatagctctggtctgggcggtccttctatcaaagacaaatatgtgaccgctctttatttcaccttttcttccctcacttcagtggggttcggcaatgtgtccccaaatactaattctgagaaaatatttagcatctgcgtaatgctcatcggtagcttaatgtatgccagcatattcggaaatgtgtcagctattatccagagattatatagcggaacagctcgataccacactcagatgctgcgagtgcgcgagtttatccggttccatcagattccaaatccgctgcgccagagactcgaggaatactttcagcatgcctggagttatacaaacgggatagatatgaacgcagttctgaagggattccccgagtgtctccaggcagatatttgtttgcacctgaacaggtccctgttgcaacactgcaaaccatttcggggagccacaaaaggatgtctgcgcgctctggccatgaagttcaagaccactcacgccccacccggagacactctggtgcatgctggagacctgcttacagccctgtacttcatctctaggggaagtatcgagatattgagaggcgatgtggtcgtcgccatcttagggatgggctggggagctggcaccggtctggaaatgccttccgctgcaagtcgaggagcaagcctattaaatatgcaaagccttggcctttggacttgggattgtctgcagggccactgggcacctctcattcatctaaatagcggccctcccagcggagctatggagcggagcccgacctggggggaagcagccgagctgtggggtagccatatcctgctgccttttcgcatacgtcacaagcagaccctttttgcctccctgaagtag

SEQ ID NO: 247901 - DNA, 2667 bp, Artificial Sequence
  derived and/or modified sequence
atgcccgtgagaagaggccacgtggccccccagaacaccttcctggacaccatcatcagaaagttcgagggccagagcagaaagttcatcatcgccaacgccagagtggagaactgcgccgtgatctactgcaacgacggcttctgcgagctgtgcggctacagcagagccgaggtgatgcagagaccctgcacctgcgacttcctgcacggccccagaacccagagaagagccgccgcccagatcgcccaggccctgctgggcgccgaggagagaaaggtggagatcgccttctacagaaaggacggcagctgcttcctgtgcctggtggacgtggtgcccgtgaagaacgaggacggcgccgtgatcatgttcatcctgaacttcgaggtggtgatggagaaggacatggtgggcagccccgcccacgacaccaaccacagaggcccccccaccagctggctggcccccggcagagccaagaccttcagactgaagctgcccgccctgctggccctgaccgccagagagagcagcgtgagaagcggcggcgccggcggcgccggcgcccccggcgccgtggtggtggacgtggacctgacccccgccgcccccagcagcgagagcctggccctggacgaggtgaccgccatggacaaccacgtggccggcctgggccccgccgaggagagaagagccctggtgggccccggcagcccccccagaagcgcccccggccagctgcccagccccagagcccacagcctgaaccccgacgccagcggcagcagctgcagcctggccagaaccagaagcagagagagctgcgccagcgtgagaagagccagcagcgccgacgacatcgaggccatgagagccggcgtgctgccccccccccccagacacgccagcaccggcgccatgcaccccctgagaagcggcctgctgaacagcaccagcgacagcgacctggtgagatacagaaccatcagcaagatcccccagatcaccctgaacttcgtggacctgaagggcgaccccttcctggccagccccaccagcgacagagagatcatcgcccccaagatcaaggagagaacccacaacgtgaccgagaaggtgacccaggtgctgagcctgggcgccgacgtgctgcccgagtacaagctgcaggcccccagaatccacagatggaccatcctgcactacagccccttcaaggccgtgtgggactggctgatcctgctgctggtgatctacaccgccgtgttcaccccctacagcgccgccttcctgctgaaggagaccgaggagggcccccccgccaccgagtgcggctacgcctgccagcccctggccgtggtggacctgatcgtggacatcatgttcatcgtggacatcctgatcaacttcagaaccacctacgtgaacgccaacgaggaggtggtgagccaccccggcagaatcgccgtgcactacttcaagggctggttcctgatcgacatggtggccgccatccccttcgacctgctgatcttcggcagcggcagcgaggagctgatcggcctgctgaagaccgccagactgctgagactggtgagagtggccagaaagctggacagatacagcgagtacggcgccgccgtgctgttcctgctgatgtgcaccttcgccctgatcgcccactggctggcctgcatctggtacgccatcggcaacatggagcagccccacatggacagcagaatcggctggctgcacaacctgggcgaccagatcggcaagccctacaacagcagcggcctgggcggccccagcatcaaggacaagtacgtgaccgccctgtacttcaccttcagcagcctgaccagcgtgggcttcggcaacgtgagccccaacaccaacagcgagaagatcttcagcatctgcgtgatgctgatcggcagcctgatgtacgccagcatcttcggcaacgtgagcgccatcatccagagactgtacagcggcaccgccagataccacacccagatgctgagagtgagagagttcatcagattccaccagatccccaaccccctgagacagagactggaggagtacttccagcacgcctggagctacaccaacggcatcgacatgaacgccgtgctgaagggcttccccgagtgcctgcaggccgacatctgcctgcacctgaacagaagcctgctgcagcactgcaagcccttcagaggcgccaccaagggctgcctgagagccctggccatgaagttcaagaccacccacgccccccccggcgacaccctggtgcacgccggcgacctgctgaccgccctgtacttcatcagcagaggcagcatcgagatcctgagaggcgacgtggtggtggccatcctgggcatgggctggggcgccggcaccggcctggagatgcccagcgccgccagcagaggcgccagcctgctgaacatgcagagcctgggcctgtggacctgggactgcctgcagggccactgggcccccctgatccacctgaacagcggcccccccagcggcgccatggagagaagccccacctggggcgaggccgccgagctgtggggcagccacatcctgctgcccttcagaatcagacacaagcagaccctgttcgccagcctgaagtag

SEQ ID NO: 247902 - protein, 819 aa, Artificial Sequence
  derived and/or modified sequence
MAAPAGKASRTGALRPRAQKGRVRRAVRISSLVAQEVLSLGADVLPEYKLQAPRIHRWTILHYSPFKAVWDWLILLLVIYTAVFTPYSAAFLLKETEEGPPATECGYACQPLAVVDLIVDIMFIVDILINFRTTYVNANEEVVSHPGRIAVHYFKGWFLIDMVAAIPFDLLIFGSGSEELIGLLKTARLLRLVRVARKLDRYSEYGAAVLFLLMCTFALIAHWLACIWYAIGNMEQPHMDSRIGWLHNLGDQIGKPYNSSGLGGPSIKDKYVTALYFTFSSLTSVGFGNVSPNTNSEKIFSICVMLIGSLMYASIFGNVSAIIQRLYSGTARYHTQMLRVREFIRFHQIPNPLRQRLEEYFQHAWSYTNGIDMNAVLKGFPECLQADICLHLNRSLLQHCKPFRGATKGCLRALAMKFKTTHAPPGDTLVHAGDLLTALYFISRGSIEILRGDVVVAILGKNDIFGEPLNLYARPGKSNGDVRALTYCDLHKIHRDDLLEVLDMYPEFSDHFWSSLEITFNLRDTNMIPGSPGSTELEGGFSRQRKRKLSFRRRTDKDTEQPGEVSALGPGRAGAGPSSRGRPGGPWGESPSSGPSSPESSEDEGPGRSSSPLRLVPFSSPRPPGEPPGGEPLMEDCEKSSDTCNPLSGAFSGVSNIFSFWGDSRGRQYQELPRCPAPTPSLLNIPLSSPGRRPRGDVESRLDALQRQLNRLETRLSADMATVLQLLQRQMTLVPPAYSAVTTPGPGPTSTSPLLPVSPLPTLTLDSLSQVSQFMACEELPPGAPELPQEGPTRRLSLPGQLGALTSQPLHRHGSDPGS

SEQ ID NO: 247903 - protein, 393 aa, Artificial Sequence
  derived and/or modified sequence
MAAPAGKASRTGALRPRAQKGRVRRAVRISSLVAQEVLSLGADVLPEYKLQAPRIHRWTILHYSPFKAVWDWLILLLVIYTAVFTPYSAAFLLKETEEGPPATECGYACQPLAVVDLIVDIMFIVDILINFRTTYVNANEEVVSHPGRIAVHYFKGWFLIDMVAAIPFDLLIFGSGSEELIGLLKTARLLRLVRVARKLDRYSEYGAAVLFLLMCTFALIAHWLACIWYAIGNMEQPHMDSRIGWLHNLGDQIGKPYNSSGLGGPSIKDKYVTALYFTFSSLTSVGFGNVSPNTNSEKIFSICVMLIGSLMYASIFGNVSAIIQRLYSGTARYHTQMLRVREFIRFHQIPNPLRQCCDHPGAWPHFHIPAVARQPPPHPHLGLAFSGFPVHGV

SEQ ID NO: 247904 - DNA, 3212 bp, Artificial Sequence
  derived and/or modified sequence
ggccggctggaggagctgaggttccgagtgcggccgctgctgggctggcgggcgggcagagcacggcaccctggcagcagggcccacgccacggggccatgggcagctcgagccaggcaggctgctgcccacgcttactgccagggtgaccccagccctggggcccagccacaaccaccctggcttcatgccaggggctgctctggttgccagtcggccagcctcgggggtgcagcctgggctgggactgctgctggggtgcaggtgaggcagtggccgggccctcaggccccagggcaggcaggctgcagggagccaagtcctccatggcggccccagccgggaaggcgagcaggacaggggctctgcggcccagggcccagaaaggccgggtgaggcgggccgtgcgcatctccagcctcgtggcccaggaggtcctgtccctgggcgccgacgtgctgcctgagtacaagctgcaggcaccgcgcatccaccgctggaccatcctgcattacagccccttcaaggccgtgtgggactggctcatcctgctgctggtcatctacacggctgtcttcacaccctactcggctgccttcctgctgaaggagacggaagaaggcccgcctgctaccgagtgtggctacgcctgccagccgctggctgtggtggacctcatcgtggacatcatgttcattgtggacatcctcatcaacttccgcaccacctacgtcaatgccaacgaggaggtggtcagccaccccggccgcatcgccgtccactacttcaagggctggttcctcatcgacatggtggccgccatccccttcgacctgctcatcttcggctctggctctgaggagctgatcgggctgctgaagactgcgcggctgctgcggctggtgcgcgtggcgcggaagctggatcgctactcagagtacggcgcggccgtgctgttcttgctcatgtgcacctttgcgctcatcgcgcactggctagcctgcatctggtacgccatcggcaacatggagcagccacacatggactcacgcatcggctggctgcacaacctgggcgaccagataggcaaaccctacaacagcagcggcctgggcggcccctccatcaaggacaagtatgtgacggcgctctacttcaccttcagcagcctcaccagtgtgggcttcggcaacgtctctcccaacaccaactcagagaagatcttctccatctgcgtcatgctcattggctccctcatgtatgctagcatcttcggcaacgtgtcggccatcatccagcggctgtactcgggcacagcccgctaccacacacagatgctgcgggtgcgggagttcatccgcttccaccagatccccaatcccctgcgccagcgcctcgaggagtacttccagcacgcctggtcctacaccaacggcatcgacatgaacgcggtgctgaagggcttccctgagtgcctgcaggctgacatctgcctgcacctgaaccgctcactgctgcagcactgcaaacccttccgaggggccaccaagggctgccttcgggccctggccatgaagttcaagaccacacatgcaccgccaggggacacactggtgcatgctggggacctgctcaccgccctgtacttcatctcccggggctccatcgagatcctgcggggcgacgtcgtcgtggccatcctggggaagaatgacatctttggggagcctctgaacctgtatgcaaggcctggcaagtcgaacggggatgtgcgggccctcacctactgtgacctacacaagatccatcgggacgacctgctggaggtgctggacatgtaccctgagttctccgaccacttctggtccagcctggagatcaccttcaacctgcgagataccaacatgatcccgggctcccccggcagtacggagttagagggtggcttcagtcggcaacgcaagcgcaagttgtccttccgcaggcgcacggacaaggacacggagcagccaggggaggtgtcggccttggggccgggccgggcgggggcagggccgagtagccggggccggccgggggggccgtggggggagagcccgtccagtggcccctccagccctgagagcagtgaggatgagggcccaggccgcagctccagccccctccgcctggtgcccttctccagccccaggccccccggagagccgccgggtggggagcccctgatggaggactgcgagaagagcagcgacacttgcaaccccctgtcaggcgccttctcaggagtgtccaacattttcagcttctggggggacagtcggggccgccagtaccaggagctccctcgatgccccgcccccacccccagcctcctcaacatccccctctccagcccgggtcggcggccccggggcgacgtggagagcaggctggatgccctccagcgccagctcaacaggctggagacccggctgagtgcagacatggccactgtcctgcagctgctacagaggcagatgacgctggtcccgcccgcctacagtgctgtgaccaccccggggcctggccccacttccacatccccgctgttgcccgtcagccccctccccaccctcaccttggactcgctttctcaggtttcccagttcatggcgtgtgaggagctgcccccgggggccccagagcttccccaagaaggccccacacgacgcctctccctaccgggccagctgggggccctcacctcccagcccctgcacagacacggctcggacccgggcagttagtggggctgcccagtgtggacacgtggctcacccagggatcaaggcgctgctgggccgctccccttggaggccctgctcaggaggccctgaccgtggaaggggagaggaactcgaaagcacagctcctcccccagcccttgggaccatcttctcctgcagtcccctgggccccagtgagaggggcaggggcagggccggcagtaggtggggcctgtggtccccccactgccctgagggcattagctggtctaactgcccggaggcacccggccctgggccttaggcacctcaaggacttttctgctatttactgctcttattgttaaggataataattaaggatcatatgaataattaatgaagatgctgatgactatgaataataaataattatcctgaggagactccaaaaaaaaaaaaaaaaaa

SEQ ID NO: 247905 - DNA, 2460 bp, Artificial Sequence
  derived and/or modified sequence
atggccgctcctgctgggaaggcatcgcggaccggggctctgaggccacgagcacaaaaggggagggtccgccgcgctgtgcggattagcagcttggtggcccaagaggtgctctcactaggggccgatgtgcttccggagtacaaactccaggcacccaggatacacagatggacaattctgcactacagtccgttcaaggctgtctgggattggctcattctgttactggttatatacacagccgtgtttactccttattcggcagccttcctgctcaaagagacagaggagggcccacccgcaactgaatgcggctatgcgtgtcagccactcgccgtcgtggacttgatcgttgacatcatgtttatcgtggacatcctgatcaactttcgtactacttacgtgaacgctaatgaagaggtggtctctcaccctgggaggattgcagtgcattacttcaagggatggttcctcatcgatatggtggccgctatccccttcgatctgttaatcttcggaagcgggtctgaggagcttattggcctgctcaagactgctcggctgcttcgcctggtgcgagtggcccgtaaactagatcggtattccgagtacggggccgcagtcttgtttttgctaatgtgtacgttcgccctgatcgcccactggttggcctgcatctggtacgccattgggaacatggaacagcctcacatggactctcgcattgggtggttgcacaatctgggtgatcagatcgggaagccatataactcttctgggctgggcgggccatcgatcaaagacaagtacgtcacggccttgtacttcactttcagttcactgacttcagtggggtttggaaatgtttccccgaataccaactcagaaaaaatttttagtatctgcgtgatgcttattggctccctcatgtacgcctcaatctttggaaacgtgagcgccattattcaacggctgtacagcggtacagcgagataccacacgcagatgctgcgtgtgagggaatttatccgtttccaccagattccaaaccctctgaggcaaagactggaggaatactttcagcacgcatggagctacacgaatggtatcgacatgaacgcagttttgaagggctttccggagtgtctgcaggccgatatctgccttcacctgaataggtctctactccagcactgcaagcctttcaggggggcaacaaagggatgcttgcgggcacttgcaatgaaattcaaaactacacatgccccacccggagatacactggtgcatgccggagacttgctgaccgctttatatttcatctcccgtggctcgattgaaatattgcgcggggacgtggtagtggctatcctggggaagaacgacatctttggcgaacctcttaacctctacgcccgacccgggaagtccaacggggatgtgcgagctctcacatattgtgaccttcacaaaattcatcgggatgacttgttagaagtactggatatgtatccagaattctctgaccatttttggagcagtctcgaaataacatttaacctccgtgatactaatatgattcctggctctcctggctcaaccgagttggagggcggcttctctagacaacgaaagcgcaagttgagctttcggcgcagaactgacaaggatacagagcagccgggagaggtatctgccttaggccccggccgagccggcgccggtccgtcctctcgaggccggcctggaggcccttggggcgaaagcccatcctcagggccatcatcccccgaatcatccgaggacgaagggccaggcagatccagctctcccctccgtctggttcccttcagttcgccaaggcctcccggtgaaccccctggaggggagcctctgatggaggattgtgaaaagtcttcagacacatgcaacccactaagtggggcattctccggggtgagtaatattttctcattttggggcgattcccgcgggcgccagtaccaggaactcccacggtgcccggctcctaccccctctcttttgaacatccctctgtcatcaccagggcggcgtccgcgaggcgacgtggaaagtagactggatgctctgcagcgacagctgaatcggctggagacgaggctatcagccgatatggcaactgtacttcagttgttgcaacggcagatgacattagtccccccagcatactcagcagtaactacaccaggccctgggcccacctccacctccccactgctgcctgttagccccctcccgaccctcactctcgatagcctgagccaggtcagccaattcatggcttgcgaggaattaccccccggagcacctgagctgccccaggagggacctacccgaaggttgtccctgcctggtcaactcggtgctctgacatctcagcctctgcatagacatgggtccgaccccggaagctag

SEQ ID NO: 247906 - DNA, 2460 bp, Artificial Sequence
  derived and/or modified sequence
atggccgccccagctgggaaggccagcaggactggagccctgcggccccgggcccagaagggccgggtgcggcgggctgtgcgcatcagcagcctggtggcccaggaggtgctgagcctgggcgcagatgtgctgcctgagtacaagctgcaggccccccgcatccaccgctggaccatcctgcactacagccccttcaaggctgtgtgggactggctgatcctgctgctggtgatctacacagctgtgttcaccccctacagcgctgccttcctgctgaaggagacagaggagggccccccagccacagaatgtggctacgcctgccagcccctggccgtggtggacctgattgtggacatcatgttcatcgtggacatcctgatcaacttccgcaccacctacgtgaatgccaatgaggaggtggtgagccaccctggaagaattgctgtgcactacttcaagggctggttcctgattgacatggtggccgccatcccctttgacctgctgatctttggaagtggcagcgaggagctgattggcctgctgaagacagcccggctgctgcggctggtgcgggtggccaggaagctggaccgctacagtgaatatggagctgctgtgctcttcctgctgatgtgcacctttgccctgattgcccactggctggcctgcatctggtacgccatcggcaacatggagcagccccacatggacagcagaattggctggctgcacaacctgggggaccagatcggcaagccctacaacagcagcggcctgggcggccccagcatcaaggacaagtatgtgacagccctgtacttcaccttcagcagcctgacctctgtgggctttggaaatgtgagccccaacaccaacagcgagaagatcttcagcatctgtgtgatgctgattggcagcctgatgtatgccagcatctttggaaatgtgtctgccatcatccagaggctgtacagcggcacagcccgctaccacacccagatgctgcgggtgcgggagttcatccgcttccaccagatccccaaccccctgcggcagaggctggaggagtacttccagcacgcctggagctacaccaatggaattgacatgaatgctgtgctgaagggcttccctgagtgcctgcaggccgacatctgcctgcacctgaacagaagcctgctgcagcactgcaagcccttccggggggccaccaagggctgcctgcgggccctggccatgaagttcaagaccacccacgcccctcctggggacaccctggtgcacgccggggacctgctgacagccctgtacttcatcagccggggcagcattgagatcctgcggggagatgtggtggtggccatcctgggcaagaatgacatctttggagagcccctgaacctgtatgcccggcctgggaagagcaatggagatgtgcgggccctgacctactgtgacctgcacaagatccacagagatgacctgctggaggtgctggacatgtacccagagttcagtgaccacttctggagcagcctggagatcaccttcaacctgcgggacaccaacatgatccctggcagccctggcagcacagagctggagggcggcttcagccggcagaggaagaggaagctgtccttcagaagaagaacagacaaggacacagagcagcccggggaggtgtctgccctgggccctggccgggccggggccggccccagcagccggggccggcctgggggcccctggggcgagagccccagcagcggccccagcagccctgagagcagtgaagatgagggccctggccgcagcagcagccccctgcggctggtgcccttcagcagccccaggcctcctggagagcccccaggaggagagcccctgatggaggactgtgagaagagcagtgacacctgcaaccccctgagcggggccttcagcggcgtgagcaacatcttctccttctggggagacagccggggccggcagtaccaggagctgccccgctgcccagcccccacccccagcctgctgaacatccccctgagcagccctggccggcggcccagaggagatgtggagagccggctggatgccctgcagaggcagctgaaccggctggagacccggctgtctgctgacatggccaccgtgctgcagctgctgcagaggcagatgaccctggtgcccccagcctacagcgctgtgaccaccccaggccctggccccaccagcaccagccccctgctgcctgtgagccccctgcccaccctgaccctggacagcctgagccaggtgtcccagttcatggcctgtgaggagctgcccccaggggcccctgagctgccccaggagggccccacccggcggctgagcctgcccggccagctgggcgccctgaccagccagcccctgcacagacatggcagtgaccccggcagctag

SEQ ID NO: 247907 - DNA, 2460 bp, Artificial Sequence
  derived and/or modified sequence
atggccgcccccgccggcaaggccagccggaccggcgccctgcggccccgcgcgcaaaagggccgggtgagaagagccgtgcggataagcagcctggtggcccaggaagtgttgtcattaggggctgacgttctaccagagtacaaattgcaggccccccgcattcacagatggacaatcttgcattactccccttttaaggccgtgtgggattggctcatccttctactcgttatatacaccgcagtttttacaccctattctgctgcattccttctgaaagagaccgaggagggcccccctgcgaccgagtgtgggtatgcctgtcaacccctggcggttgtcgatctcattgtcgatatcatgttcatcgttgatatccttatcaactttagaaccacttatgtcaacgccaacgaggaggtggtgtcccaccccggccggattgcagtgcactattttaaggggtggtttttgattgatatggttgccgcaattccctttgacctccttattttcggctctggctcagaagaattaataggactcctgaaaactgctaggcttcttcggttggtgagagttgccaggaagctggacagatactccgaatacggtgccgctgtactgttcctgcttatgtgtacattcgcacttattgcacattggctcgcatgtatatggtacgctatcggcaatatggaacagccacacatggatagtcgcatcggatggctacataacttgggagaccaaataggcaagccttataacagtagtggattgggcggccccagtatcaaggataagtacgttaccgccttatactttacatttagttcgcttacctcagtcgggttcgggaatgtctctccgaacacaaattctgagaagattttttctatttgcgtgatgctgattgggagcttaatgtatgcaagcatatttgggaacgtaagcgcaataatccagcgactgtacagtgggaccgccaggtaccacacccaaatgctgcgggtacgggagttcatcaggtttcatcagattccaaatccacttaggcagagattggaagagtatttccaacatgcttggagttatactaacggcatcgatatgaacgctgtgctgaagggctttccggaatgcctccaagccgacatatgccttcacctgaaccgctctctcctgcagcactgcaagccgttcagaggagcgacgaaagggtgtctccgtgccctggcgatgaagttcaaaacaacccacgccccccctggagacactttggtgcacgccggcgacctgctgactgcactgtatttcatcagcagagggagtatcgagatccttagaggagacgtggtcgtggccattcttgggaagaatgacatttttggtgaacccctcaacctttatgcccgaccggggaagagcaatggggacgtgagagccttaacatattgtgacctgcacaaaatacacagggacgatctgttagaggtcttggacatgtaccctgaattttccgaccatttctggtcttctttagagataacttttaatctgcgagataccaacatgatccctgggagccctggaagcaccgaacttgagggcggattcagccgtcagagaaagcgaaaactgtcctttcggaggcgcaccgataaggacaccgagcaaccaggagaagtttccgccctgggcccgggccgcgcaggtgcagggccttcaagccgcggacgacccggcgggccatggggggagtcacccagtagcggaccttccagtccagaaagctcggaggatgagggtcctggaaggagctctagcccactgaggctggtccctttctcctccccccggccccccggagaacccccgggaggagaaccactgatggaagactgcgaaaaaagtagcgatacatgtaatcctctgtctggggcctttagtggggtttccaatatcttcagtttctggggtgactctcgaggccggcaatatcaggagcttccgcgatgccccgcgcctaccccgtccctgttgaacatccctcttagcagtcctggaaggagacccaggggcgacgtggagtcacggctggatgcgcttcagcggcagctgaataggctggagacgaggctgtccgccgacatggctactgtgttacagttattacagcgccagatgacactggtcccacccgcttactcggccgtgacaacccccgggcctggccccacgtctacgtcccccctgttgcccgtgtcccctctgccaactctaaccctggattcgctcagccaagtgtcccagttcatggcctgtgaagaactaccccccggcgcccccgagctccctcaggaaggccctactaggagactgagcctgcctggtcagctcggcgcgctgacgagtcagccattgcatcggcacgggtcggatccagggtcatag

SEQ ID NO: 247908 - DNA, 3267 bp, Artificial Sequence
  derived and/or modified sequence
ggggccgctggctgggcaccggcggggcgggggagcctagtgtggcggggtgggggtggggacctggtagaaggaggggccggctggaggagctgaggttccgagtgcggccgctgctgggctggcgggcgggcagagcacggcaccctggcagcagggcccacgccacggggccatgggcagctcgagccaggcaggctgctgcccacgcttactgccagggtgaccccagccctggggcccagccacaaccaccctggcttcatgccaggggctgctctggttgccagtcggccagcctcgggggtgcagcctgggctgggactgctgctggggtgcaggtgaggcagtggccgggccctcaggccccagggcaggcaggctgcagggagccaagtcctccatggcggccccagccgggaaggcgagcaggacaggggctctgcggcccagggcccagaaaggccgggtgaggcgggccgtgcgcatctccagcctcgtggcccaggaggtcctgtccctgggcgccgacgtgctgcctgagtacaagctgcaggcaccgcgcatccaccgctggaccatcctgcattacagccccttcaaggccgtgtgggactggctcatcctgctgctggtcatctacacggctgtcttcacaccctactcggctgccttcctgctgaaggagacggaagaaggcccgcctgctaccgagtgtggctacgcctgccagccgctggctgtggtggacctcatcgtggacatcatgttcattgtggacatcctcatcaacttccgcaccacctacgtcaatgccaacgaggaggtggtcagccaccccggccgcatcgccgtccactacttcaagggctggttcctcatcgacatggtggccgccatccccttcgacctgctcatcttcggctctggctctgaggagctgatcgggctgctgaagactgcgcggctgctgcggctggtgcgcgtggcgcggaagctggatcgctactcagagtacggcgcggccgtgctgttcttgctcatgtgcacctttgcgctcatcgcgcactggctagcctgcatctggtacgccatcggcaacatggagcagccacacatggactcacgcatcggctggctgcacaacctgggcgaccagataggcaaaccctacaacagcagcggcctgggcggcccctccatcaaggacaagtatgtgacggcgctctacttcaccttcagcagcctcaccagtgtgggcttcggcaacgtctctcccaacaccaactcagagaagatcttctccatctgcgtcatgctcattggctccctcatgtatgctagcatcttcggcaacgtgtcggccatcatccagcggctgtactcgggcacagcccgctaccacacacagatgctgcgggtgcgggagttcatccgcttccaccagatccccaatcccctgcgccagcgcctcgaggagtacttccagcacgcctggtcctacaccaacggcatcgacatgaacgcggtgctgaagggcttccctgagtgcctgcaggctgacatctgcctgcacctgaaccgctcactgctgcagcactgcaaacccttccgaggggccaccaagggctgccttcgggccctggccatgaagttcaagaccacacatgcaccgccaggggacacactggtgcatgctggggacctgctcaccgccctgtacttcatctcccggggctccatcgagatcctgcggggcgacgtcgtcgtggccatcctggggaagaatgacatctttggggagcctctgaacctgtatgcaaggcctggcaagtcgaacggggatgtgcgggccctcacctactgtgacctacacaagatccatcgggacgacctgctggaggtgctggacatgtaccctgagttctccgaccacttctggtccagcctggagatcaccttcaacctgcgagataccaacatgatcccgggctcccccggcagtacggagttagagggtggcttcagtcggcaacgcaagcgcaagttgtccttccgcaggcgcacggacaaggacacggagcagccaggggaggtgtcggccttggggccgggccgggcgggggcagggccgagtagccggggccggccgggggggccgtggggggagagcccgtccagtggcccctccagccctgagagcagtgaggatgagggcccaggccgcagctccagccccctccgcctggtgcccttctccagccccaggccccccggagagccgccgggtggggagcccctgatggaggactgcgagaagagcagcgacacttgcaaccccctgtcaggcgccttctcaggagtgtccaacattttcagcttctggggggacagtcggggccgccagtaccaggagctccctcgatgccccgcccccacccccagcctcctcaacatccccctctccagcccgggtcggcggccccggggcgacgtggagagcaggctggatgccctccagcgccagctcaacaggctggagacccggctgagtgcagacatggccactgtcctgcagctgctacagaggcagatgacgctggtcccgcccgcctacagtgctgtgaccaccccggggcctggccccacttccacatccccgctgttgcccgtcagccccctccccaccctcaccttggactcgctttctcaggtttcccagttcatggcgtgtgaggagctgcccccgggggccccagagcttccccaagaaggccccacacgacgcctctccctaccgggccagctgggggccctcacctcccagcccctgcacagacacggctcggacccgggcagttagtggggctgcccagtgtggacacgtggctcacccagggatcaaggcgctgctgggccgctccccttggaggccctgctcaggaggccctgaccgtggaaggggagaggaactcgaaagcacagctcctcccccagcccttgggaccatcttctcctgcagtcccctgggccccagtgagaggggcaggggcagggccggcagtaggtggggcctgtggtccccccactgccctgagggcattagctggtctaactgcccggaggcacccggccctgggccttaggcacctcaaggacttttctgctatttactgctcttattgttaaggataataattaaggatcatatgaataattaatgaagatgctgatgactatgaataataaataattatcctgaggaga

SEQ ID NO: 247909 - DNA, 2460 bp, Artificial Sequence
  derived and/or modified sequence
atggctgctcctgctgggaaggcatcacgaaccggggctctccgacccagagcacagaaaggccgagttaggcgggcagtgagaatctcttccctagtggctcaagaggtgttatctcttggggctgacgtgttgccagaatacaagctccaagccccacgtattcacagatggaccatcttacactactcaccatttaaagccgtatgggactggttaatcttgcttctggtgatctacaccgcagtgtttacaccctattctgctgcttttctgctaaaggagactgaagaaggcccaccggctaccgaatgcggctacgcttgccagcccttggcagtcgtcgatttgattgtggatatcatgtttattgtggacattctgatcaacttccgtacaacttacgtgaatgcgaacgaggaagtcgtaagtcacccaggcagaattgcagtgcattatttcaaagggtggttcttgatcgacatggttgctgctattccctttgatctgctcatcttcggaagtggctcagaagaactaatcggactgctcaaaactgccagactactacgcctggttcgggttgcgagaaagttagatcgctattctgaatacggagccgctgtgctctttttgttaatgtgtacattcgcactgatagcacactggctcgcctgtatttggtacgccattggcaatatggagcagcctcacatggattcgaggatcgggtggctgcacaatctgggcgatcagatcggtaaaccctacaattcttctgggctgggcggaccttccattaaagacaagtacgttactgcgttgtacttcaccttctcaagtctcacatctgtgggctttgggaacgtctctcctaacacaaattctgaaaagattttcagcatctgcgtgatgctgatcggcagtctcatgtatgcctcaatcttcggaaatgtgagcgccattatccagcgcctgtacagcggtacagcgcgttatcatacccagatgttacgtgttcgcgagttcatcaggtttcatcaaattccaaatccattgagacagcggctggaggaatactttcagcacgcttggagctatacaaacgggattgatatgaatgccgtactgaagggcttccctgaatgcctgcaagctgatatctgccttcacttgaaccgcagtctgttgcagcattgtaaaccatttaggggagccactaaggggtgtctgcgcgcacttgctatgaagttcaagactacacacgcccctcctggggatactttagtacatgcaggcgacctgttgaccgccttatatttcatctcacggggaagcatagagatccttcgcggagatgtagttgtggctatcctcggcaagaacgacattttcggggaaccattaaacctctacgctcggccaggcaaatcgaatggggatgtgcgcgcactgacttactgtgacttgcataagatccatcgggacgacttgctcgaggtgctggacatgtacccagaatttagcgaccacttctggtcaagcttggaaatcactttcaatttgcgggatacaaatatgatcccgggttccccaggatcgacggagctcgaggggggattttcgcgacaaagaaaaagaaagttatcattccgccgacgaaccgacaaggatactgagcagccgggagaggtgtctgcactggggccaggcagagcgggagccggaccgagtagtaggggcagaccgggaggcccatggggggaatcgccatccagtgggccttccagtccagagtcatcagaagatgagggccctgggaggtccagttctcctttgcgtctggtccctttcagctctccgcgacccccaggtgaacccccaggcggagaacccctcatggaggattgtgagaagtcctccgacacatgtaaccctctaagcggcgcattttccggcgtgagcaacatcttctctttttggggcgacagtcggggacggcagtaccaggaactgcccaggtgtccggctcccaccccctcccttctgaatataccactgagcagtccagggaggagacctcgcggagacgtggaatctaggctggacgccctgcagcggcagcttaatcgcctggagactaggctctctgctgacatggccactgtgctgcagctcctccagcgacaaatgactttggtgcccccagcttacagtgcggtgacaacgccaggaccaggtccaactagtacatcccctcttctgcctgtctccccactgcccacccttactttggatagtctttctcaggtaagccagtttatggcctgtgaggaactcccccctggtgcccctgagctgcctcaggaagggcctacccggaggctttccctgcctggccagcttggagccctgacctcccagcctctgcataggcacggttccgaccctggatcctag

SEQ ID NO: 247910 - DNA, 2460 bp, Artificial Sequence
  derived and/or modified sequence
atggccgcccccgccggcaaggccagcagaaccggcgccctgagacccagagcccagaagggcagagtgagaagagccgtgagaatcagcagcctggtggcccaggaggtgctgagcctgggcgccgacgtgctgcccgagtacaagctgcaggcccccagaatccacagatggaccatcctgcactacagccccttcaaggccgtgtgggactggctgatcctgctgctggtgatctacaccgccgtgttcaccccctacagcgccgccttcctgctgaaggagaccgaggagggcccccccgccaccgagtgcggctacgcctgccagcccctggccgtggtggacctgatcgtggacatcatgttcatcgtggacatcctgatcaacttcagaaccacctacgtgaacgccaacgaggaggtggtgagccaccccggcagaatcgccgtgcactacttcaagggctggttcctgatcgacatggtggccgccatccccttcgacctgctgatcttcggcagcggcagcgaggagctgatcggcctgctgaagaccgccagactgctgagactggtgagagtggccagaaagctggacagatacagcgagtacggcgccgccgtgctgttcctgctgatgtgcaccttcgccctgatcgcccactggctggcctgcatctggtacgccatcggcaacatggagcagccccacatggacagcagaatcggctggctgcacaacctgggcgaccagatcggcaagccctacaacagcagcggcctgggcggccccagcatcaaggacaagtacgtgaccgccctgtacttcaccttcagcagcctgaccagcgtgggcttcggcaacgtgagccccaacaccaacagcgagaagatcttcagcatctgcgtgatgctgatcggcagcctgatgtacgccagcatcttcggcaacgtgagcgccatcatccagagactgtacagcggcaccgccagataccacacccagatgctgagagtgagagagttcatcagattccaccagatccccaaccccctgagacagagactggaggagtacttccagcacgcctggagctacaccaacggcatcgacatgaacgccgtgctgaagggcttccccgagtgcctgcaggccgacatctgcctgcacctgaacagaagcctgctgcagcactgcaagcccttcagaggcgccaccaagggctgcctgagagccctggccatgaagttcaagaccacccacgccccccccggcgacaccctggtgcacgccggcgacctgctgaccgccctgtacttcatcagcagaggcagcatcgagatcctgagaggcgacgtggtggtggccatcctgggcaagaacgacatcttcggcgagcccctgaacctgtacgccagacccggcaagagcaacggcgacgtgagagccctgacctactgcgacctgcacaagatccacagagacgacctgctggaggtgctggacatgtaccccgagttcagcgaccacttctggagcagcctggagatcaccttcaacctgagagacaccaacatgatccccggcagccccggcagcaccgagctggagggcggcttcagcagacagagaaagagaaagctgagcttcagaagaagaaccgacaaggacaccgagcagcccggcgaggtgagcgccctgggccccggcagagccggcgccggccccagcagcagaggcagacccggcggcccctggggcgagagccccagcagcggccccagcagccccgagagcagcgaggacgagggccccggcagaagcagcagccccctgagactggtgcccttcagcagccccagaccccccggcgagccccccggcggcgagcccctgatggaggactgcgagaagagcagcgacacctgcaaccccctgagcggcgccttcagcggcgtgagcaacatcttcagcttctggggcgacagcagaggcagacagtaccaggagctgcccagatgccccgcccccacccccagcctgctgaacatccccctgagcagccccggcagaagacccagaggcgacgtggagagcagactggacgccctgcagagacagctgaacagactggagaccagactgagcgccgacatggccaccgtgctgcagctgctgcagagacagatgaccctggtgccccccgcctacagcgccgtgaccacccccggccccggccccaccagcaccagccccctgctgcccgtgagccccctgcccaccctgaccctggacagcctgagccaggtgagccagttcatggcctgcgaggagctgccccccggcgcccccgagctgccccaggagggccccaccagaagactgagcctgcccggccagctgggcgccctgaccagccagcccctgcacagacacggcagcgaccccggcagctag

SEQ ID NO: 247911 - protein, 557 aa, Artificial Sequence
  derived and/or modified sequence
MEMQDLTSPHSRLSGSSESPSGPKLGNSHINSNSMTPNGTEVKTEPMSSSETASTTADGSLNNFSGSAIGSSSFSPRPTHQFSPPQIYPSNRPYPHILPTPSSQTMAAYGQTQFTTGMQQATAYATYPQPGQPYGISSYGIKTEGGLSQSQSPGQTGFLSYGTSFSTPQPGQAPYSYQMQGSSFTTSSGIYTGNNSLTNSSGFNSSQQDYPSYPSFGQGQYAQYYNSSPYPAHYMTSSNTSPTTPSTNATYQLQEPPSGITSQAVTDPTAEYSTIHSPSTPIKDSDSDRLRRGSDGKSRGRGRRNNNPSPPPDSDLERVFIWDLDETIIVFHSLLTGSYANRYGRECDQVHIDDVSSDDNGQDLSTYNFGTDGFPAAATSANLCLATGVRGGVDWMRKLAFRYRRVKEIYNTYKNNVGGLLGPAKREAWLQLRAEIEALTDSWLTLALKALSLIHSRTNCVNILVTTTQLIPALAKVLLYGLGIVFPIENIYSATKIGKESCFERIIQRFGRKVVYVVIGDGVEEEQGAKKHAMPFWRISSHSDLMALHHALELEYL

SEQ ID NO: 247912 - DNA, 1723 bp, Artificial Sequence
  derived and/or modified sequence
atgttgctgtttcctcaagttgcaggtctatggaaatgcaggatctaaccagcccgcatagccgtctgagtggtagtagtgaatcccccagtggccccaaactcggtaactctcatataaatagtaattccatgactcccaatggcaccgaagttaaaacagagccaatgagcagcagtgaaacagcttcaacgacagccgacgggtctttaaacaatttctcaggttcagcaattgggagcagtagtttcagcccacgaccaactcaccagttctctccaccacagatttacccttccaacagaccatacccacatattctccctaccccttcctcacaaactatggctgcatatgggcaaacacagtttaccacaggaatgcaacaagctacagcctatgccacgtacccacagccaggacagccgtacggcatttcctcatatggcatcaagactgaaggtggattgtcacagtctcagtcacctggacagacaggatttctcagctatggcacaagcttcagtacccctcaacctggacaggcaccatacagctaccagatgcaaggtagcagttttacaacatcatcaggaatatatacaggaaataattcactcacaaattcctctggatttaatagttcacagcaggactatccgtcttatcccagttttggccagggtcagtacgcacagtattataacagctcaccgtatccagcacattatatgaccagcagcaacaccagcccaacgacaccatccaccaatgccacttaccagcttcaagaaccgccatctggcatcaccagccaagcagttacagatcccacagcagagtacagcacaatccacagcccatcaacacccattaaagattcagattctgatcgattgcgtcgaggttcagatgggaaatcacgtggacggggccgaagaaacaataatccttcacctcccccagattctgatcttgagagagtgttcatctgggacttggatgagacaatcattgttttccactccttgcttactgggtcctacgccaacagatatgggagggaatgtgaccaagtccatatagatgatgtttcttcagatgataacggacaggacctaagcacatataactttggaacagatggctttcctgctgcagcaaccagtgctaacttatgtttggcaactggtgtacggggcggtgtggactggatgagaaagttggccttccgctacagacgggtaaaagagatctacaacacctacaaaaataatgttggaggtctgcttggtccagctaagagggaagcctggctgcagttgagggccgaaattgaagccctgaccgactcctggttgacactggccctgaaagcactctcgctcattcactcccggacaaactgtgtgaatattttagtaacaactactcagctcatcccagcattggcgaaagtcctgctgtatgggttaggaattgtatttccaatagaaaatatttacagtgcaactaaaataggaaaagaaagctgttttgagagaataattcaaaggtttggaagaaaagtggtgtatgttgttataggagatggtgtagaagaagaacaaggagcaaaaaagcacgcgatgcccttctggaggatctccagccactcggacctcatggccctgcaccatgccttggaactggagtacctgtaacagcgctcggcactttgaca

SEQ ID NO: 247913 - DNA, 1674 bp, Artificial Sequence
  derived and/or modified sequence
atggagatgcaagacctgacaagcccacatagccggctgtcaggcagcagtgagtccccgtctgggcccaaacttggaaattctcatattaattctaattctatgacaccaaacggaaccgaggtaaagacagaacccatgtcctcctccgagacagcaagtactaccgccgatggctctttgaataacttctctggctctgcaataggaagctcatcattctcaccaaggcctacacaccagttctctcccccacagatttacccgtccaaccggccttacccacatatcctccccaccccatcatcgcagacaatggcagcctatggtcagacccagtttaccaccggtatgcagcaggccacagcttacgcaacgtaccctcagcctggacagccatacggtatcagctcttacggcatcaagacagagggggggctttcccagtcacagtcaccaggccaaaccggattcttatcgtacgggaccagtttctccacaccacaacccggacaggccccctattcttatcaaatgcaaggcagcagtttcaccactagctccggcatatatactgggaataactctttgacgaatagttccgggttcaacagttctcagcaagattatccctcttatccttctttcggacaggggcagtatgctcagtattataactccagtccctaccccgcccactatatgaccagttctaatacatcacctaccacgccctcgactaatgcaacctaccagttacaggaacccccttccggcatcactagtcaggcagtgaccgacccaactgccgaatattcgacgattcactccccctctactccaataaaggactcagattccgataggctgagacgtggttccgacggaaagagcagaggacgcggcagaagaaacaataatccctcgcccccgcccgactccgatttggagcgggttttcatctgggaccttgacgagactatcatcgtctttcactcgttactcaccggcagctatgcgaacagatatgggagggaatgtgaccaagtgcatattgacgacgtgtcatctgacgacaatggccaggacctgtcgacatataattttgggactgatggcttccctgctgcggctacgtccgccaacctgtgcttagcaacaggcgttcgggggggggtggactggatgcggaagctggcttttcggtataggcgcgtgaaggagatctacaacacatataaaaacaacgttgggggtttacttggccctgccaagcgcgaggcctggctgcagctgcgcgccgaaatcgaagcattgacagactcctggctgacactggcccttaaggcgctcagtctgatccactcaagaacgaattgtgttaatatactcgtcaccaccacacagctgatacctgctctggcaaaagttttgttatacggactcgggatagtttttcctatagagaacatttattctgccacaaagattgggaaagaatcatgttttgaacgaatcatccagcgttttggtcggaaggtggtgtacgtagtcattggagacggggttgaggaagagcagggggccaaaaagcatgccatgcccttttggagaattagctcccacagtgacttgatggctctccaccacgctctcgagctagagtacctatag

SEQ ID NO: 247914 - DNA, 1674 bp, Artificial Sequence
  derived and/or modified sequence
atggagatgcaggacctgaccagcccccacagccggctgagcggcagcagcgagagccccagcggccccaagctgggcaacagccacatcaacagcaacagcatgacccccaacggcacagaggtgaagacagagcccatgagcagcagcgagacagccagcaccacagcagatggcagcctgaacaacttcagcggcagcgccatcggcagcagcagcttcagcccccggcccacccaccagttcagccccccccagatctaccccagcaaccggccctacccccacatcctgcccacccccagcagccagaccatggccgcctacggccagacccagttcaccaccggcatgcagcaggccacagcctatgccacctacccccagcccggccagccctacggcatcagcagctatggcatcaagacagaaggaggcctgagccagagccagagccctggccagacaggcttcctgtcctatggcaccagcttcagcaccccccagcccggccaggccccctacagctaccagatgcagggcagcagcttcaccaccagcagcggcatctacacaggcaacaacagcctgaccaacagcagcggcttcaacagcagccagcaggactaccccagctaccccagctttggccagggccagtatgcccagtactacaacagcagcccctacccagcccactacatgaccagcagcaacaccagccccaccacccccagcaccaatgccacctaccagctgcaggagccccccagcggcatcaccagccaggccgtgacagaccccacagctgagtacagcaccatccacagccccagcacccccatcaaggacagcgacagcgaccggctgcggcggggcagtgatggcaagagccggggccggggcagaagaaacaacaaccccagccccccaccagacagcgacctggagagggtcttcatctgggacctggatgagaccatcatcgtgttccacagcctgctgaccggcagctatgccaacagatatggccgggagtgtgaccaggtgcacattgatgatgtgtccagtgatgacaatggccaggacctgagcacctacaactttggaacagatggcttccctgctgctgccaccagcgccaacctgtgcctggccactggagtgcggggcggcgtggactggatgaggaagctggccttccgctaccgccgggtgaaggagatctacaacacctacaagaacaacgtgggcggcctgctgggccctgccaagcgggaggcctggctgcagctgcgggcagaaattgaggccctgacagacagctggctgaccctggccctgaaggccctgagcctcatccacagcaggaccaactgtgtgaacatcctggtgaccaccacccagctgatcccagccctggccaaggtgctgctgtatggcctgggcatcgtgttccccatcgagaacatctacagcgccaccaagattggcaaggagagctgctttgagcgcatcatccagcgcttcggcaggaaggtggtgtatgtggtgattggagatggagtggaggaggagcagggcgccaagaagcacgccatgcccttctggaggatcagcagccacagcgacctgatggccctgcaccacgccctggagctggagtacctgtag

SEQ ID NO: 247915 - DNA, 1674 bp, Artificial Sequence
  derived and/or modified sequence
atggagatgcaggacctgaccagcccccacagccggctgagcggcagcagtgagtcaccaagtggtcctaagctcggcaacagccacatcaactccaattcaatgactcctaatggcaccgaggttaaaactgaacccatgagtagctctgaaacagccagtacgaccgccgacggcagcttgaacaactttagtgggtcagctattggatcatctagtttttcccctaggcccacacaccaatttagtccccctcagatatacccatctaacagaccttatccgcatatccttcctaccccgtcgtcacagaccatggcagcttacggccagacacagtttaccaccggaatgcagcaggctaccgcttatgcaacctatcctcagcccggccagccatatgggattagcagctatggcatcaagactgaaggtgggctgtcacagagccagtcccccggccaaactggcttccttagttatggaacatcgttctccacaccccagcctggacaggccccgtatagttatcaaatgcagggctcgagtttcaccacttcctctggcatttatacaggtaataacagtctgaccaactcatccggtttcaattccagccagcaggactaccctagctaccccagcttcggccagggacagtatgctcagtactacaatagctctccataccctgcacattacatgaccagttccaacacatctcctactacaccatctaccaacgctacatatcagctgcaagagcctccctctggcattacctcacaggcagtgacagatcccacggctgagtacagcaccatccatagtccatcaacgcctataaaggattcagattcagacaggctaaggagagggtccgacggcaagtcaagggggaggggaaggagaaataataacccttcccccccccccgactccgatttagaaagagtgtttatctgggatttagacgagactatcatcgttttccacagcctcctcacaggaagctacgccaaccgatatggacgggagtgtgatcaggtgcacattgacgacgtgagctcagacgacaacgggcaggatttgagcacatacaattttggaacagatggcttcccagccgctgccacttctgctaacttatgtctggcaaccggggtgcgcggtggagtggactggatgagaaagctagcttttcggtataggagggttaaggagatttacaatacctataagaacaacgtgggcggtcttctggggccggcaaaacgtgaagcgtggctacagctccgtgctgaaatcgaggcacttaccgattcttggttgaccctggcactaaaggcccttagcctcatccacagtcgtacaaattgtgtcaatatactcgtgacaactacacagctgatccccgctctggccaaggtgctgttatatggccttggcattgtttttccaattgaaaacatctattccgcgactaagattgggaaggagtcctgcttcgaaaggatcattcagcggttcggccgcaaagttgtttacgtcgtcattggcgatggagtcgaggaggagcaaggggcaaaaaaacatgccatgcccttctggaggatctcaagccactctgatctgatggccctccaccacgcactagagttggagtacctgtag

SEQ ID NO: 247916 - DNA, 1674 bp, Artificial Sequence
  derived and/or modified sequence
atggagatgcaagacctgacttcacctcattccaggctgtccgggtcttccgaatccccgtcagggcctaagctaggtaattctcacatcaattcaaactccatgactcctaacggcactgaggtgaagactgagcctatgtcttcttcagaaacagcgtccacgaccgccgacggcagcctgaataacttctctggatcagccattggctcctctagcttcagtccccgtcctacgcaccagttttccccccctcaaatctaccccagcaaccgtccctatccccacatactgcccacaccatcgtctcagacaatggcggcatatgggcaaactcagttcaccaccgggatgcaacaagctacagcctatgccacgtatcctcagccaggtcagccctatggaataagttcctacgggatcaaaaccgaaggaggactttcacagtctcaaagtcctggtcagacgggctttttgtcttatggaacatcttttagcacccctcagcccggacaagctccatactcgtatcagatgcagggaagctcctttaccacctctagtggaatctatacaggaaacaatagtctgactaactccagcggatttaatagcagccagcaggactatcccagctaccccagcttcggacagggccagtacgcgcaatattataactcttccccttatcccgcacattacatgacttcctccaatacaagtcccaccacaccttctaccaatgcaacttatcagttacaggagccacccagtggaattacctcccaggcggttacagacccaactgctgagtactctaccatacatagcccttccaccccaattaaagattctgactctgaccgactgagacggggttccgatgggaagtcccgcggaagagggagacgaaacaataatccttctcccccacccgactctgatctggagcgggtgtttatctgggacctagacgagactatcatcgtgttccattcactgctgaccggaagctacgccaatagatatggaagagagtgcgaccaggttcacatcgacgacgtgtcttccgatgacaacgggcaggacctcagcacatataacttcggcacagatggatttcctgcagccgcaacaagcgccaatttatgtctcgccacaggcgtccggggaggggtcgactggatgcgaaaattggcctttagatacaggagggtgaaagaaatatacaacacatacaaaaataatgtgggaggactactgggcccagccaaacgcgaagcttggctgcagctgcgtgcggagatcgaggccttaacagacagctggctgacacttgcactgaaggcactgtccctgatacactccagaaccaactgtgtgaacattcttgtcaccacaactcagctcatcccggctctagcaaaagtgctgctctacggactcgggatcgtgttccccatcgagaatatctattccgctacaaagatcggcaaagagtcctgttttgagcgaatcattcagcgctttgggcgtaaggttgtctacgtggtgattggggatggagtggaagaagaacagggggctaagaagcatgctatgccgttttggaggatatctagccacagtgacctcatggcgctccatcacgctttggagcttgagtacctgtag

SEQ ID NO: 247917 - DNA, 1674 bp, Artificial Sequence
  derived and/or modified sequence
atggagatgcaggacctgaccagcccccacagcagactgagcggcagcagcgagagccccagcggccccaagctgggcaacagccacatcaacagcaacagcatgacccccaacggcaccgaggtgaagaccgagcccatgagcagcagcgagaccgccagcaccaccgccgacggcagcctgaacaacttcagcggcagcgccatcggcagcagcagcttcagccccagacccacccaccagttcagccccccccagatctaccccagcaacagaccctacccccacatcctgcccacccccagcagccagaccatggccgcctacggccagacccagttcaccaccggcatgcagcaggccaccgcctacgccacctacccccagcccggccagccctacggcatcagcagctacggcatcaagaccgagggcggcctgagccagagccagagccccggccagaccggcttcctgagctacggcaccagcttcagcaccccccagcccggccaggccccctacagctaccagatgcagggcagcagcttcaccaccagcagcggcatctacaccggcaacaacagcctgaccaacagcagcggcttcaacagcagccagcaggactaccccagctaccccagcttcggccagggccagtacgcccagtactacaacagcagcccctaccccgcccactacatgaccagcagcaacaccagccccaccacccccagcaccaacgccacctaccagctgcaggagccccccagcggcatcaccagccaggccgtgaccgaccccaccgccgagtacagcaccatccacagccccagcacccccatcaaggacagcgacagcgacagactgagaagaggcagcgacggcaagagcagaggcagaggcagaagaaacaacaaccccagccccccccccgacagcgacctggagagagtgttcatctgggacctggacgagaccatcatcgtgttccacagcctgctgaccggcagctacgccaacagatacggcagagagtgcgaccaggtgcacatcgacgacgtgagcagcgacgacaacggccaggacctgagcacctacaacttcggcaccgacggcttccccgccgccgccaccagcgccaacctgtgcctggccaccggcgtgagaggcggcgtggactggatgagaaagctggccttcagatacagaagagtgaaggagatctacaacacctacaagaacaacgtgggcggcctgctgggccccgccaagagagaggcctggctgcagctgagagccgagatcgaggccctgaccgacagctggctgaccctggccctgaaggccctgagcctgatccacagcagaaccaactgcgtgaacatcctggtgaccaccacccagctgatccccgccctggccaaggtgctgctgtacggcctgggcatcgtgttccccatcgagaacatctacagcgccaccaagatcggcaaggagagctgcttcgagagaatcatccagagattcggcagaaaggtggtgtacgtggtgatcggcgacggcgtggaggaggagcagggcgccaagaagcacgccatgcccttctggagaatcagcagccacagcgacctgatggccctgcaccacgccctggagctggagtacctgtag

SEQ ID NO: 247918 - protein, 559 aa, Artificial Sequence
  derived and/or modified sequence
MLLFPQVAVKTEPMSSSETASTTADGSLNNFSGSAIGSSSFSPRPTHQFSPPQIYPSNRPYPHILPTPSSQTMAAYGQTQFTTGMQQATAYATYPQPGQPYGISSYGALWAGIKTEGGLSQSQSPGQTGFLSYGTSFSTPQPGQAPYSYQMQGSSFTTSSGIYTGNNSLTNSSGFNSSQQDYPSYPSFGQGQYAQYYNSSPYPAHYMTSSNTSPTTPSTNATYQLQEPPSGITSQAVTDPTAEYSTIHSPSTPIKDSDSDRLRRGSDGKSRGRGRRNNNPSPPPDSDLERVFIWDLDETIIVFHSLLTGSYANRYGRDPPTSVSLGLRMEEMIFNLADTHLFFNDLEECDQVHIDDVSSDDNGQDLSTYNFGTDGFPAAATSANLCLATGVRGGVDWMRKLAFRYRRVKEIYNTYKNNVGGLLGPAKREAWLQLRAEIEALTDSWLTLALKALSLIHSRTNCVNILVTTTQLIPALAKVLLYGLGIVFPIENIYSATKIGKESCFERIIQRFGRKVVYVVIGDGVEEEQGAKKHAMPFWRISSHSDLMALHHALELEYL

SEQ ID NO: 247919 - protein, 560 aa, Artificial Sequence
  derived and/or modified sequence
MLMIYVQLVVKTEPMSSSETASTTADGSLNNFSGSAIGSSSFSPRPTHQFSPPQIYPSNRPYPHILPTPSSQTMAAYGQTQFTTGMQQATAYATYPQPGQPYGISSYGALWAGIKTEGGLSQSQSPGQTGFLSYGTSFSTPQPGQAPYSYQMQGSSFTTSSGIYTGNNSLTNSSGFNSSQQDYPSYPSFGQGQYAQYYNSSPYPAHYMTSSNTSPTTPSTNATYQLQEPPSGITSQAVTDPTAEYSTIHSPSTPIKDSDSDRLRRGSDGKSRGRGRRNNNPSPPPDSDLERVFIWDLDETIIVFHSLLTGSYANRYGRDPPTSVSLGLRMEEMIFNLADTHLFFNDLEECDQVHIDDVSSDDNGQDLSTYNFGTDGFPAAATSANLCLATGVRGGVDWMRKLAFRYRRVKEIYNTYKNNVGGLLGPAKREAWLQLRAEIEALTDSWLTLALKALSLIHSRTNCVNILVTTTQLIPALAKVLLYGLGIVFPIENIYSATKIGKESCFERIIQRFGRKVVYVVIGDGVEEEQGAKKHAMPFWRISSHSDLMALHHALELEYL

SEQ ID NO: 247920 - DNA, 3843 bp, Artificial Sequence
  derived and/or modified sequence
atttggctgccttccccccctgacaaggggaggaggaggatagacctgcaggaggaaacaacagttgagacctcaacttaaagacaatatgcctttcactgctgcagtatcctcctttttctcttttggttaaaagagagcattgtcgttctcagccatgtgctctgtataattaagagctgacactgaagcagagtaacaacatcttctaatttttttacccctgatcacaggtgcaaacatctcaagccagttcagatgttgctgtttcctcaagttgcagttaaaacagagccaatgagcagcagtgaaacagcttcaacgacagccgacgggtctttaaacaatttctcaggttcagcaattgggagcagtagtttcagcccacgaccaactcaccagttctctccaccacagatttacccttccaacagaccatacccacatattctccctaccccttcctcacaaactatggctgcatatgggcaaacacagtttaccacaggaatgcaacaagctacagcctatgccacgtacccacagccaggacagccgtacggcatttcctcatatggtgcattgtgggcaggcatcaagactgaaggtggattgtcacagtctcagtcacctggacagacaggatttctcagctatggcacaagcttcagtacccctcaacctggacaggcaccatacagctaccagatgcaaggtagcagttttacaacatcatcaggaatatatacaggaaataattcactcacaaattcctctggatttaatagttcacagcaggactatccgtcttatcccagttttggccagggtcagtacgcacagtattataacagctcaccgtatccagcacattatatgaccagcagcaacaccagcccaacgacaccatccaccaatgccacttaccagcttcaagaaccgccatctggcatcaccagccaagcagttacagatcccacagcagagtacagcacaatccacagcccatcaacacccattaaagattcagattctgatcgattgcgtcgaggttcagatgggaaatcacgtggacggggccgaagaaacaataatccttcacctcccccagattctgatcttgagagagtgttcatctgggacttggatgagacaatcattgttttccactccttgcttactgggtcctacgccaacagatatgggagggatccacccacttcagtttcccttggactgcgaatggaagaaatgattttcaacttggcagacacacatttattttttaatgacttagaagaatgtgaccaagtccatatagatgatgtttcttcagatgataacggacaggacctaagcacatataactttggaacagatggctttcctgctgcagcaaccagtgctaacttatgtttggcaactggtgtacggggcggtgtggactggatgagaaagttggccttccgctacagacgggtaaaagagatctacaacacctacaaaaataatgttggaggtctgcttggtccagctaagagggaagcctggctgcagttgagggccgaaattgaagccctgaccgactcctggttgacactggccctgaaagcactctcgctcattcactcccggacaaactgtgtgaatattttagtaacaactactcagctcatcccagcattggcgaaagtcctgctgtatgggttaggaattgtatttccaatagaaaatatttacagtgcaactaaaataggaaaagaaagctgttttgagagaataattcaaaggtttggaagaaaagtggtgtatgttgttataggagatggtgtagaagaagaacaaggagcaaaaaagcacgcgatgcccttctggaggatctccagccactcggacctcatggccctgcaccatgccttggaactggagtacctgtaacagcgctcggcactttgacagcgcacagctgctctgtgaccagggacagatccagcaggccccagtctcgcatcagcgccggcctccagaacttagcaatttccgcctggtgatgcgcagttgctgtcagtcttgacctctgcctttgtggtgaatggaggaccacgtctatttcatcagaacagctgttgactctagtactgtgaatccagtgaaaataagccatgagaatgttttagcacagcgttatgtgtctgccacattaactacacggttcaaacctgtgaagaaaggacctgcaaacgcttcagttgttagcattttcaatgtgatataaacagcttctccaatacagcaaacctaattgcacaacagagactgaaatgtgtttcctgaataccagtggaggaattttcttgtaaagaaggtttactttttggtgtctcatacccagggtaatctgtacatctctacttatttatgaacagactttttttaaaaagataaaaaaacagctttattgaggtataattcacccaccagacttttttaaacatcaaataattgaagagacaatagcattagaaataagtgattaaaggcctctgcctcacaacatggcaagtacagtactttgaattttagcacattgcatagtagttttaagtatgtctaatttaaacgtataatatgtacatcactgagacaatcatgtacagaaagaatttttggtgtaaatttgtaataatggataattcttttacatattgtttagggaaatgatattgaaaggtagcaatgcctggatagtgaagcatgaggcagcacgtgcacaaattcatgtgccgtgccttatctgagttttcggtataaatatgtagataatggattttttttttttagataatgttgtcaagaccaaaagcatggatgtcaagtgtcagtaaggattttgttttctaaaattttttcctgcatcagttcttctgagggccttgatgaaataacacagcagtttcttaaacaatttgaaacaaaatgagctctcctaccacctcactttttcatttccacactaatgtattatatgtaactacttggaaaaaataattattcaaatgcttcttcccacaaagaatatagatgatagtagatatattttattaataaaatggttcatgaatcggagactaacaaagttttcatgtgctcagaattattaattatcgtgtctgcattttctttcgataaaggaagacacacgatgctaatccggaaatcagcaaactttgcattactccctatgtgcgtattttctctttcttcctgtcaccctgaggaaggttcattgccattgtcatcaccatggaaacaacgttcctctccacctgcattatgtactacatgacaggcatcaatctggggaaataataaaattatcacctttgtcagaccataagagtttctccaaaagtggtcagtttggctgggcaatattttctctcatctaacaaacacaatccattgtcatgaaattacccttaggatgagtcttctttaatcaatcatatattgggcgggaaaaacaccagctttgacccgaagtagttgaagagctacttcattcttttctgaagttgtgtgttgctgctagaaatagtcatttgtgaattatccaaattgtttaaattcacaattgaattagttttttcttcctttttgcttgaagcaaacagttgacaatttttaaccttttcattttatgtttttgtactctgcagactgaaaagacaaagtttatcttggccttactgtataaaggtgtgctgtgtccaccgttgtgtacagaatttttcttcattaattttgtgtttaagttaataaaatttatttgtgatgtactgt

SEQ ID NO: 247921 - DNA, 3590 bp, Artificial Sequence
  derived and/or modified sequence
atgcttatgatatatgttcagttagtagttaaaacagagccaatgagcagcagtgaaacagcttcaacgacagccgacgggtctttaaacaatttctcaggttcagcaattgggagcagtagtttcagcccacgaccaactcaccagttctctccaccacagatttacccttccaacagaccatacccacatattctccctaccccttcctcacaaactatggctgcatatgggcaaacacagtttaccacaggaatgcaacaagctacagcctatgccacgtacccacagccaggacagccgtacggcatttcctcatatggtgcattgtgggcaggcatcaagactgaaggtggattgtcacagtctcagtcacctggacagacaggatttctcagctatggcacaagcttcagtacccctcaacctggacaggcaccatacagctaccagatgcaaggtagcagttttacaacatcatcaggaatatatacaggaaataattcactcacaaattcctctggatttaatagttcacagcaggactatccgtcttatcccagttttggccagggtcagtacgcacagtattataacagctcaccgtatccagcacattatatgaccagcagcaacaccagcccaacgacaccatccaccaatgccacttaccagcttcaagaaccgccatctggcatcaccagccaagcagttacagatcccacagcagagtacagcacaatccacagcccatcaacacccattaaagattcagattctgatcgattgcgtcgaggttcagatgggaaatcacgtggacggggccgaagaaacaataatccttcacctcccccagattctgatcttgagagagtgttcatctgggacttggatgagacaatcattgttttccactccttgcttactgggtcctacgccaacagatatgggagggatccacccacttcagtttcccttggactgcgaatggaagaaatgattttcaacttggcagacacacatttattttttaatgacttagaagaatgtgaccaagtccatatagatgatgtttcttcagatgataacggacaggacctaagcacatataactttggaacagatggctttcctgctgcagcaaccagtgctaacttatgtttggcaactggtgtacggggcggtgtggactggatgagaaagttggccttccgctacagacgggtaaaagagatctacaacacctacaaaaataatgttggaggtctgcttggtccagctaagagggaagcctggctgcagttgagggccgaaattgaagccctgaccgactcctggttgacactggccctgaaagcactctcgctcattcactcccggacaaactgtgtgaatattttagtaacaactactcagctcatcccagcattggcgaaagtcctgctgtatgggttaggaattgtatttccaatagaaaatatttacagtgcaactaaaataggaaaagaaagctgttttgagagaataattcaaaggtttggaagaaaagtggtgtatgttgttataggagatggtgtagaagaagaacaaggagcaaaaaagcacgcgatgcccttctggaggatctccagccactcggacctcatggccctgcaccatgccttggaactggagtacctgtaacagcgctcggcactttgacagcgcacagctgctctgtgaccagggacagatccagcaggccccagtctcgcatcagcgccggcctccagaacttagcaatttccgcctggtgatgcgcagttgctgtcagtcttgacctctgcctttgtggtgaatggaggaccacgtctatttcatcagaacagctgttgactctagtactgtgaatccagtgaaaataagccatgagaatgttttagcacagcgttatgtgtctgccacattaactacacggttcaaacctgtgaagaaaggacctgcaaacgcttcagttgttagcattttcaatgtgatataaacagcttctccaatacagcaaacctaattgcacaacagagactgaaatgtgtttcctgaataccagtggaggaattttcttgtaaagaaggtttactttttggtgtctcatacccagggtaatctgtacatctctacttatttatgaacagactttttttaaaaagataaaaaaacagctttattgaggtataattcacccaccagacttttttaaacatcaaataattgaagagacaatagcattagaaataagtgattaaaggcctctgcctcacaacatggcaagtacagtactttgaattttagcacattgcatagtagttttaagtatgtctaatttaaacgtataatatgtacatcactgagacaatcatgtacagaaagaatttttggtgtaaatttgtaataatggataattcttttacatattgtttagggaaatgatattgaaaggtagcaatgcctggatagtgaagcatgaggcagcacgtgcacaaattcatgtgccgtgccttatctgagttttcggtataaatatgtagataatggattttttttttttagataatgttgtcaagaccaaaagcatggatgtcaagtgtcagtaaggattttgttttctaaaattttttcctgcatcagttcttctgagggccttgatgaaataacacagcagtttcttaaacaatttgaaacaaaatgagctctcctaccacctcactttttcatttccacactaatgtattatatgtaactacttggaaaaaataattattcaaatgcttcttcccacaaagaatatagatgatagtagatatattttattaataaaatggttcatgaatcggagactaacaaagttttcatgtgctcagaattattaattatcgtgtctgcattttctttcgataaaggaagacacacgatgctaatccggaaatcagcaaactttgcattactccctatgtgcgtattttctctttcttcctgtcaccctgaggaaggttcattgccattgtcatcaccatggaaacaacgttcctctccacctgcattatgtactacatgacaggcatcaatctggggaaataataaaattatcacctttgtcagaccataagagtttctccaaaagtggtcagtttggctgggcaatattttctctcatctaacaaacacaatccattgtcatgaaattacccttaggatgagtcttctttaatcaatcatatattgggcgggaaaaacaccagctttgacccgaagtagttgaagagctacttcattcttttctgaagttgtgtgttgctgctagaaatagtcatttgtgaattatccaaattgtttaaattcacaattgaattagttttttcttcctttttgcttgaagcaaacagttgacaatttttaaccttttcattttatgtttttgtactctgcagactgaaaagacaaagtttatcttggccttactgtataaaggtgtgctgtgtccaccgttgtgtacagaatttttcttcattaattttgtgtttaagttaataaaatttatttgtgatgtactgtaa

SEQ ID NO: 247922 - DNA, 1680 bp, Artificial Sequence
  derived and/or modified sequence
atgctcctgtttccccaggtggccgttaagacagagcctatgtccagttccgagacagcaagtactacagccgacggtagtctaaacaatttctcaggtagcgccatcggatcatcaagcttttcgcctcggccaactcaccagtttagtcctccgcagatttaccccagcaacaggccatatccacacattctgcctaccccctcctctcagaccatggccgcatacggtcaaacccagttcacgacagggatgcaacaggcaactgcttacgccacttaccctcagcccggacagccatatgggatttccagctatggagctctctgggccggcattaaaacagaaggtggcctgagccagtcccagagccctggccagacagggttcttatcttacggaacttcattctctacccctcaacccggccaggccccttatagctaccagatgcaaggatcctcctttaccacttctagcggtatctatacaggcaataattctctgaccaactcctccggcttcaactcaagccagcaggattacccgtcttaccccagttttggtcagggtcagtatgcacagtattacaacagttccccctatcctgcccactacatgaccagctccaatacaagccctacaacccctagtactaacgccacataccagttgcaagagcccccatcaggcataacgagtcaagccgttaccgaccccaccgctgaatattctactatccattcaccatcaacgcccatcaaagactcagactccgatagactacgacgaggtagcgatggcaaatctaggggccgtgggagacgaaacaataacccttcaccacctccagattccgacctcgagagggtattcatttgggacctggacgagactatcatagtctttcactctttacttacaggcagctacgcaaatcggtatggaagggacccacctacatccgtctccctgggtctgcgaatggaggaaatgatatttaatctcgctgacacacacctcttcttcaacgatttggaagagtgcgatcaggtgcatatagatgacgtcagtagcgatgataacgggcaggatctgtcgacctacaattttggcacagatggcttcccagccgctgccacttcggcaaacctctgcctcgcgaccggggtccgggggggtgtagactggatgagaaagctggcatttcggtatcgaagggttaaagagatatacaacacgtataagaataacgtggggggtttactgggaccagctaagagggaagcctggctccagttgagggcagagatcgaggctttaaccgatagttggttgaccctcgcacttaaagccctgtcactaatccatagcagaactaactgtgtcaacattctggtcaccacaacccagttaatacctgcattggccaaggtgttattgtatgggctgggtatcgtgttccctatcgaaaatatttactcggccaccaagatcgggaaagaaagctgttttgagcgtatcatccaaaggttcggcagaaaagttgtctatgtagtgataggcgatggcgtcgaagaagagcagggggccaaaaaacatgctatgcctttctggcgcatttcttctcatagcgacctgatggctcttcaccacgccctcgagctggaatacctctag

SEQ ID NO: 247923 - DNA, 1683 bp, Artificial Sequence
  derived and/or modified sequence
atgctgatgatctacgtgcagttagtggtgaagaccgaacctatgtcttcttcagagacagccagcaccacagccgatgggtctcttaataacttctctggctccgcaatcggaagctcatcattcagcccccggcctactcaccaattttcacctccccagatatacccttccaaccgcccatatccccacatcctgccgaccccgtctagccagacgatggcagcctacggccagacccagttcaccaccggtatgcagcaagctacagcctatgcaacatatcctcagccaggccagccgtatgggattagtagctatggcgccctgtgggcagggatcaagaccgagggaggactctcccagtctcaaagccccgggcagacaggcttcttgagctatgggacctccttcagcaccccacagcccggccaggccccttactcataccaaatgcaaggatcctccttcactacttccagtgggatctatacagggaacaactctctcactaatagttctgggtttaattcatcccagcaggattatccaagttatccaagcttcggccaggggcaatatgcgcagtactacaacagttctccttatcctgcccattacatgacctccagcaatacatcacctactacaccatccactaatgcaacttatcagttgcaggaacctccctccgggattacaagccaagcggtgacagaccctactgccgagtattctacaatccatagtccatcaacccctataaaggattccgactcagatagactgcggcgggggagcgatggcaaatccaggggcagaggccgcaggaataacaatccttctccccccccagactctgaccttgagcgcgtgttcatttgggacctggatgagaccattatcgtctttcacagtctgctgacgggctcatacgctaaccgctatggtcgggacccgccaacctctgtctcgctcggtctgagaatggaagagatgatatttaatttggccgacactcacctcttcttcaatgaccttgaggagtgtgaccaggtccacattgacgacgtgagttcggatgacaatggacaagacctcagcacatataatttcggcacagatggattccccgctgccgccacatccgctaatctgtgtctggcgaccggagttcggggcggcgttgactggatgagaaaactggccttcaggtacaggagagtgaaggagatttataacacttacaagaacaatgttggtggactgctgggtcccgcaaaacgcgaagcctggctgcagctgagggccgagattgaggcgctgactgatagttggttgacccttgctctgaaggctctgtccttaattcattcacggacaaattgtgtcaacatcctggtgacgacgacccaactcatccccgccttggccaaggtgttattgtatgggctcggcatcgtgttccccatcgaaaacatctactctgccactaaaatcgggaaagagagttgcttcgagcgtatcatccagaggtttgggcggaaggtcgtgtacgtggtcataggagacggtgtcgaagaagagcaaggcgccaagaaacatgccatgccattctggcggatatcatctcattccgacctaatggcactgcatcatgcccttgaactggaatatctctag

SEQ ID NO: 247924 - DNA, 1680 bp, Artificial Sequence
  derived and/or modified sequence
atgctgctcttcccccaggtggccgtgaagacagagcccatgagcagcagcgagacagccagcaccacagcagatggcagcctgaacaacttcagcggcagcgccatcggcagcagcagcttcagcccccggcccacccaccagttcagccccccccagatctaccccagcaaccggccctacccccacatcctgcccacccccagcagccagaccatggccgcctacggccagacccagttcaccaccggcatgcagcaggccacagcctatgccacctacccccagcccggccagccctacggcatcagcagctatggagccctgtgggccggcatcaagacagaaggaggcctgagccagagccagagccctggccagacaggcttcctgtcctatggcaccagcttcagcaccccccagcccggccaggccccctacagctaccagatgcagggcagcagcttcaccaccagcagcggcatctacacaggcaacaacagcctgaccaacagcagcggcttcaacagcagccagcaggactaccccagctaccccagctttggccagggccagtatgcccagtactacaacagcagcccctacccagcccactacatgaccagcagcaacaccagccccaccacccccagcaccaatgccacctaccagctgcaggagccccccagcggcatcaccagccaggccgtgacagaccccacagctgagtacagcaccatccacagccccagcacccccatcaaggacagcgacagcgaccggctgcggcggggcagtgatggcaagagccggggccggggcagaagaaacaacaaccccagccccccaccagacagcgacctggagagggtcttcatctgggacctggatgagaccatcatcgtgttccacagcctgctgaccggcagctatgccaacagatatggccgggacccccccacctctgtgtccctgggcctgaggatggaggagatgatcttcaacctggccgacacccacctgttcttcaatgacctggaggagtgtgaccaggtgcacattgatgatgtgtccagtgatgacaatggccaggacctgagcacctacaactttggaacagatggcttccctgctgctgccaccagcgccaacctgtgcctggccactggagtgcggggcggcgtggactggatgaggaagctggccttccgctaccgccgggtgaaggagatctacaacacctacaagaacaacgtgggcggcctgctgggccctgccaagcgggaggcctggctgcagctgcgggcagaaattgaggccctgacagacagctggctgaccctggccctgaaggccctgagcctcatccacagcaggaccaactgtgtgaacatcctggtgaccaccacccagctgatcccagccctggccaaggtgctgctgtatggcctgggcatcgtgttccccatcgagaacatctacagcgccaccaagattggcaaggagagctgctttgagcgcatcatccagcgcttcggcaggaaggtggtgtatgtggtgattggagatggagtggaggaggagcagggcgccaagaagcacgccatgcccttctggaggatcagcagccacagcgacctgatggccctgcaccacgccctggagctggagtacctgtag

SEQ ID NO: 247925 - DNA, 1683 bp, Artificial Sequence
  derived and/or modified sequence
atgctgatgatctacgtgcagctggtggtgaagacagagcccatgagcagcagcgagacagccagcaccacagcagatggcagcctgaacaacttcagcggcagcgccatcggcagcagcagcttcagcccccggcccacccaccagttcagccccccccagatctaccccagcaaccggccctacccccacatcctgcccacccccagcagccagaccatggccgcctacggccagacccagttcaccaccggcatgcagcaggccacagcctatgccacctacccccagcccggccagccctacggcatcagcagctatggagccctgtgggccggcatcaagacagagggcggcctgagccagagccagagccctggccagacaggcttcctgtcctatggcaccagcttcagcaccccccagcccggccaggccccctacagctaccagatgcagggcagcagcttcaccaccagcagcggcatctacacaggcaacaacagcctgaccaacagcagcggcttcaacagcagccagcaggactaccccagctaccccagctttggccagggccagtatgcccagtactacaacagcagcccctacccagcccactacatgaccagcagcaacaccagccccaccacccccagcaccaatgccacctaccagctgcaggagcccccatctggcatcaccagccaggccgtgacagaccccacagctgagtacagcaccatccacagccccagcacccccatcaaggacagcgacagcgaccggctgcggcggggcagtgatggcaagagccggggccggggcagaagaaacaacaaccccagccccccaccagacagcgacctggagagggtcttcatctgggacctggatgagaccatcatcgtgttccacagcctgctgaccggcagctatgccaacagatatggccgggacccccccacctctgtgtccctgggcctgaggatggaggagatgatcttcaacctggccgacacccacctgttcttcaatgacctggaggagtgtgaccaggtgcacattgatgatgtgtccagtgatgacaatggccaggacctgagcacctacaactttggaacagatggcttccctgctgctgccaccagcgccaacctgtgcctggccaccggggtgcggggcggcgtggactggatgaggaagctggccttccgctacagaagagtgaaggagatctacaacacctacaagaacaacgtgggcggcctgctgggccctgccaagcgggaggcctggctgcagctgcgggcagaaattgaggccctgacagacagctggctgaccctggccctgaaggccctgagcctcatccacagcaggaccaactgtgtgaacatcctggtgaccaccacccagctgatcccagccctggccaaggtgctgctgtatggcctgggcatcgtgttccccatcgagaacatctacagcgccaccaagattggcaaggagagctgctttgagcgcatcatccagagatttggaaggaaggtggtgtatgtggtgattggagatggagtggaggaggagcagggcgccaagaagcacgccatgcccttctggaggatcagcagccacagcgacctgatggccctgcaccacgccctggagctggagtacctgtag

SEQ ID NO: 247926 - DNA, 1680 bp, Artificial Sequence
  derived and/or modified sequence
atgctgctgttcccccaggtggccgtgaagaccgagcccatgagcagtagtgaaacagccagcaccaccgcagacggaagtctgaataacttctccgggtcagccatcggcagttcctccttttcgcctagaccaactcatcagttcagccctcctcagatttaccctagcaacagaccgtacccgcatattcttccaacaccaagcagtcagactatggctgcttatggacagactcagttcacaactggaatgcagcaggccaccgcttacgcaacctatccccagcctggtcaaccctacgggataagttcttatggggctttgtgggccgggatcaagacagaaggggggttgtcgcaatcccagtcgccaggtcagactggattcctcagctatgggacgagctttagtacaccgcagcctgggcaggccccatactcgtatcaaatgcagggcagctcttttactacctccagtggcatttataccgggaacaatagcctgacgaacagctctggtttcaattcctcacagcaggattacccatcttacccaagtttcggacaaggtcagtatgcgcagtattacaattctagcccgtatccagcccactatatgacctccagcaacacctcacctacaaccccctcaaccaacgctacatatcagctgcaggagccaccatctggtatcacatctcaggcagtgactgaccccactgcagagtactctaccattcacagcccttccacgccaattaaggatagtgattccgacaggcttcgacggggatcagacgggaaaagcagagggaggggcaggaggaacaacaaccccagtcctcctcctgattccgatctggaacgggtgtttatttgggatctggacgagaccatcatcgtgttccactccctcttaactggaagttacgcgaatcgatacggcagggatccccctaccagcgtcagtctgggactcaggatggaagagatgatattcaatttggctgatactcacctgttcttcaacgatttggaagaatgtgatcaggtgcacatcgatgatgtaagttctgatgacaatggacaggatctttctacatataactttggaacagacggatttcctgcagccgcaacctcagcaaacctctgtctcgcaacgggtgtccggggtggggtcgactggatgagaaaactcgcttttcgttaccgacgagttaaggagatttacaacacatacaagaacaacgtggggggcctcctgggccccgctaagcgtgaagcgtggctgcagttgcgtgctgagattgaggctctcaccgactcatggctaacgttggctcttaaggctctgagcctgatccatagccgcaccaactgtgtcaacattctggtcacaaccacgcagcttattcccgccttagcgaaagtacttctctacggccttggcattgtcttccccatcgagaacatctacagcgctaccaagatcggtaaagaatcatgtttcgagcgcattatacagcggtttgggaggaaagtcgtttatgtcgttattggcgatggggtggaagaagagcagggagcgaagaagcacgcaatgcccttctggagaatcagcagccacagcgatctgatggcactgcaccatgccctggaactggaatacctgtag

SEQ ID NO: 247927 - DNA, 1683 bp, Artificial Sequence
  derived and/or modified sequence
atgctgatgatctacgtgcagctggtggtgaagaccgagcccatgagctcatctgagaccgcatccacaaccgcagatggttcacttaacaacttcagcggatctgctataggaagctctagtttttcccccaggccaacccatcagttttctcctccccagatctacccgtctaaccgaccttacccgcatattcttcctaccccaagcagtcagaccatggctgcctacggccagacacagtttactacagggatgcagcaggctacagcctacgcaacttatccacagccaggccagccgtacggcatcagttcctatggcgcactgtgggcgggaatcaagaccgaaggtggtctgagccagagtcagagcccggggcaaacaggcttcctgagttatggcacttctttcagcacacctcagcctggccaagccccatactcataccagatgcaaggctctagttttacaacgtctagcggcatttatacaggaaataattcgctgactaatagtagtggctttaatagtagccagcaagactatccatcctacccttcttttgggcagggccagtacgcacagtattataacagtagcccttatccagctcactacatgactagctctaacacctcccccacaacgcccagcaccaatgctacctaccaactccaggagcctcccagtgggatcactagccaggccgtcacagaccccaccgctgaatactccacgatccacagtccttcaactcctatcaaggactcggacagcgaccgccttaggcggggatcagatggaaagtctaggggaagagggcgcaggaataacaatccctccccgcctccagactcagaccttgagagggtgtttatttgggacctcgatgaaactataatcgtgtttcatagtctgctgacaggatcctatgcaaatagatacggtcgggatccacccacatccgtttccctcggactgagaatggaagagatgatcttcaatttggccgatacccacctgttttttaacgacttggaggaatgtgatcaggtgcacatagacgacgtgagcagcgatgataacggccaggacctgtcaacctacaacttcgggaccgatggattcccggctgctgcaacttccgctaacctttgcttggctaccggagtcagggggggggtggactggatgagaaagttggccttcagataccgccgggtgaaggagatctacaatacatacaagaacaatgtggggggtctgctgggtcccgctaaaagagaagcctggcttcaattaagggccgagatcgaagcactcacagattcctggctgacattggccctgaaagccctctcactgatacattcccgcacaaattgtgtgaatatcctcgtcaccacaacgcagctaattcccgccctggctaaggtgctgctctatggactgggcatcgtgtttcctattgagaatatttatagtgccaccaaaataggcaaagagtcgtgttttgagaggattatacagcgcttcggcagaaaagttgtctacgtagtcatcggggatggggtagaggaggagcagggagccaagaaacacgccatgccattctggcggatctccagtcacagtgatctaatggctctgcaccatgccctcgagttagagtacctgtag

SEQ ID NO: 247928 - DNA, 1680 bp, Artificial Sequence
  derived and/or modified sequence
atgctgttgtttcctcaggtggccgttaagaccgagccgatgagtagctctgagaccgcatcaactaccgcagatgggtccctaaacaatttcagtgggtccgctatagggtcatcttcttttagtccacggcctacacatcaattctctcctccgcagatctatcctagcaacaggccatatccacatattctaccgacaccttctagtcagaccatggcggcttatggccagactcagttcactaccggcatgcagcaagctaccgcctatgctacttatccccagcccggtcaaccatacggaatcagtagctacggcgctctatgggcagggattaagacagagggagggttgtctcaaagtcagtcacctgggcagacgggttttttaagctacggaacatctttcagcaccccacagcccggtcaggctccatattcttaccagatgcagggctctagcttcactacctcctcaggcatttacacaggcaacaattccctcacgaatagttccgggtttaatagctcccagcaggactacccatcttatccatcctttggccagggccagtatgcccaatactacaattcctccccctacccagctcactatatgacttcatccaatacctctcccactactccatccactaatgctacttatcaactgcaggaaccaccttccggcatcacatcacaagcagttacagacccgaccgccgagtactctaccattcactctccctccacaccaatcaaagacagtgactccgatcgtttgcgcagagggtccgacggcaaaagccgaggccgtggcaggcggaacaacaacccctccccaccgccagacagcgacctggaacgcgtgttcatctgggacttagacgagacaattatcgtctttcactcccttctcacaggctcatacgccaatagatatggcagagacccaccgacatctgtttcattggggctccggatggaggaaatgatctttaaccttgccgatacacacctgtttttcaatgatcttgaagagtgtgaccaggtacacatcgatgatgtgtctagcgacgataatgggcaggatctgtcaacatataattttggcacggacggatttcctgcggcagctacgtccgctaacctctgtctcgccaccggcgtgcgtgggggagtagattggatgcggaagttagccttcaggtatagaagagtcaaggagatctataatacatataaaaacaacgtgggcggattactgggtccagccaagagagaagcatggctgcagctcagagctgaaatcgaagccctcacggatagttggctgaccctcgcgttgaaggcattgagcctgatacatagccgaactaattgcgtgaatatcttggtcacgaccactcagctgattcctgcgctggcgaaagtcctattgtacgggctgggcatcgtctttcctatagagaacatctattctgctacaaaaatcggaaaggaatcttgtttcgagcgcattatccagaggttcggaagaaaagtcgtttacgtggtgattggggatggagtcgaggaggaacagggtgcaaagaaacacgctatgcctttctggagaattagctcacactcagatttaatggcgctgcatcacgcactggaacttgaatatctctag

SEQ ID NO: 247929 - DNA, 1683 bp, Artificial Sequence
  derived and/or modified sequence
atgcttatgatttatgttcagttagtggtcaagaccgagccaatgtcttcatccgaaactgcttccacaactgcagacggatccctgaacaatttcagtgggtccgcaatcggatcttcctccttctccccgagaccaacgcatcagttttctccccctcagatttacccttctaatagaccttatcctcatatcctgccaactccgtcctctcagacaatggcagcctacgggcagacccagttcaccactggcatgcagcaggctacagcctacgctacctatccacaaccgggacagccctacggcatctccagttacggagctttgtgggctggcataaaaacggagggcggtctctcccagtcacagagtcctggtcagacaggattcctgtcttacggcacgagtttttcaacaccccaacccggacaggccccatatagctaccaaatgcaggggtcctcgttcacaactagttccggcatttatacaggcaacaatagtctaacaaatagcagtggtttcaatagttcccaacaggattacccatcatacccttcatttggccaggggcagtatgctcagtactataattcgtccccttatcccgcacattatatgacctcctctaacacctctccgaccaccccgagcactaacgcaacatatcaacttcaggaaccaccatctggcatcacttctcaggctgtcacagatcccacagctgagtacagtacaattcattcgccttccaccccaatcaaagattcagactctgacagactccgcagggggtctgatgggaagtcacggggtaggggcagaaggaacaacaatccctctcctcctcctgactcggacctggaaagggtgtttatctgggacctggatgagactattatagtatttcacagtctgctgacagggtcttacgccaacaggtatggcagggatcctcctaccagcgtctctctggggctgcggatggaggaaatgattttcaacttagcggacacccatctcttcttcaatgatctcgaggaatgtgaccaggtgcatatcgatgacgtatctagtgatgataatggccaggacctcagcacatacaactttggtacggatggctttccagcagctgcaacctctgcaaatctgtgtctggcgaccggcgtacgcggaggagtggactggatgcggaagctcgctttcaggtatcgtcgggtgaaggaaatttataacacctacaaaaacaacgtgggagggttactcggaccggcaaagagggaagcatggctgcagttgagggccgagattgaggcgctcacagactcttggcttaccctcgctctcaaagctctgagcttgattcactcaagaaccaactgcgtgaatatcctggtcacaaccactcaactcatacccgctttggccaaggtgcttctgtatggactgggaattgtgttcccaattgagaatatctattcagctactaagattggtaaggagtcatgcttcgagcgcatcatccaacgcttcgggagaaaagtagtttacgtggttataggggatggtgtggaagaggaacagggagccaagaaacacgctatgccattctggcggatttcttcacattcagacctgatggccctacatcatgctctcgaactcgaatatctgtag

SEQ ID NO: 247930 - DNA, 1680 bp, Artificial Sequence
  derived and/or modified sequence
atgctgctgttcccccaggtggccgtgaagaccgagcccatgagcagcagcgagaccgccagcaccaccgccgacggcagcctgaacaacttcagcggcagcgccatcggcagcagcagcttcagccccagacccacccaccagttcagccccccccagatctaccccagcaacagaccctacccccacatcctgcccacccccagcagccagaccatggccgcctacggccagacccagttcaccaccggcatgcagcaggccaccgcctacgccacctacccccagcccggccagccctacggcatcagcagctacggcgccctgtgggccggcatcaagaccgagggcggcctgagccagagccagagccccggccagaccggcttcctgagctacggcaccagcttcagcaccccccagcccggccaggccccctacagctaccagatgcagggcagcagcttcaccaccagcagcggcatctacaccggcaacaacagcctgaccaacagcagcggcttcaacagcagccagcaggactaccccagctaccccagcttcggccagggccagtacgcccagtactacaacagcagcccctaccccgcccactacatgaccagcagcaacaccagccccaccacccccagcaccaacgccacctaccagctgcaggagccccccagcggcatcaccagccaggccgtgaccgaccccaccgccgagtacagcaccatccacagccccagcacccccatcaaggacagcgacagcgacagactgagaagaggcagcgacggcaagagcagaggcagaggcagaagaaacaacaaccccagccccccccccgacagcgacctggagagagtgttcatctgggacctggacgagaccatcatcgtgttccacagcctgctgaccggcagctacgccaacagatacggcagagacccccccaccagcgtgagcctgggcctgagaatggaggagatgatcttcaacctggccgacacccacctgttcttcaacgacctggaggagtgcgaccaggtgcacatcgacgacgtgagcagcgacgacaacggccaggacctgagcacctacaacttcggcaccgacggcttccccgccgccgccaccagcgccaacctgtgcctggccaccggcgtgagaggcggcgtggactggatgagaaagctggccttcagatacagaagagtgaaggagatctacaacacctacaagaacaacgtgggcggcctgctgggccccgccaagagagaggcctggctgcagctgagagccgagatcgaggccctgaccgacagctggctgaccctggccctgaaggccctgagcctgatccacagcagaaccaactgcgtgaacatcctggtgaccaccacccagctgatccccgccctggccaaggtgctgctgtacggcctgggcatcgtgttccccatcgagaacatctacagcgccaccaagatcggcaaggagagctgcttcgagagaatcatccagagattcggcagaaaggtggtgtacgtggtgatcggcgacggcgtggaggaggagcagggcgccaagaagcacgccatgcccttctggagaatcagcagccacagcgacctgatggccctgcaccacgccctggagctggagtacctgtag

SEQ ID NO: 247931 - DNA, 1683 bp, Artificial Sequence
  derived and/or modified sequence
atgctgatgatctacgtgcagctggtggtgaagaccgagcccatgagcagcagcgagaccgccagcaccaccgccgacggcagcctgaacaacttcagcggcagcgccatcggcagcagcagcttcagccccagacccacccaccagttcagccccccccagatctaccccagcaacagaccctacccccacatcctgcccacccccagcagccagaccatggccgcctacggccagacccagttcaccaccggcatgcagcaggccaccgcctacgccacctacccccagcccggccagccctacggcatcagcagctacggcgccctgtgggccggcatcaagaccgagggcggcctgagccagagccagagccccggccagaccggcttcctgagctacggcaccagcttcagcaccccccagcccggccaggccccctacagctaccagatgcagggcagcagcttcaccaccagcagcggcatctacaccggcaacaacagcctgaccaacagcagcggcttcaacagcagccagcaggactaccccagctaccccagcttcggccagggccagtacgcccagtactacaacagcagcccctaccccgcccactacatgaccagcagcaacaccagccccaccacccccagcaccaacgccacctaccagctgcaggagccccccagcggcatcaccagccaggccgtgaccgaccccaccgccgagtacagcaccatccacagccccagcacccccatcaaggacagcgacagcgacagactgagaagaggcagcgacggcaagagcagaggcagaggcagaagaaacaacaaccccagccccccccccgacagcgacctggagagagtgttcatctgggacctggacgagaccatcatcgtgttccacagcctgctgaccggcagctacgccaacagatacggcagagacccccccaccagcgtgagcctgggcctgagaatggaggagatgatcttcaacctggccgacacccacctgttcttcaacgacctggaggagtgcgaccaggtgcacatcgacgacgtgagcagcgacgacaacggccaggacctgagcacctacaacttcggcaccgacggcttccccgccgccgccaccagcgccaacctgtgcctggccaccggcgtgagaggcggcgtggactggatgagaaagctggccttcagatacagaagagtgaaggagatctacaacacctacaagaacaacgtgggcggcctgctgggccccgccaagagagaggcctggctgcagctgagagccgagatcgaggccctgaccgacagctggctgaccctggccctgaaggccctgagcctgatccacagcagaaccaactgcgtgaacatcctggtgaccaccacccagctgatccccgccctggccaaggtgctgctgtacggcctgggcatcgtgttccccatcgagaacatctacagcgccaccaagatcggcaaggagagctgcttcgagagaatcatccagagattcggcagaaaggtggtgtacgtggtgatcggcgacggcgtggaggaggagcagggcgccaagaagcacgccatgcccttctggagaatcagcagccacagcgacctgatggccctgcaccacgccctggagctggagtacctgtag

SEQ ID NO: 247932 - protein, 1493 aa, Artificial Sequence
  derived and/or modified sequence
MAELSEPEGPVDWKERCVALESQLMKFRVQASKIRELLAEKMQQLERQVIDAERQAEKAFQQVQVMEDKLKAANIQTSESETRLYNKCQDLESLIQEKDDVIQNLELQLEEQKQIRIQEAKIIEEKAAKIKEWVTVKLNELELENQNLRLINQNQTEEIRTMQSKLQEVQGKKSSTVSTLKLSEGQRLSSLTFGCFLSRARSPPQVVKSEEMSKISSKEPEFTEGKDMEEMEIPEKSVDNQVLENNRGQRTLHQTPCGSEQNRKTRTSFATDGGISQNSGAPVSDWSSDEEDGSKGRSKSRCTSTLSSHTSEEGVQCSRMGSEMYLTASDDSSSIFEEETFGIKRPEHKKLYSWQQEAQWKALNSPLGKGNSELSKKEQDSSSDELNKKFQSQRLDYSSSSSEANTPSPILTPALMPKHPNSLSGKGTQLVPSSHLPPPKLRIPNVFSISVALAKRHLSQPQLSSDRMFGTNRNAISMIRPLRPQETDLDLVDGDSTEVLENMDTSCDDGLFSYDSLDSPNSDDQEHCDSAKKVAYSKPPTPPLHRFPSWESRIYAVAKSGIRMSEAFNMESVNKNSAATLSYTTSGLYTSLIYKNMTTPVYTTLKGKATQISSSPFLDDSSGSEEEDSSRSSSRTSESDSRSRSGPGSPRAMKRGVSLSSVASESDYAIPPDAYSTDTEYSQPEQKLPKTCSSSSDNGKNEPLEKSGYLLKMSGKVKSWKRRWFVLKGGELLYYKSPSDVIRKPQGHIELSASCSILRGDNKQTVQLTTEKHTYYLTADSPNILEEWIKVLQNVLRVQAANPLSLQPEGKPTMKGLLTKVKHGYSKRVWCTLIGKTLYYFRSQEDKFPLGQIKLWEAKVEEVDRSCDSDEDYEASGRSLLSTHYTIVIHPKDQGPTYLLIGSKHEKDTWLYHLTVAAGSNNVNVGSEFEQLVCKLLNIDGEPSSQIWRHPTLCHSKEGIISPLTTLPSEALQTEAIKLFKTCQLFINAAVDSPAIDYHISLAQSALQICLTHPELQNEICCQLIKQTRRRQPQNQPGPLQGWQLLALCVGLFLPHHPFLWLLRLHLKRNADSRTEFGKYAIYCQRCVERTQQNGDREARPSRMEILSTLLRNPYHHSLPFSIPVHFMNGIYQVVGFDASTTVEEFLNTLNQDTGMRKPAQSGFALFTDDPSGRDLEHCLQGNIKICDIISKWEQASKEQQPGKCEGTRTVRLTYKNRLYFSVQARGETDREKLLLMYQTNDQIINGLFPLNKDLALEMAALLSQVEIGDFERPFSTPAGHVTNQCKVNQTLKQVIEKFYPKRYRDGCSEEQLRQLCQRLSTRWMALRGHSAADCVRIYLTVARKWPFFGAKLFLAKPITPSSLGSTFLWLAVHEDGLSLLEYNSMRLIVSYVYKSLMTFGGYQDDFMVVINNTHSKDKPTEKLLFAMAKPKILEITLLIASYINNFHQQKAAFHHLSAPALLSAQTRGPQARMMGSQPLLSSSRPTKGPTLL

SEQ ID NO: 247933 - DNA, 4482 bp, Artificial Sequence
  derived and/or modified sequence
atggctgaactcagcgagcctgaggggcctgtcgactggaaggagcgctgtgtggccctggagtctcagcttatgaaattccgtgtgcaggcctctaagatcagggaactgctggcggagaagatgcagcagctcgagagacaggtcatcgacgcagagcgccaagccgaaaaagcttttcaacaggtccaggtaatggaggataagcttaaagctgcaaatattcaaacttctgaatccgagacgagactgtacaacaagtgtcaggacctggagtccttgattcaagagaaggatgatgtgattcagaatcttgagctccagcttgaagagcagaaacagatccgaattcaggaggctaaaattattgaagagaaggccgcaaaaattaaagaatgggtgactgtgaagttgaatgagctggagctggagaatcagaacctgagactcatcaaccaaaaccaaacagaagagattcgtaccatgcaatccaaactccaggaggttcaggggaaaaagtcatcaacggtgagcacattgaagttgtcggagggccagagactgtcaagcctcacctttggctgcttcctctcccgagcccggagcccaccacaggttgtgaagtcagaggaaatgtcaaagatctcgtctaaggagcctgaatttactgagggaaaagatatggaggaaatggagatccctgagaaatcagtcgataaccaggtgctagaaaacaatcgaggacagaggacgctgcatcagactccctgtggctcagaacaaaaccgcaagacacgcacttcctttgctaccgatggtggcatttcccagaattcgggcgccccagtgtccgactggtcttcagacgaagaggatggctccaagggacgctcaaaaagccggtgtacaagcactctcagttctcacacttcagaggagggtgttcagtgcagtcggatgggatcggaaatgtacctcaccgcttccgacgattcgtcatctatcttcgaggaggagacctttgggatcaaaagacctgaacataaaaaactgtattcgtggcagcaagaggcccagtggaaagccttaaactcgccgctgggcaagggtaacagcgaactgagcaaaaaagagcaggacagctcaagtgatgagctgaacaagaaatttcaatctcaacggctcgattactccagctcatcaagtgaggcgaacacaccctctcctatcttgacccccgccctgatgccgaagcatccgaactctctctccggtaaggggacccaattggtaccctcgagtcatctgcctccccccaaacttcggattccaaatgttttctcaatctctgtagctctcgctaaaagacacctgagccagccgcagctaagttccgaccgcatgttcggaaccaatcgcaacgccatatcaatgattcgacccctgagaccgcaggaaacagatctggacctggtggatggcgactccactgaggttcttgaaaacatggacacaagctgtgacgacggcctgtttagctacgattctctggacagtcctaatagtgatgaccaggagcactgtgatagtgcgaagaaggtcgcgtattccaaaccccccactccaccactccatagattcccgtcctgggaatctcgcatttacgctgttgctaagtccggtatcaggatgagtgaggcttttaacatggaatctgtgaacaagaattccgccgccaccctgtcctatactacatctggtctgtacacgagtctgatttacaagaatatgactacgccagtttataccactctgaaaggcaaggccacacagatcagcagctctccattcttggatgactcttcgggctcggaggaggaagattcctccaggagttcctcccggacgtctgaatccgactcccggagcagaagtggccccggaagcccgagggccatgaaaagaggagtaagcctatcaagtgtcgcttctgaaagtgattacgccatacccccagacgcgtattccaccgataccgaatatagccagcctgaacagaagctgccaaaaacttgtagttctagctccgacaacgggaagaatgagccactggaaaaatccggatacctactgaagatgagcggcaaagtgaaaagctggaagaggcggtggttcgtcctgaaaggtggtgagttgttatattataaatcaccttccgatgtaataagaaaaccgcagggccatatcgaattgagtgctagctgcagcattctgcgaggggataataaacagaccgtgcagctgactactgagaaacatacgtactacctcaccgccgattctcccaatatcttggaggaatggattaaagtgttacagaacgtgttgcgggtgcaggcagcaaatcccctctccctgcagccggaaggcaaacctactatgaaagggctgctgacgaaagtcaagcatggctacagcaagagggtgtggtgcaccctgattgggaaaaccttgtactactttcgaagtcaagaggacaagtttcccctggggcaaattaagctctgggaagccaaggtggaagaggtagatcgatcttgcgattccgatgaggactatgaagcatccggaaggtcactgctgtccactcattatactatcgtgatccacccaaaagatcaggggccaacatatctcctgatcggcagtaaacacgagaaagatacgtggctgtatcacctcacagtggccgccggatccaacaatgtcaatgtcggatcagaatttgaacagctggtatgtaagttgttgaatatcgacggagaacctagttctcaaatctggcgtcaccctacactctgccatagtaaagagggcatcattagccccttgacaactttgcctagtgaagcactccagaccgaggcaattaagttgtttaagacttgccagctgttcatcaatgccgcagttgactccccagcgatcgattatcatatttcgttagcacagagcgcactccagatttgcctcacacaccccgaactgcagaatgagatttgctgccagcttattaaacagacccggcgtcgtcagccacagaatcagcccggccctcttcaggggtggcagttactggccctgtgtgttgggctgttcctgccacatcacccttttctgtggctcctgagacttcatcttaaacgaaacgccgactctcggaccgaatttgggaaatatgccatttactgtcagcggtgcgtcgaacgaacccaacaaaacggagatagggaagctcggccctcaaggatggaaattttaagcaccctgcttcgtaacccttatcaccatagtttgcccttttcgatcccagtgcatttcatgaatggtatctaccaagtggtcggcttcgatgcgtcaaccaccgtcgaggaattcctgaataccctgaatcaagacacgggtatgaggaagccagcccagtccgggtttgctctgttcactgatgaccctagcggccgcgatctcgagcattgcctgcagggcaacattaagatttgtgacatcatctctaagtgggagcaagcctctaaagaacagcagccagggaagtgcgagggcacgcgtaccgttcgcctgacgtataagaaccgcctgtacttctctgtccaagcgcggggggaaacagaccgcgagaaattgttgctcatgtaccagacaaacgatcagattattaatggactgtttccactgaataaagacctggcactggagatggccgccctcttgtcacaggtcgaaattggcgacttcgaacggccgttttcgactccagctggacatgtgaccaatcagtgtaaagtgaatcagacactgaagcaggtgatcgagaagttttacccaaagcggtacagggatggatgcagtgaggaacagctgcggcagttgtgccagcggttgagtactcgatggatggcacttagggggcattcggctgcagactgcgtacgtatctacttgacagtcgccaggaaatggccattttttggagccaaattattcctcgccaaacctattactccttcctcgctgggatccactttcttatggcttgccgtccacgaagacggactgtcactactagaatacaactcgatgaggctgatcgtgagctatgtttacaagtctttgatgacattcggggggtaccaggacgactttatggtggtgatcaataacactcactccaaggataaacccacggagaaactactttttgctatggcaaagcccaagatcctggaaataacactacttatagcttcgtatataaacaatttccaccaacagaaggctgccttccatcatctcagcgcccctgccctcctcagtgcacagacgcgtggaccccaggccagaatgatgggtagtcagcccctgctctcctcatctcggcccaccaagggtccaacacttctttag

SEQ ID NO: 247934 - DNA, 4482 bp, Artificial Sequence
  derived and/or modified sequence
atggccgagctgtctgagcctgagggccctgtggactggaaggagcgctgtgtggccctggagagccagctgatgaagttccgggtgcaggccagcaagatccgggagctgctggccgagaagatgcagcagctggagcggcaggtgattgatgctgagcggcaggccgagaaggccttccagcaggtgcaggtgatggaggacaagctgaaggccgccaacatccagaccagcgagagcgagacccggctgtacaacaagtgccaggacctggagagcctcatccaggagaaggatgatgtgatccagaacctggagctgcagctggaggagcagaagcagatccgcatccaggaggccaagatcatcgaggagaaggccgccaagatcaaggagtgggtgacagtgaagctgaatgagctggagctggagaaccagaacctgcggctcatcaaccagaaccagacagaggagatccgcaccatgcagagcaagctgcaggaggtgcagggcaagaagagcagcacagtgtccaccctgaagctgtctgagggccagaggctgagcagcctgaccttcggctgcttcctgagccgggcccggagccccccccaggtggtgaagtctgaggagatgagcaagatcagcagcaaggagcctgagttcacagagggcaaggacatggaggagatggagatccctgagaagtctgtggacaaccaggtgctggagaacaacagaggccagaggaccctgcaccagaccccctgtggcagcgagcagaacaggaagaccaggaccagctttgccacagatggcggcatcagccagaacagcggggcccctgtgtctgactggagcagtgatgaagaagatggcagcaagggccgcagcaagagccgctgcaccagcaccctgagcagccacaccagcgaggagggcgtgcagtgcagcaggatgggcagcgagatgtacctgacagccagtgatgacagcagcagcatctttgaggaggagaccttcggcatcaagaggcctgagcacaagaagctgtacagctggcagcaggaggcccagtggaaggccctgaacagccccctgggcaaaggaaacagcgagctgagcaagaaggagcaggacagcagcagtgatgagctgaacaagaagttccagagccagaggctggactacagcagcagcagcagcgaggccaacacccccagccccatcctgaccccagccctgatgcccaagcaccccaacagcctgagcggcaagggcacccagctggtgcccagcagccacctgcccccacccaagctgcgcatccccaacgtgttcagcatctctgtggccctggccaagaggcacctgagccagccccagctgagcagtgacaggatgtttggcaccaacagaaatgccatctccatgatccggcccctgcggccccaggagacagacctggacctggtggatggagacagcacagaggtgctggagaacatggacaccagctgtgatgatggcctcttctcctatgacagcctggacagccccaacagtgatgaccaggagcactgtgacagcgccaagaaggtggcctacagcaagccacccaccccacccctgcaccgcttccccagctgggagagccgcatctatgctgtggccaagagcggcatccgcatgtctgaggccttcaacatggagagcgtgaacaagaacagcgctgccaccctgagctacaccaccagcggcctgtacaccagcctcatctacaagaacatgaccacccctgtgtacaccaccctgaagggcaaggccacccagatcagcagcagccccttcctggatgacagcagcggcagcgaggaggaggacagcagccgcagcagcagcaggaccagcgagagtgacagccgcagccgcagcggccctggcagcccccgggccatgaagaggggcgtgtccctgagctctgtggccagcgagagtgactatgccatccccccagatgcctacagcacagacacagagtacagccagcctgagcagaagctgcccaagacctgcagcagcagcagtgacaacgggaagaatgagcccctggagaagagcggctacctgctgaagatgtctgggaaggtgaagtcctggaagaggcgctggtttgtgctgaagggcggggagctgctgtactacaagagccccagtgatgtgatcaggaagccccagggccacatcgagctgagcgccagctgcagcatcctgcggggggacaacaagcagacagtgcagctgaccacagagaagcacacctactacctgacagctgacagccccaacatcctggaggagtggatcaaggtgctgcagaatgtgctgcgggtgcaggccgccaaccccctgagcctgcagcctgagggcaagcccaccatgaagggcctgctgaccaaggtgaagcacggctacagcaagagggtgtggtgcaccctcatcggcaagaccctgtactacttccgcagccaggaggacaagttccccctgggccagatcaagctgtgggaggccaaggtggaggaggtggacaggagctgtgacagtgatgaagattatgaggccagcggccgcagcctgctgagcacccactacaccatcgtcatccaccccaaggaccagggccccacctacctgctgattggcagcaagcatgagaaggacacctggctgtaccacctgactgtggccgccggcagcaacaacgtgaatgtgggcagcgagtttgagcagctggtgtgcaagctgctgaacattgatggagagcccagcagccagatctggaggcaccccaccctgtgccacagcaaggagggcatcatcagccccctgaccaccctgcccagcgaggccctgcagacagaggccatcaagctgttcaagacctgccagctgttcatcaatgctgctgtggacagccctgccatcgactaccacatcagcctggcccagagcgccctgcagatctgcctgacccaccctgagctgcagaatgagatctgctgccagctgatcaagcagacccggcggcggcagccccagaaccagcccggccccctgcagggctggcagctgctggccctgtgtgtgggcctcttcctgccccaccaccccttcctgtggctgctgcggctgcacctgaagagaaatgctgacagcaggacagaatttgggaagtatgccatctactgccagagatgtgtggagaggacccagcagaatggagaccgggaggcccggcccagcaggatggagatcctgagcaccctgctgaggaacccctaccaccacagcctgcccttcagcatccctgtgcacttcatgaatggcatctaccaggtggtgggctttgatgccagcaccaccgtggaggagttcctgaacaccctgaaccaggacaccggcatgaggaagccagcccagagcggctttgccctcttcacagatgaccccagcggccgggacctggagcactgcctgcagggcaacatcaagatctgtgacatcatcagcaagtgggagcaggccagcaaggagcagcagcccgggaaatgtgagggcaccaggacagtgcggctgacctacaagaacagactctacttctctgtgcaggcccggggggagacagaccgggagaagctgctgctgatgtaccagaccaatgaccagatcatcaatggcctcttccccctgaacaaggacctggccctggagatggccgccctgctgagccaggtggagatcggggactttgagcggcccttcagcaccccagctggccacgtgaccaaccagtgcaaggtgaaccagaccctgaagcaggtgattgagaagttctaccccaagcgctacagagatggctgcagcgaggagcagctgcggcagctgtgccagaggctgagcacccgctggatggccctgcggggccacagcgctgctgactgtgtgcgcatctacctgactgtggccaggaagtggcccttctttggagccaagctgttcctggccaagcccatcacccccagcagcctgggcagcaccttcctgtggctggccgtgcatgaagatggcctgagcctgctggagtacaacagcatgaggctgattgtgtcctatgtgtacaagagcctgatgaccttcggcggctaccaggatgacttcatggtggtgatcaacaacacccacagcaaggacaagcccacagagaagctgctgtttgccatggccaagcccaagatcctggagatcaccctgctgattgccagctacatcaacaacttccaccagcagaaggccgccttccaccacctgagcgccccagccctgctgagcgcccagacccggggcccccaggccaggatgatgggcagccagcccctgctgagcagcagccggcccaccaagggccccaccctgctgtag

SEQ ID NO: 247935 - DNA, 4482 bp, Artificial Sequence
  derived and/or modified sequence
atggccgagctgagcgagcccgagggccccgtggactggaaggagaggtgcgttgcattagagagccagctgatgaagttcagggtacaagccagcaaaattagggagttgctggctgagaaaatgcagcaactggagcggcaagtaatcgatgccgagaggcaggctgaaaaggcattccagcaggtccaggttatggaagataagcttaaggctgctaacattcagactagtgagagtgagactagactgtacaacaagtgccaggacctggaatccctaattcaggagaaggatgatgtcatccagaatctggagctgcagcttgaggaacaaaagcagattcgcattcaagaagctaagatcatcgaagagaaggcagccaaaataaaagagtgggtcactgttaaactaaatgagttagagctggaaaatcagaatctgcgcttgatcaatcaaaatcagacagaggaaattaggactatgcagtcaaaactccaggaggtccagggaaaaaaatctagcactgtctcgactctcaagctaagtgagggccagagactaagtagcctaacttttggatgttttctcagcagggcgcggagcccaccgcaggtagtgaaatctgaagaaatgtcaaagatatccagcaaggagccagagttcacggaaggaaaagacatggaagagatggagattccagagaaatccgtggataaccaggttctcgaaaacaatcgaggacagcggaccttgcatcaaaccccctgtggttctgagcagaaccgcaagacgagaacaagtttcgctactgacggaggcatcagtcagaatagcggcgcaccggtgagcgattggagctctgatgaggaagatgggtcgaagggccgatctaagtcacgttgcacatccacgctgtcaagccatactagcgaagagggcgtacaatgcagccggatggggtctgagatgtatctgactgcttctgatgactcttcaagcatttttgaggaagagacatttgggatcaagaggccggagcacaaaaagctttattcctggcagcaagaggctcagtggaaggcactgaacagccccctcggcaagggcaattccgaactcagtaagaaggaacaggacagttccagtgatgaactgaataaaaaatttcagagccagcgactagactactcaagcagcagtagcgaagctaacacaccaagtccgatactgacccctgctcttatgcccaagcaccccaattctctgtcaggtaaggggactcagctagtgccatcttcccatctgcccccaccaaagctccgaattcccaacgtgttcagtatttctgtggctctagccaagaggcacttgtctcagccgcagctctctagtgatcgtatgtttggcaccaacagaaacgcgatttccatgattagacccttgaggcctcaggagactgacttggatctagtggatggggacagcactgaagtcttggaaaatatggacaccagctgtgacgatggattgttctcgtacgactccctggactccccgaactccgacgaccaggagcactgcgattccgcaaaaaaggttgcgtattcaaagcctccaaccccaccccttcatagatttcccagctgggaatctcgaatatatgcggttgctaagagcggcatccgtatgagtgaagcttttaacatggagagcgtgaataagaactccgccgcaacattgagttatactacatctgggctctatacatctttgatctacaagaacatgaccacacccgtgtacacaacactcaaaggcaaggccacacagatctcatcctctccatttttagacgactcctcaggctctgaggaggaagacagtagcaggtcatcatctcgcaccagtgaaagcgatagcagaagcaggagcggccctggaagcccccgcgcaatgaaaagaggggtgagtctgtcctccgtggcctcggaatccgactatgctatacccccggatgcctattcaacggacaccgagtactcccagcctgagcaaaagttgccgaaaacatgttcctcttccagtgacaatgggaaaaatgaacccctagaaaaaagcggttacctgctcaagatgtcaggaaaagtaaaaagctggaaaaggcgctggtttgtgttgaaaggaggagaactgctttactataaatctccaagcgatgtgattcgaaaaccacagggtcatattgagctgagcgccagctgttcaattctgcgcggggacaataagcagacagtgcagttaacaaccgaaaaacacacatactatctcacggcggatagtcccaacatcctggaagagtggatcaaggtgttgcagaacgtcctccgtgtccaagcggccaacccactgagcctgcaacctgagggtaaaccaaccatgaagggacttctgacaaaggtgaagcacggatattctaaacgggtgtggtgcactttaatcgggaagaccctgtactactttcgatcccaggaggataagtttcctctgggtcagatcaaactctgggaagccaaagtggaggaggtcgaccggagctgcgattctgacgaggactacgaggcttctggccgtagtttgctctctacccattacactatcgtgattcacccaaaagatcagggaccaacctatttattaatagggtctaaacacgagaaagacacttggctatatcatctgaccgtcgcagcaggtagcaataatgttaatgtgggtagtgagttcgaacaattggtgtgtaaactgctgaatattgacggcgaacccagttctcagatttggcgccacccgacactctgtcactcaaaggagggcattatttctccgctgacgacgctgccgtctgaggccctgcagaccgaggctattaagctctttaagacctgccagctgttcataaatgcagccgtggattcacccgcaatagattaccacatttctttggctcagtcagctttacagatttgcttaacacacccggagctgcaaaacgagatatgctgccagctgattaagcagacccggcgacgtcaacctcagaaccaacccggaccactgcagggttggcagctactggccctgtgcgtggggctgttcctgccgcaccaccctttcctgtggcttcttcgcttgcatctgaaaaggaacgccgactcccgtactgagttcgggaagtatgccatctattgccagaggtgcgttgagcggactcaacagaacggggatcgtgaggcaaggccatcccgcatggaaattctgagtaccctgcttcggaatccttaccatcacagcctcccgttcagcatccccgttcatttcatgaacggcatctatcaggttgtgggctttgatgcaagtacaaccgttgaagagttcctgaataccctcaaccaggacacaggtatgaggaaacctgcacagtccggcttcgcactgtttaccgacgatccttctgggcgcgacctagaacactgcctgcaaggtaatatcaagatctgcgacattatttccaagtgggaacaagcttcaaaagagcagcagcctgggaaatgtgagggaactcggactgtacgactcacctacaaaaatagactgtactttagtgtccaggcccggggcgagactgatcgagagaagttgctgctcatgtaccagactaacgaccagatcataaatggactgtttcccctgaacaaggatctggcacttgaaatggccgctttgctgtctcaggtggagattggagattttgagcgtccgtttagtacccccgcagggcacgtgacaaatcagtgcaaggtgaaccagactctcaaacaggtcatcgagaagttctacccgaagcggtaccgcgacggatgtagcgaggaacaactgaggcagttgtgtcaacggttgagcacacgatggatggcgcttcgaggccattcagctgccgattgcgtcaggatatacctgacagtcgcacgcaaatggccttttttcggcgccaaactctttcttgcaaagcccataactccttcaagccttggtagcacgttcctctggttggccgtgcatgaggatggcttaagtctgcttgagtacaatagcatgcggctgatagtgtcatatgtgtataaatctctcatgacattcggtggctaccaggacgactttatggtcgtcatcaacaatacacattcaaaggataaacccacagagaagctcttattcgcgatggctaagcctaagattctggagattactctcttaattgcttcttatatcaacaacttccatcagcagaaagccgcctttcatcatctctcagctcccgctctccttagtgctcagactagagggccccaggcaagaatgatgggatcgcagcctctgctgagttcctctcggcctacaaaagggcctacgttactgtag

SEQ ID NO: 247936 - DNA, 6981 bp, Artificial Sequence
  derived and/or modified sequence
gagctcggcttgaggcgggcgcgggctgagagtccggggatcccgggggccagtcgcggccgggacatcgggcgctgcggccggggacccgctgctgagatagacagaatatggcagagctttctgagccagagggaccagtagattggaaggaacgatgtgtagctctggagtcccaactcatgaaatttagagttcaagcaagcaagatacgagagcttttagcagagaagatgcaacagcttgagagacaagttattgatgctgaacgtcaagcagaaaaagcttttcaacaggtacaagttatggaagataaattaaaagcagctaatattcaaaccagtgaatcagagacaagattatataataagtgtcaagatctggagtcgctaatacaggaaaaagatgacgtcattcaaaacttggaattgcaacttgaagagcagaaacaaataagaatacaagaagctaaaataatagaagagaaagcagctaagataaaagaatgggtaacagttaagttaaatgagctggaattggagaatcagaatcttcgtttgatcaaccaaaaccaaactgaagagataagaacaatgcagtcaaaactacaagaagttcaaggaaagaagtcatccactgtctctacactaaagctttcggaaggccagcgcctgagcagtttgacctttgggtgctttttatctcgagcaaggagtcctcctcaagtagtaaaatctgaggaaatgagcaagatatcatcgaaagaacctgagttcactgaaggaaaagacatggaagaaatggaaattccagaaaagtctgttgataaccaagttctagaaaacaacagaggccagagaacattgcatcaaaccccttgtggctcagaacagaatcggaaaacaagaacaagctttgccacagatggtggcatctcccagaattctggggctcctgtgagtgactggagctctgatgaggaagacgggagcaaaggaagatccaagtccagatgcacatccaccctctccagtcacacatctgaggaaggggtccagtgtagcaggatgggaagtgaaatgtatctgacagcatctgatgacagcagctctatatttgaggaagagacttttggcataaagagaccagaacacaagaagctatattcttggcagcaggaggcacagtggaaagctctaaatagtcctcttggaaagggaaattctgaattaagtaaaaaggaacaagatagttcctcggatgaactgaataaaaaatttcaatcccagagactcgattattcatcttcatcgagtgaagccaacaccccaagccctattttgaccccagctttaatgccaaagcatcctaactcactctctggaaaaggaacacaattagtgccttcatcacacctgccacccccaaagttaaggattcctaatgttttcagtataagtgtagcactagccaaaaggcacttaagccagccacagttaagctctgacaggatgtttggtacaaatagaaacgctataagcatgatacgaccactgagacctcaggaaactgatcttgatctagttgatggagacagtacagaagttttagagaatatggacacgagttgtgatgatggattattttcctatgactccttggactctccaaattcagatgaccaggaacactgtgactcagcaaagaaggtggcatacagcaaacctccaactcctcccctgcaccgttttccttcttgggaaagcagaatttatgctgtagccaaatcaggtattcgaatgtctgaggccttcaatatggagagtgttaataaaaattctgctgcaaccctttcctatactacatcaggactttatacatctctgatatacaagaacatgaccaccccagtgtatacaactttgaaggggaaggcgacccaaataagtagcagccctttcctggatgactcatctgggtcagaggaagaagacagctccagatccagctcccggacgtcagagtcagactcacgcagtaggagtgggccaggcagccccagagccatgaaacgaggtgtgtctctctcctctgtggcttctgaaagtgattatgctattcctcctgatgcttactccacagacacggagtactcacagccagagcagaagctcccaaaaacttgctcatcttccagtgataatgggaaaaatgaaccactggaaaaatctggttatttattaaaaatgagtggtaaagtcaagtcttggaagcggcggtggtttgttcttaaaggtggtgaattactttactacaaatctccgagtgatgtaattagaaaaccccagggccatattgaacttagtgcatcctgtagtattttaagaggagataacaaacaaacagttcagttgaccactgaaaaacacacatactatctgactgcagattctcccaatatattggaagagtggattaaagtgttacagaatgttcttcgagtacaagctgccaacccactttccctgcagcctgagggcaaacccaccatgaagggattgctcactaaggtaaaacatggatattccaagagagtctggtgtacactaataggaaagacattatattattttcggagtcaagaagataagtttcctttaggtcagatcaaactctgggaggctaaagtggaagaggttgacagatcttgtgattcagatgaagattatgaagccagtggacgaagtctgttatccacacattatactatcgttatccatcccaaagaccaaggtccaacttacctcctaattggatccaagcatgaaaaggacacttggctttatcatctgactgttgcagctggaagcaacaatgtaaacgttggatctgaatttgaacaactggtttgcaaattgctaaatatagacggggagccttcctctcagatatggagacaccccactttgtgtcacagtaaagaaggaatcatttcccctctgacaactctaccttccgaagccctgcagacagaagctattaaattatttaagacctgccagctttttataaatgctgcagttgactctcctgcaattgattaccacatatctttagcccagagtgctttgcaaatctgcctgacacatcctgagctgcagaatgaaatttgctgtcagcttattaaacagacaagacgaagacagccacagaatcaaccaggaccattgcagggctggcagctcttggcactctgcgttgggctcttccttccccatcatcctttcctgtggctcctcaggcttcacctaaagaggaatgcagattccaggacagaatttggaaaatatgccatttactgccagcgttgtgtagaaagaacgcaacaaaatggtgacagagaagcaagaccctcaaggatggaaattctttcaactcttctccgaaacccttatcaccattctttgccctttagtatacctgtgcacttcatgaatgggatataccaggtagttggttttgacgcatctaccacagtggaagaatttttgaatactttgaaccaggacacaggaatgaggaaaccagcgcagtctggatttgcgttgttcactgacgatccttctggcagagatttagagcattgtcttcaaggaaacatcaagatttgtgacattatttccaaatgggaacaggcttccaaagaacagcagcctggaaaatgtgaaggtacaaggactgttcgtctgacatacaaaaacagactatatttctcagtgcaagctcgtggagagactgatagagaaaagttgctgttaatgtatcagacaaatgatcaaatcataaatggactttttcctctgaacaaagatctggcattagaaatggcagctcttttatctcaggtagagattggagattttgaaagacctttctcaactccagcagggcatgttaccaatcagtgcaaagtgaatcaaactctaaagcaagtcatagagaaattttatcctaaaaggtatagagatggctgttctgaagagcagttaaggcagctttgccagcgactttcaaccagatggatggccctccggggacacagtgctgctgactgtgtgcgcatttatttgacagtagccaggaagtggccattctttggtgccaagttgtttcttgcaaaacccataactccatcatcacttggaagtactttcttgtggctggctgtacatgaggatggtttaagcctcttagaatacaactccatgaggttaatagtcagctatgtgtacaagagtctaatgacctttggaggctatcaagatgattttatggtagtcattaacaatacacattcaaaggacaaaccaacagagaaattactttttgccatggcaaaacccaagattcttgaaatcactcttttgatcgccagttacataaacaacttccatcagcaaaaggcagcatttcaccacctctctgctccagcactgctctcagcccagacccggggaccccaagccagaatgatgggaagccagcctcttctgtcaagcagcagaccgaccaaaggccccaccttactctgaaagctggggagcctgaacattcactccttgtcctccatgctgtggctgtatcagctccctacaagttcgtttacacctggcagcacggcagccacacaccggtattccaaaccttaacaatgaagggggttagtctcttttatttgattcttaaatattcaaataaatattaacagtaaaacataaacacaaaatttgccaacacactaattttcttatagagtaaatgagtaagaattcatcattttttccatctcccttctcccttgtcatcagacacattgtgcaatgtggcttttcttttcttttctttttttcccctttttaatattctggcaatctttagaaagggagattccaaactcccatttggtaaaccagttgattatttggaaatgttcactgccaaaatagtaagtgctataactaaatgcgcttttaattaatgatatagtgtttggaaaggagtagaacatgcagcataagaaactgctgcagagtggtgcgaggagtacattttcagagcaggtgcagtacatcttccggctctatgaatcattatgtgagaaagcaggataacattaggtaacctgagcctcctgtgtggtattagaaagtataccgtcaccttttcacatcactggagtgtaaaatttaaaacaagatggtgattcctgacattccttggctgtcagtgctgcccagattcagaagaatattgcccacatttcactgtatttggtgctgggtcattttgaccttgctttgttaataatatctttaaaaacaaagacaatccttaaagctttgctcctcacacattaccttctaattatagtttgaaaatagattccctacacatacatacatatgtatgcacagatagggtcttgctatgttgcccaggctggtcttgaactcctggcctcaagcaatcctctctcctcagcctcccaaagtgctgggattacaagtgtgagccaccacacctggctccagaaattttattttatttttttgaggcagggtctcactctggttgcccaggctggagtgcagtggtgccatcatagctcactgtagcctcgaccttccgggatcaagcaatcccacttcagcctcttgaatagctgggactagaagcatgcaccaccatgcccatctaatatttgtatttttagtagagacaggatctccctatgttgtccagcctagtctcaaactcctgggttcaagcaatcctcccacctcggcctcccaaagtgctgggattgcaggcatgagccaccgtgcccagcctcaaaaatattttttaaaagaaaagagaaaataattcttctgtcaaaggaggttaaattttagttgatagagtacttaaatgcattactttattaggttatgtaagtggtcagtgcattccagtatgtgtcacaacagtgtagttcatattcatgataaaaatgaaactgtgataagacatgaaaattatattattaaaatgttcaattgtaatggtaatcatgagtatacttaattttatttatgtatagaatatttgtatttattttttggacatatatttatcactttgtcattttttttaaccaatttgagaaatgttagctgctgaattaatttgttgcccgagccttcatattttcttctttgctgccttctccctgtggcaatgtactgttctcacattaagccttttaaaaatgttccatactgtattagcatccttagaagggacagaactaagaaatacattgctcaaataatattttactttattgataatgacaaaaagaatattttttaaaccccatcaaaatagatttcaattgactgtttcccctacatcttttgagccacagtcgcccatcgaataagcaaatttgtttttgagaataaactggtaaccagtttgtgatgactctcagaagccttttggctgggttacagaagagtttctaagttcctagagagccatttaataattagttggtgagccagaggcttgacagagctgttacttatgtgtgagggctttattctcaggcagtagtttattcatcatttggtaagcccctccccacactcctctaatttaaacaagtagtgaaggcttatcttaaactgtgtagtaccttagacttggcatttatttttgatagagcagagataaaatattttgatggaaggaaatcaattttctgtaactgatgatgtgaaaattttattttctgggaaattatatagccattcaaaaattcaaagtatgttattatgattggttacaagagaataatgttacatgtttaattgtaatatttgtctcctatcattttcttccctttcagtcataataaatgatttacaaaaccca

SEQ ID NO: 247937 - DNA, 4482 bp, Artificial Sequence
  derived and/or modified sequence
atggctgagctgagtgaaccagagggacccgtcgactggaaggagaggtgtgtggctttagagagtcaactgatgaaattccgagtgcaggcaagcaaaataagagaactgctagcggagaaaatgcaacagctggaacgtcaagtaatcgacgccgagagacaggctgaaaaagcattccagcaggtccaggtcatggaggataaactgaaggccgctaacatccagacctccgagtccgaaacacgactctacaataaatgtcaggacctcgaatccctgatacaagaaaaagacgacgtgattcaaaatctggagttgcagctggaagagcagaagcaaatcaggattcaggaggccaaaatcattgaagaaaaagctgctaagatcaaagagtgggtgaccgtgaaactcaacgagctggaactggaaaaccagaatctgaggcttatcaatcagaatcagaccgaggaaatacgaacaatgcagagtaaattacaggaggtacaggggaagaagagctccacggtgtcaacattgaagctcagtgagggccagcgcctgagctcattaacctttggatgctttctgagccgtgctagatcgccgccacaagtggttaaatccgaagagatgagtaagatctccagtaaggagcctgagttcacagagggtaaagatatggaggaaatggaaatcccggaaaaaagcgttgataaccaggttctcgagaacaaccgcggtcagcgtaccctccaccagactccatgcgggtctgagcagaaccgcaaaacgaggacaagcttcgctacagacggcggaattagccagaatagcggagcgcctgtgagcgattggtccagtgacgaagaagacggcagcaaagggagatctaaatctcggtgcacttcaaccttgagctctcacacctcagaggaaggggtccagtgcagcagaatgggcagtgaaatgtacctgacagcaagcgacgattcatcgagtatctttgaagaggaaactttcggcatcaaacgacccgagcacaagaaactgtattcctggcagcaggaagctcagtggaaggcgttaaacagcccattagggaagggcaacagtgagctgtcgaaaaaagaacaggacagcagcagcgacgagctgaataagaagttccagagccagaggcttgactactcaagttcctcatctgaggccaataccccatcgcccattctgacgccggctctgatgcccaagcatcctaacagcctcagtgggaaaggcactcaactggttccgagcagccatttgccgccacctaagctgcgcattcccaatgtgttctctatttcagttgcgctggcaaaaaggcacctgagtcaaccgcaattatccagtgacagaatgtttgggactaatcggaatgctattagcatgattaggcctctgcggccacaggagacagatcttgacttggttgatggagactcaaccgaggtattagagaacatggataccagctgtgatgacggcctcttctcatacgactcgctggatagtcccaacagcgacgaccaagaacactgtgactcagcaaaaaaggtggcttacagcaaaccccctacacccccactccaccgcttccctagttgggagtcacgtatttacgcagtggccaaaagtggcatcaggatgtcagaagcttttaatatggaatctgtaaacaaaaatagtgcggctacgcttagctacaccacatctggtctgtacacaagcctaatttataaaaacatgacaacacccgtgtataccaccttaaagggtaaagccactcaaatctcatcatctccatttcttgacgatagcagtggatccgaagaggaggattcatccaggtcttcgtctagaacatcagagtccgactcgcgctcccgctccggcccaggaagtcccagggccatgaagagaggggttagtctatccagcgtagccagcgaaagcgactatgccatccctcctgacgcctactccaccgatacggaatactcgcagcctgagcagaagcttccaaaaacttgttcgtctagctccgataatggtaagaacgaaccactggagaagtctggatacttgttgaagatgtccgggaaggtaaaaagttggaaacggagatggtttgtgctaaaagggggtgaactcctgtattataagtccccctcggatgttatccgaaaaccgcaggggcatatcgagctgtctgcatcttgctctatccttagaggcgataataagcagactgttcagctgactaccgagaaacacacctattatctcaccgcagactcccccaacattttagaggagtggatcaaagttctgcagaacgtcttaagagtccaggcagcaaacccgctgtctttgcagcccgaaggtaaacccaccatgaagggcctgcttacgaaggtcaaacacggatacagcaagagagtgtggtgcacccttataggcaaaacactttattattttcgatcccaagaggataaattcccactgggccagatcaagctgtgggaggctaaagtggaggaagtcgataggagctgtgactcagatgaggattatgaagcttccggcagatccctacttagtacgcattatacaatcgtgattcatccaaaggatcagggacctacatacctcttgattggctctaaacatgagaaagatacatggctttatcacctgacggtggctgctggatccaacaacgtgaatgtcgggagtgaatttgagcagctcgtatgtaagctccttaacatagatggggagccaagcagccagatttggcggcatcctaccctttgtcatagtaaagaagggatcatatctcccctcacgaccctgccaagcgaagcattgcagacggaggcaatcaagctgttcaaaacatgccagttatttattaatgccgctgtcgactctccagcaatcgattaccatatctccttagctcaatcggcgctgcagatctgtctcacccatccagagctccagaatgagatttgctgtcagctcataaagcaaactcggcgtcgccagccgcagaatcagcccggtcctttgcagggatggcaattgctggcattgtgtgtgggcctgtttctcccccatcatcccttcttatggctcctgcggctgcacttgaaacgcaacgccgactccagaacagagttcggtaaatatgccatatattgccagcgctgcgttgagcggacacagcagaacggggacagagaagcaagaccatcccgcatggaaatcttatccaccctgctgcggaacccttaccatcattccttaccattttccatccccgtgcacttcatgaatggtatttaccaagtcgtgggctttgacgccagcacaacggttgaggagttcctcaataccctgaatcaggacaccggaatgcgaaagcctgcccagtcgggttttgccctgtttaccgacgatccaagcgggcgtgatctagaacattgcctgcagggcaacataaaaatctgtgatattattagcaagtgggaacaggcctccaaagagcagcagcccggtaaatgcgagggaacccgaacagtgcgtctgacctacaagaatagactgtacttctccgtccaggcccgaggcgagacagacagagagaagctactactgatgtaccagactaacgaccagattattaacgggctcttccccctgaacaaggatttggcgcttgagatggctgcattgttgagtcaggtggaaataggggatttcgaacggcctttctcaacccccgcaggtcatgttacaaaccaatgcaaagtgaaccaaactctcaaacaggtcattgaaaagttctatcccaagaggtatcgggacgggtgttcagaagagcagctgcgccagctatgccagcggctgagcactcgctggatggccttgaggggacattctgctgccgactgtgtgagaatctatttgacagtggccaggaagtggcctttcttcggcgctaagctcttccttgcgaagcctatcacacctagttccttggggtctactttcctgtggcttgccgtgcacgaagacggcctgtcactccttgagtataacagcatgagactcatagtgagctacgtgtataaaagcctgatgacttttggaggctatcaagatgactttatggtcgtgatcaataacacacattcaaaggataagcctacggagaagttacttttcgcgatggctaagccaaagatcctggagattactcttctgattgcttcatacataaataacttccaccagcagaaggctgccttccatcatctgagtgctccggcactgctgtccgctcagactcggggacctcaggcacgcatgatgggttcgcagcctttgctctcatccagtcgcccaacaaagggtcccaccctgctatag

SEQ ID NO: 247938 - DNA, 4482 bp, Artificial Sequence
  derived and/or modified sequence
atggccgagctgagcgagcccgagggccccgtggactggaaggagagatgcgtggccctggagagccagctgatgaagttcagagtgcaggccagcaagatcagagagctgctggccgagaagatgcagcagctggagagacaggtgatcgacgccgagagacaggccgagaaggccttccagcaggtgcaggtgatggaggacaagctgaaggccgccaacatccagaccagcgagagcgagaccagactgtacaacaagtgccaggacctggagagcctgatccaggagaaggacgacgtgatccagaacctggagctgcagctggaggagcagaagcagatcagaatccaggaggccaagatcatcgaggagaaggccgccaagatcaaggagtgggtgaccgtgaagctgaacgagctggagctggagaaccagaacctgagactgatcaaccagaaccagaccgaggagatcagaaccatgcagagcaagctgcaggaggtgcagggcaagaagagcagcaccgtgagcaccctgaagctgagcgagggccagagactgagcagcctgaccttcggctgcttcctgagcagagccagaagccccccccaggtggtgaagagcgaggagatgagcaagatcagcagcaaggagcccgagttcaccgagggcaaggacatggaggagatggagatccccgagaagagcgtggacaaccaggtgctggagaacaacagaggccagagaaccctgcaccagaccccctgcggcagcgagcagaacagaaagaccagaaccagcttcgccaccgacggcggcatcagccagaacagcggcgcccccgtgagcgactggagcagcgacgaggaggacggcagcaagggcagaagcaagagcagatgcaccagcaccctgagcagccacaccagcgaggagggcgtgcagtgcagcagaatgggcagcgagatgtacctgaccgccagcgacgacagcagcagcatcttcgaggaggagaccttcggcatcaagagacccgagcacaagaagctgtacagctggcagcaggaggcccagtggaaggccctgaacagccccctgggcaagggcaacagcgagctgagcaagaaggagcaggacagcagcagcgacgagctgaacaagaagttccagagccagagactggactacagcagcagcagcagcgaggccaacacccccagccccatcctgacccccgccctgatgcccaagcaccccaacagcctgagcggcaagggcacccagctggtgcccagcagccacctgcccccccccaagctgagaatccccaacgtgttcagcatcagcgtggccctggccaagagacacctgagccagccccagctgagcagcgacagaatgttcggcaccaacagaaacgccatcagcatgatcagacccctgagaccccaggagaccgacctggacctggtggacggcgacagcaccgaggtgctggagaacatggacaccagctgcgacgacggcctgttcagctacgacagcctggacagccccaacagcgacgaccaggagcactgcgacagcgccaagaaggtggcctacagcaagccccccaccccccccctgcacagattccccagctgggagagcagaatctacgccgtggccaagagcggcatcagaatgagcgaggccttcaacatggagagcgtgaacaagaacagcgccgccaccctgagctacaccaccagcggcctgtacaccagcctgatctacaagaacatgaccacccccgtgtacaccaccctgaagggcaaggccacccagatcagcagcagccccttcctggacgacagcagcggcagcgaggaggaggacagcagcagaagcagcagcagaaccagcgagagcgacagcagaagcagaagcggccccggcagccccagagccatgaagagaggcgtgagcctgagcagcgtggccagcgagagcgactacgccatcccccccgacgcctacagcaccgacaccgagtacagccagcccgagcagaagctgcccaagacctgcagcagcagcagcgacaacggcaagaacgagcccctggagaagagcggctacctgctgaagatgagcggcaaggtgaagagctggaagagaagatggttcgtgctgaagggcggcgagctgctgtactacaagagccccagcgacgtgatcagaaagccccagggccacatcgagctgagcgccagctgcagcatcctgagaggcgacaacaagcagaccgtgcagctgaccaccgagaagcacacctactacctgaccgccgacagccccaacatcctggaggagtggatcaaggtgctgcagaacgtgctgagagtgcaggccgccaaccccctgagcctgcagcccgagggcaagcccaccatgaagggcctgctgaccaaggtgaagcacggctacagcaagagagtgtggtgcaccctgatcggcaagaccctgtactacttcagaagccaggaggacaagttccccctgggccagatcaagctgtgggaggccaaggtggaggaggtggacagaagctgcgacagcgacgaggactacgaggccagcggcagaagcctgctgagcacccactacaccatcgtgatccaccccaaggaccagggccccacctacctgctgatcggcagcaagcacgagaaggacacctggctgtaccacctgaccgtggccgccggcagcaacaacgtgaacgtgggcagcgagttcgagcagctggtgtgcaagctgctgaacatcgacggcgagcccagcagccagatctggagacaccccaccctgtgccacagcaaggagggcatcatcagccccctgaccaccctgcccagcgaggccctgcagaccgaggccatcaagctgttcaagacctgccagctgttcatcaacgccgccgtggacagccccgccatcgactaccacatcagcctggcccagagcgccctgcagatctgcctgacccaccccgagctgcagaacgagatctgctgccagctgatcaagcagaccagaagaagacagccccagaaccagcccggccccctgcagggctggcagctgctggccctgtgcgtgggcctgttcctgccccaccaccccttcctgtggctgctgagactgcacctgaagagaaacgccgacagcagaaccgagttcggcaagtacgccatctactgccagagatgcgtggagagaacccagcagaacggcgacagagaggccagacccagcagaatggagatcctgagcaccctgctgagaaacccctaccaccacagcctgcccttcagcatccccgtgcacttcatgaacggcatctaccaggtggtgggcttcgacgccagcaccaccgtggaggagttcctgaacaccctgaaccaggacaccggcatgagaaagcccgcccagagcggcttcgccctgttcaccgacgaccccagcggcagagacctggagcactgcctgcagggcaacatcaagatctgcgacatcatcagcaagtgggagcaggccagcaaggagcagcagcccggcaagtgcgagggcaccagaaccgtgagactgacctacaagaacagactgtacttcagcgtgcaggccagaggcgagaccgacagagagaagctgctgctgatgtaccagaccaacgaccagatcatcaacggcctgttccccctgaacaaggacctggccctggagatggccgccctgctgagccaggtggagatcggcgacttcgagagacccttcagcacccccgccggccacgtgaccaaccagtgcaaggtgaaccagaccctgaagcaggtgatcgagaagttctaccccaagagatacagagacggctgcagcgaggagcagctgagacagctgtgccagagactgagcaccagatggatggccctgagaggccacagcgccgccgactgcgtgagaatctacctgaccgtggccagaaagtggcccttcttcggcgccaagctgttcctggccaagcccatcacccccagcagcctgggcagcaccttcctgtggctggccgtgcacgaggacggcctgagcctgctggagtacaacagcatgagactgatcgtgagctacgtgtacaagagcctgatgaccttcggcggctaccaggacgacttcatggtggtgatcaacaacacccacagcaaggacaagcccaccgagaagctgctgttcgccatggccaagcccaagatcctggagatcaccctgctgatcgccagctacatcaacaacttccaccagcagaaggccgccttccaccacctgagcgcccccgccctgctgagcgcccagaccagaggcccccaggccagaatgatgggcagccagcccctgctgagcagcagcagacccaccaagggccccaccctgctgtag

SEQ ID NO: 247939 - protein, 1888 aa, Artificial Sequence
  derived and/or modified sequence
MAAAAAAAVGGQQPSQPELPAPGLALDKAATAAHLKAALSRPDNRAGAEELQALLERVLSAERPLAAAAGGEDAAAAGGGGGPGAAEEEALEWCKCLLAGGGGYDEFCAAVRAYDPAALCGLVWTANFVAYRCRTCGISPCMSLCAECFHQGDHTGHDFNMFRSQAGGACDCGDSNVMRESGFCKRHQIKSSSNIPCVPKDLLMMSEFVLPRFIFCLIQYLREGYNEPAADGPSEKDLNKVLQLLEPQISFLEDLTKMGGAMRSVLTQVLTNQQNYKDLTSGLGENACVKKSHEKYLIALKSSGLTYPEDKLVYGVQEPSAGTSSLAVQGFIGATGTLGQVDSSDEDDQDGSQGLGKRKRVKLSSGTKDQSIMDVLKHKSFLEELLFWTIKYEFPQKMVTFLLNMLPDQEYKVAFTKTFVQHYAFIMKTLKKSHESDTMSNRIVHISVQLFSNEELARQVTEECQLLDIMVTVLLYMMESCLIKSELQDEENSLHVVVNCGEALLKNNTYWPLVSDFINILSHQSVAKRFLEDHGLLVTWMNFVSFFQGMNLNKRELNEHVEFESQTYYAAFAAELEACAQPMWGLLSHCKVRETQEYTRNVVRYCLEALQDWFDAINFVDEPAPNQVTFHLPLHRYYAMFLSKAVKCQELDLDSVLPDQEMLMKLMIHPLQIQASLAEIHSNMWVRNGLQIKGQAMTYVQSHFCNSMIDPDIYLLQVCASRLDPDYFISSVFERFKVVDLLTMASQHQNTVLDAEHERSMLEGALTFLVILLSLRLHLGMSDDEILRAEMVAQLCMNDRTHSSLLDLIPENPNPKSGIIPGSYSFESVLSAVADFKAPVFEPGGSMQQGMYTPKAEVWDQEFDPVMVILRTVYRRDVQSAMDRYTAFLKQSGKFPGNPWPPYKKRTSLHPSYKGLMRLLHCKTLHIVLFTLLYKILMDHQNLSEHVLCMVLYLIELGLENSAEEESDEEASVGGPERCHDSWFPGSNLVSNMRHFINYVRVRVPETAPEVKRDSPASTSSDNLGSLQNSGTAQVFSLVAERRKKFQEIINRSSSEANQVVRPKTSSKWSAPGSAPQLTTAILEIKESILSLLIKLHHKLSGKQNSYYPPWLDDIEILIQPEIPKYSHGDGITAVERILLKAASQSRMNKRIIEEICRKVTPPVPPKKVTAAEKKTLDKEERRQKARERQQKLLAEFASRQKSFMETAMDVDSPENDIPMEITTAEPQVSEAVYDCVICGQSGPSSEDRPTGLVVLLQASSVLGQCRDNVEPKKLPISEEEQIYPWDTCAAVHDVRLSLLQRYFKDSSCLLAVSIGWEGGVYVQTCGHTLHIDCHKSYMESLRNDQVLQGFSVDKGEFTCPLCRQFANSVLPCYPGSNVENNPWQRPSNKSIQDLIKEVEELQGRPGAFPSETNLSKEMESVMKDIKNTTQKKYRDYSKTPGSPDNDFLFMYSVARTNLELELIHRGGNLCSGGASTAGKRSCLNQLFHVLALHMRLYSIDSEYNPWRKLTQLEEMNPQLGYEEQQPEVPILYHDVTSLLLIQILMMPQPLRKDHFTCIVKVLFTLLYTQALAALSVKCSEEDRSAWKHAGALKKSTCDAEKSYEVLLSFVISELFKGKLYHEEGTQECAMVNPIAWSPESMEKCLQDFCLPFLRITSLLQHHLFGEDLPSCQEEEEFSVLASCLGLLPTFYQTEHPFISASCLDWPVPAFDIITQWCFEIKSFTERHAEQGKALLIQESKWKLPHLLQLPENYNTIFQYYHRKTCSVCTKVPKDPAVCLVCGTFVCLKGLCCKQQSYCECVLHSQNCGAGTGIFLLINASVIIIIRGHRFCLWGSVYLDAHGEEDRDLRRGKPLYICKERYKVLEQQWISHTFDHINKRWGPHYNGL

SEQ ID NO: 247940 - protein, 1917 aa, Artificial Sequence
  derived and/or modified sequence
MAAAAAAAVGGQQPSQPELPAPGLALDKAATAAHLKAALSRPDNRAGAEELQALLERVLSAERPLAAAAGGEDAAAAGGGGGPGAAEEEALEWCKCLLAGGGGYDEFCAAVRAYDPAALCGLVWTANFVAYRCRTCGISPCMSLCAECFHQGDHTGHDFNMFRSQAGGACDCGDSNVMRESGFCKRHQIKSSSNIPCVPKDLLMMSEFVLPRFIFCLIQYLREGYNEPAADGPSEKDLNKVLQLLEPQISFLEDLTKMGGAMRSVLTQVLTNQQNYKDLTSGLGENACVKKSHEKYLIALKSSGLTYPEDKLVYGVQEPSAGTSSLAVQGFIGATGTLGQVDSSDEDDQDGSQGLGKRKRVKLSSGTKDQSIMDVLKHKSFLEELLFWTIKYEFPQKMVTFLLNMLPDQEYKVAFTKTFVQHYAFIMKTLKKSHESDTMSNRIVHISVQLFSNEELARQVTEECQLLDIMVTVLLYMMESCLIKSELQDEENSLHVVVNCGEALLKNNTYWPLVSDFINILSHQSVAKRFLEDHGLLVTWMNFVSFFQGMNLNKRELNEHVEFESQTYYAAFAAELEACAQPMWGLLSHCKVRETQEYTRNVVRYCLEALQDWFDAINFVDEPAPNQVTFHLPLHRYYAMFLSKAVKCQELDLDSVLPDQEMLMKLMIHPLQIQASLAEIHSNMWVRNGLQIKGQAMTYVQSHFCNSMIDPDIYLLQVCASRLDPDYFISSVFERFKVVDLLTMASQHQNTVLDAEHERSMLEGALTFLVILLSLRLHLGMSDDEILRAEMVAQLCMNDRTHSSLLDLIPENPNPKSGIIPGSYSFESVLSAVADFKAPVFEPGGSMQQGMYTPKAEVWDQEFDPVMVILRTVYRRDVQSAMDRYTAFLKQSGKFPGNPWPPYKKRTSLHPSYKGLMRLLHCKTLHIVLFTLLYKILMDHQNLSEHVLCMVLYLIELGLENSAEEESDEEASVGGPERCHDSWFPGSNLVSNMRHFINYVRVRVPETAPEVKRDSPASTSSDNLGSLQNSGTAQVFSLVAERRKKFQEIINRSSSEANQVVRPKTSSKWSAPGSAPQLTTAILEIKESILSLLIKLHHKLSGKQNSYYPPWLDDIEILIQPEIPKYSHGDGITAVERILLKAASQSRMNKRIIEEICRKVTPPVPPKKVTAAEKKTLDKEERRQKARERQQKLLAEFASRQKSFMETAMDVDSPENDIPMEITTAEPQVSEAVYDCVICGQSGPSSEDRPTGLVVLLQASSVLGQCRDNVEPKKLPISEEEQIYPWDTCAAVHDVRLSLLQRYFKDSSCLLAVSIGWEGGVYVQTCGHTLHIDCHKSYMESLRNDQVLQGFSVDKGEFTCPLCRQFANSVLPCYPGSNVENNPWQRPSNKSIQDLIKEVEELQGRPGAFPSETNLSKEMESVMKDIKNTTQKKYRDYSKTPGSPDNDFLFMYSVARTNLELELIHRGGNLCSGGASTAGKRSCLNFCFIIFPFTKSEIILCQYRKSHDKVYPKYQLFHVLALHMRLYSIDSEYNPWRKLTQLEEMNPQLGYEEQQPEVPILYHDVTSLLLIQILMMPQPLRKDHFTCIVKVLFTLLYTQALAALSVKCSEEDRSAWKHAGALKKSTCDAEKSYEVLLSFVISELFKGKLYHEEGTQECAMVNPIAWSPESMEKCLQDFCLPFLRITSLLQHHLFGEDLPSCQEEEEFSVLASCLGLLPTFYQTEHPFISASCLDWPVPAFDIITQWCFEIKSFTERHAEQGKALLIQESKWKLPHLLQLPENYNTIFQYYHRKTCSVCTKVPKDPAVCLVCGTFVCLKGLCCKQQSYCECVLHSQNCGAGTGIFLLINASVIIIIRGHRFCLWGSVYLDAHGEEDRDLRRGKPLYICKERYKVLEQQWISHTFDHINKRWGPHYNGL

SEQ ID NO: 247941 - DNA, 5667 bp, Artificial Sequence
  derived and/or modified sequence
atggccgccgccgccgccgccgccgtgggcggccagcagcccagccagcccgagctgcccgcccccggcctggccctggacaaggccgccaccgccgcccacctgaaggccgccctgagcagacccgacaacagagccggcgccgaggagctgcaggccctgctggagagagtgctgagcgccgagagacccctggccgccgccgccggcggcgaggacgccgccgccgccggcggcggcggcggccccggcgccgccgaggaggaggccctggagtggtgcaagtgcctgctggccggcggcggcggctacgacgagttctgcgccgccgtgagagcctacgaccccgccgccctgtgcggcctggtgtggaccgccaacttcgtggcctacagatgcagaacctgcggcatcagcccctgcatgagcctgtgcgccgagtgcttccaccagggcgaccacaccggccacgacttcaacatgttcagaagccaggccggcggcgcctgcgactgcggcgacagcaacgtgatgagagagagcggcttctgcaagagacaccagatcaagagcagcagcaacatcccctgcgtgcccaaggacctgctgatgatgagcgagttcgtgctgcccagattcatcttctgcctgatccagtacctgagagagggctacaacgagcccgccgccgacggccccagcgagaaggacctgaacaaggtgctgcagctgctggagccccagatcagcttcctggaggacctgaccaagatgggcggcgccatgagaagcgtgctgacccaggtgctgaccaaccagcagaactacaaggacctgaccagcggcctgggcgagaacgcctgcgtgaagaagagccacgagaagtacctgatcgccctgaagagcagcggcctgacctaccccgaggacaagctggtgtacggcgtgcaggagcccagcgccggcaccagcagcctggccgtgcagggcttcatcggcgccaccggcaccctgggccaggtggacagcagcgacgaggacgaccaggacggcagccagggcctgggcaagagaaagagagtgaagctgagcagcggcaccaaggaccagagcatcatggacgtgctgaagcacaagagcttcctggaggagctgctgttctggaccatcaagtacgagttcccccagaagatggtgaccttcctgctgaacatgctgcccgaccaggagtacaaggtggccttcaccaagaccttcgtgcagcactacgccttcatcatgaagaccctgaagaagagccacgagagcgacaccatgagcaacagaatcgtgcacatcagcgtgcagctgttcagcaacgaggagctggccagacaggtgaccgaggagtgccagctgctggacatcatggtgaccgtgctgctgtacatgatggagagctgcctgatcaagagcgagctgcaggacgaggagaacagcctgcacgtggtggtgaactgcggcgaggccctgctgaagaacaacacctactggcccctggtgagcgacttcatcaacatcctgagccaccagagcgtggccaagagattcctggaggaccacggcctgctggtgacctggatgaacttcgtgagcttcttccagggcatgaacctgaacaagagagagctgaacgagcacgtggagttcgagagccagacctactacgccgccttcgccgccgagctggaggcctgcgcccagcccatgtggggcctgctgagccactgcaaggtgagagagacccaggagtacaccagaaacgtggtgagatactgcctggaggccctgcaggactggttcgacgccatcaacttcgtggacgagcccgcccccaaccaggtgaccttccacctgcccctgcacagatactacgccatgttcctgagcaaggccgtgaagtgccaggagctggacctggacagcgtgctgcccgaccaggagatgctgatgaagctgatgatccaccccctgcagatccaggccagcctggccgagatccacagcaacatgtgggtgagaaacggcctgcagatcaagggccaggccatgacctacgtgcagagccacttctgcaacagcatgatcgaccccgacatctacctgctgcaggtgtgcgccagcagactggaccccgactacttcatcagcagcgtgttcgagagattcaaggtggtggacctgctgaccatggccagccagcaccagaacaccgtgctggacgccgagcacgagagaagcatgctggagggcgccctgaccttcctggtgatcctgctgagcctgagactgcacctgggcatgagcgacgacgagatcctgagagccgagatggtggcccagctgtgcatgaacgacagaacccacagcagcctgctggacctgatccccgagaaccccaaccccaagagcggcatcatccccggcagctacagcttcgagagcgtgctgagcgccgtggccgacttcaaggcccccgtgttcgagcccggcggcagcatgcagcagggcatgtacacccccaaggccgaggtgtgggaccaggagttcgaccccgtgatggtgatcctgagaaccgtgtacagaagagacgtgcagagcgccatggacagatacaccgccttcctgaagcagagcggcaagttccccggcaacccctggcccccctacaagaagagaaccagcctgcaccccagctacaagggcctgatgagactgctgcactgcaagaccctgcacatcgtgctgttcaccctgctgtacaagatcctgatggaccaccagaacctgagcgagcacgtgctgtgcatggtgctgtacctgatcgagctgggcctggagaacagcgccgaggaggagagcgacgaggaggccagcgtgggcggccccgagagatgccacgacagctggttccccggcagcaacctggtgagcaacatgagacacttcatcaactacgtgagagtgagagtgcccgagaccgcccccgaggtgaagagagacagccccgccagcaccagcagcgacaacctgggcagcctgcagaacagcggcaccgcccaggtgttcagcctggtggccgagagaagaaagaagttccaggagatcatcaacagaagcagcagcgaggccaaccaggtggtgagacccaagaccagcagcaagtggagcgcccccggcagcgccccccagctgaccaccgccatcctggagatcaaggagagcatcctgagcctgctgatcaagctgcaccacaagctgagcggcaagcagaacagctactaccccccctggctggacgacatcgagatcctgatccagcccgagatccccaagtacagccacggcgacggcatcaccgccgtggagagaatcctgctgaaggccgccagccagagcagaatgaacaagagaatcatcgaggagatctgcagaaaggtgaccccccccgtgccccccaagaaggtgaccgccgccgagaagaagaccctggacaaggaggagagaagacagaaggccagagagagacagcagaagctgctggccgagttcgccagcagacagaagagcttcatggagaccgccatggacgtggacagccccgagaacgacatccccatggagatcaccaccgccgagccccaggtgagcgaggccgtgtacgactgcgtgatctgcggccagagcggccccagcagcgaggacagacccaccggcctggtggtgctgctgcaggccagcagcgtgctgggccagtgcagagacaacgtggagcccaagaagctgcccatcagcgaggaggagcagatctacccctgggacacctgcgccgccgtgcacgacgtgagactgagcctgctgcagagatacttcaaggacagcagctgcctgctggccgtgagcatcggctgggagggcggcgtgtacgtgcagacctgcggccacaccctgcacatcgactgccacaagagctacatggagagcctgagaaacgaccaggtgctgcagggcttcagcgtggacaagggcgagttcacctgccccctgtgcagacagttcgccaacagcgtgctgccctgctaccccggcagcaacgtggagaacaacccctggcagagacccagcaacaagagcatccaggacctgatcaaggaggtggaggagctgcagggcagacccggcgccttccccagcgagaccaacctgagcaaggagatggagagcgtgatgaaggacatcaagaacaccacccagaagaagtacagagactacagcaagacccccggcagccccgacaacgacttcctgttcatgtacagcgtggccagaaccaacctggagctggagctgatccacagaggcggcaacctgtgcagcggcggcgccagcaccgccggcaagagaagctgcctgaaccagctgttccacgtgctggccctgcacatgagactgtacagcatcgacagcgagtacaacccctggagaaagctgacccagctggaggagatgaacccccagctgggctacgaggagcagcagcccgaggtgcccatcctgtaccacgacgtgaccagcctgctgctgatccagatcctgatgatgccccagcccctgagaaaggaccacttcacctgcatcgtgaaggtgctgttcaccctgctgtacacccaggccctggccgccctgagcgtgaagtgcagcgaggaggacagaagcgcctggaagcacgccggcgccctgaagaagagcacctgcgacgccgagaagagctacgaggtgctgctgagcttcgtgatcagcgagctgttcaagggcaagctgtaccacgaggagggcacccaggagtgcgccatggtgaaccccatcgcctggagccccgagagcatggagaagtgcctgcaggacttctgcctgcccttcctgagaatcaccagcctgctgcagcaccacctgttcggcgaggacctgcccagctgccaggaggaggaggagttcagcgtgctggccagctgcctgggcctgctgcccaccttctaccagaccgagcaccccttcatcagcgccagctgcctggactggcccgtgcccgccttcgacatcatcacccagtggtgcttcgagatcaagagcttcaccgagagacacgccgagcagggcaaggccctgctgatccaggagagcaagtggaagctgccccacctgctgcagctgcccgagaactacaacaccatcttccagtactaccacagaaagacctgcagcgtgtgcaccaaggtgcccaaggaccccgccgtgtgcctggtgtgcggcaccttcgtgtgcctgaagggcctgtgctgcaagcagcagagctactgcgagtgcgtgctgcacagccagaactgcggcgccggcaccggcatcttcctgctgatcaacgccagcgtgatcatcatcatcagaggccacagattctgcctgtggggcagcgtgtacctggacgcccacggcgaggaggacagagacctgagaagaggcaagcccctgtacatctgcaaggagagatacaaggtgctggagcagcagtggatcagccacaccttcgaccacatcaacaagagatggggcccccactacaacggcctgtag

SEQ ID NO: 247942 - DNA, 5754 bp, Artificial Sequence
  derived and/or modified sequence
atggccgccgccgccgccgccgccgtgggcggccagcagcccagccagcccgagctgcccgcccccggcctggccctggacaaggccgccaccgccgcccacctgaaggccgccctgagcagacccgacaacagagccggcgccgaggagctgcaggccctgctggagagagtgctgagcgccgagagacccctggccgccgccgccggcggcgaggacgccgccgccgccggcggcggcggcggccccggcgccgccgaggaggaggccctggagtggtgcaagtgcctgctggccggcggcggcggctacgacgagttctgcgccgccgtgagagcctacgaccccgccgccctgtgcggcctggtgtggaccgccaacttcgtggcctacagatgcagaacctgcggcatcagcccctgcatgagcctgtgcgccgagtgcttccaccagggcgaccacaccggccacgacttcaacatgttcagaagccaggccggcggcgcctgcgactgcggcgacagcaacgtgatgagagagagcggcttctgcaagagacaccagatcaagagcagcagcaacatcccctgcgtgcccaaggacctgctgatgatgagcgagttcgtgctgcccagattcatcttctgcctgatccagtacctgagagagggctacaacgagcccgccgccgacggccccagcgagaaggacctgaacaaggtgctgcagctgctggagccccagatcagcttcctggaggacctgaccaagatgggcggcgccatgagaagcgtgctgacccaggtgctgaccaaccagcagaactacaaggacctgaccagcggcctgggcgagaacgcctgcgtgaagaagagccacgagaagtacctgatcgccctgaagagcagcggcctgacctaccccgaggacaagctggtgtacggcgtgcaggagcccagcgccggcaccagcagcctggccgtgcagggcttcatcggcgccaccggcaccctgggccaggtggacagcagcgacgaggacgaccaggacggcagccagggcctgggcaagagaaagagagtgaagctgagcagcggcaccaaggaccagagcatcatggacgtgctgaagcacaagagcttcctggaggagctgctgttctggaccatcaagtacgagttcccccagaagatggtgaccttcctgctgaacatgctgcccgaccaggagtacaaggtggccttcaccaagaccttcgtgcagcactacgccttcatcatgaagaccctgaagaagagccacgagagcgacaccatgagcaacagaatcgtgcacatcagcgtgcagctgttcagcaacgaggagctggccagacaggtgaccgaggagtgccagctgctggacatcatggtgaccgtgctgctgtacatgatggagagctgcctgatcaagagcgagctgcaggacgaggagaacagcctgcacgtggtggtgaactgcggcgaggccctgctgaagaacaacacctactggcccctggtgagcgacttcatcaacatcctgagccaccagagcgtggccaagagattcctggaggaccacggcctgctggtgacctggatgaacttcgtgagcttcttccagggcatgaacctgaacaagagagagctgaacgagcacgtggagttcgagagccagacctactacgccgccttcgccgccgagctggaggcctgcgcccagcccatgtggggcctgctgagccactgcaaggtgagagagacccaggagtacaccagaaacgtggtgagatactgcctggaggccctgcaggactggttcgacgccatcaacttcgtggacgagcccgcccccaaccaggtgaccttccacctgcccctgcacagatactacgccatgttcctgagcaaggccgtgaagtgccaggagctggacctggacagcgtgctgcccgaccaggagatgctgatgaagctgatgatccaccccctgcagatccaggccagcctggccgagatccacagcaacatgtgggtgagaaacggcctgcagatcaagggccaggccatgacctacgtgcagagccacttctgcaacagcatgatcgaccccgacatctacctgctgcaggtgtgcgccagcagactggaccccgactacttcatcagcagcgtgttcgagagattcaaggtggtggacctgctgaccatggccagccagcaccagaacaccgtgctggacgccgagcacgagagaagcatgctggagggcgccctgaccttcctggtgatcctgctgagcctgagactgcacctgggcatgagcgacgacgagatcctgagagccgagatggtggcccagctgtgcatgaacgacagaacccacagcagcctgctggacctgatccccgagaaccccaaccccaagagcggcatcatccccggcagctacagcttcgagagcgtgctgagcgccgtggccgacttcaaggcccccgtgttcgagcccggcggcagcatgcagcagggcatgtacacccccaaggccgaggtgtgggaccaggagttcgaccccgtgatggtgatcctgagaaccgtgtacagaagagacgtgcagagcgccatggacagatacaccgccttcctgaagcagagcggcaagttccccggcaacccctggcccccctacaagaagagaaccagcctgcaccccagctacaagggcctgatgagactgctgcactgcaagaccctgcacatcgtgctgttcaccctgctgtacaagatcctgatggaccaccagaacctgagcgagcacgtgctgtgcatggtgctgtacctgatcgagctgggcctggagaacagcgccgaggaggagagcgacgaggaggccagcgtgggcggccccgagagatgccacgacagctggttccccggcagcaacctggtgagcaacatgagacacttcatcaactacgtgagagtgagagtgcccgagaccgcccccgaggtgaagagagacagccccgccagcaccagcagcgacaacctgggcagcctgcagaacagcggcaccgcccaggtgttcagcctggtggccgagagaagaaagaagttccaggagatcatcaacagaagcagcagcgaggccaaccaggtggtgagacccaagaccagcagcaagtggagcgcccccggcagcgccccccagctgaccaccgccatcctggagatcaaggagagcatcctgagcctgctgatcaagctgcaccacaagctgagcggcaagcagaacagctactaccccccctggctggacgacatcgagatcctgatccagcccgagatccccaagtacagccacggcgacggcatcaccgccgtggagagaatcctgctgaaggccgccagccagagcagaatgaacaagagaatcatcgaggagatctgcagaaaggtgaccccccccgtgccccccaagaaggtgaccgccgccgagaagaagaccctggacaaggaggagagaagacagaaggccagagagagacagcagaagctgctggccgagttcgccagcagacagaagagcttcatggagaccgccatggacgtggacagccccgagaacgacatccccatggagatcaccaccgccgagccccaggtgagcgaggccgtgtacgactgcgtgatctgcggccagagcggccccagcagcgaggacagacccaccggcctggtggtgctgctgcaggccagcagcgtgctgggccagtgcagagacaacgtggagcccaagaagctgcccatcagcgaggaggagcagatctacccctgggacacctgcgccgccgtgcacgacgtgagactgagcctgctgcagagatacttcaaggacagcagctgcctgctggccgtgagcatcggctgggagggcggcgtgtacgtgcagacctgcggccacaccctgcacatcgactgccacaagagctacatggagagcctgagaaacgaccaggtgctgcagggcttcagcgtggacaagggcgagttcacctgccccctgtgcagacagttcgccaacagcgtgctgccctgctaccccggcagcaacgtggagaacaacccctggcagagacccagcaacaagagcatccaggacctgatcaaggaggtggaggagctgcagggcagacccggcgccttccccagcgagaccaacctgagcaaggagatggagagcgtgatgaaggacatcaagaacaccacccagaagaagtacagagactacagcaagacccccggcagccccgacaacgacttcctgttcatgtacagcgtggccagaaccaacctggagctggagctgatccacagaggcggcaacctgtgcagcggcggcgccagcaccgccggcaagagaagctgcctgaacttctgcttcatcatcttccccttcaccaagagcgagatcatcctgtgccagtacagaaagagccacgacaaggtgtaccccaagtaccagctgttccacgtgctggccctgcacatgagactgtacagcatcgacagcgagtacaacccctggagaaagctgacccagctggaggagatgaacccccagctgggctacgaggagcagcagcccgaggtgcccatcctgtaccacgacgtgaccagcctgctgctgatccagatcctgatgatgccccagcccctgagaaaggaccacttcacctgcatcgtgaaggtgctgttcaccctgctgtacacccaggccctggccgccctgagcgtgaagtgcagcgaggaggacagaagcgcctggaagcacgccggcgccctgaagaagagcacctgcgacgccgagaagagctacgaggtgctgctgagcttcgtgatcagcgagctgttcaagggcaagctgtaccacgaggagggcacccaggagtgcgccatggtgaaccccatcgcctggagccccgagagcatggagaagtgcctgcaggacttctgcctgcccttcctgagaatcaccagcctgctgcagcaccacctgttcggcgaggacctgcccagctgccaggaggaggaggagttcagcgtgctggccagctgcctgggcctgctgcccaccttctaccagaccgagcaccccttcatcagcgccagctgcctggactggcccgtgcccgccttcgacatcatcacccagtggtgcttcgagatcaagagcttcaccgagagacacgccgagcagggcaaggccctgctgatccaggagagcaagtggaagctgccccacctgctgcagctgcccgagaactacaacaccatcttccagtactaccacagaaagacctgcagcgtgtgcaccaaggtgcccaaggaccccgccgtgtgcctggtgtgcggcaccttcgtgtgcctgaagggcctgtgctgcaagcagcagagctactgcgagtgcgtgctgcacagccagaactgcggcgccggcaccggcatcttcctgctgatcaacgccagcgtgatcatcatcatcagaggccacagattctgcctgtggggcagcgtgtacctggacgcccacggcgaggaggacagagacctgagaagaggcaagcccctgtacatctgcaaggagagatacaaggtgctggagcagcagtggatcagccacaccttcgaccacatcaacaagagatggggcccccactacaacggcctgtag

SEQ ID NO: 247943 - DNA, 5667 bp, Artificial Sequence
  derived and/or modified sequence
atggccgcggctgctgcagcagccgtgggcggccagcagccatcacagcctgagcttcctgcccccgggcttgcactggacaaagcagctacggctgctcatctcaaggcggctcttagccgccccgacaatcgggcaggggcagaagagctgcaggcgctccttgagagggtcctcagtgcagaacggccattggctgccgcagcaggtggcgaggacgctgctgctgccggagggggcggggggcccggcgctgcggaggaagaggctctggagtggtgcaaatgcctgctggcaggtggcggcggatacgatgaattttgtgccgccgtcagggcttacgatccagcagccctgtgcggactggtctggaccgcaaacttcgtggcataccgctgtcggacatgcggaatttccccttgtatgagtctgtgcgcagaatgctttcatcagggagaccacacgggacacgacttcaatatgttcagaagccaagcgggaggagcctgtgactgcggtgacagcaacgtaatgagggaatccggattttgtaagcgccatcagataaaatcttcctccaatatcccttgcgtgcctaaagacctgctgatgatgtcggagttcgtattgccaagatttatcttctgtcttatccaatacctgcgcgagggttataatgagcctgctgccgatgggcccagcgaaaaagatcttaataaggtgctgcaactcttggagcctcagatctcgtttctggaagatttgaccaagatgggtggcgccatgcggtccgtcctgacgcaggttctgacgaatcagcagaactacaaagacctgactagtggcctgggtgagaacgcatgtgtgaagaagtctcatgagaagtacctgatagccctcaaatccagcggtctgacttaccctgaggataaacttgtttatggtgtgcaggaaccctccgcgggaacatcttccctggccgtgcagggcttcataggagccacgggcacactggggcaggtggatagttctgatgaggatgatcaggacggaagtcagggcctaggcaaaagaaaaagagttaagctttcatctggaaccaaagatcagagtataatggacgtgctcaagcacaagagttttctcgaggaactgctcttctggacaattaaatacgagtttccccagaagatggtcactttcctgctgaatatgctcccagatcaggagtacaaggtcgcatttaccaaaacgttcgtccagcactatgccttcattatgaagaccctgaagaaatctcatgaatcagacacaatgagcaaccgcattgttcacatcagtgtgcagttgttctcaaatgaagagttggctagacaagttaccgaagaatgccagttgctggatatcatggtcaccgtgctgctctacatgatggagtcctgcttaataaagtcagaattgcaagacgaggagaattctcttcatgtggtagtgaattgcggcgaggcactgctgaagaataacacctactggcccctggtgtccgacttcattaacatcctttcccaccaatctgtcgctaaaaggttccttgaggatcacggtctgctcgtaacatggatgaactttgtgtcattctttcaggggatgaatctgaacaagagggaactgaacgagcacgtggaatttgaaagccagacttactatgccgcatttgcagctgagctggaagcttgcgcccagccgatgtggggcctgctatcacactgcaaagtgcgggaaactcaggaatatacacgcaatgtcgtacgatactgcttagaagctctgcaggattggtttgacgccatcaactttgtggacgaacctgcgcccaatcaggtgacgttccaccttcccctgcacagatactatgccatgttcctgtccaaggccgtcaagtgccaggagctcgatctagactctgtgctaccagaccaggagatgctgatgaagcttatgatccatcccctacagattcaagcctcccttgcagagattcattcgaacatgtgggtccgcaatggactgcaaattaaagggcaagctatgacttacgtgcagtcccatttttgcaactccatgatcgatcccgatatctatctactccaggtgtgcgcttcgcgattagatccagactattttataagctccgtgttcgaaaggtttaaggtagttgatctgctgaccatggcctcccaacatcagaataccgttctggacgccgaacacgagagaagcatgctggaaggtgccctgaccttccttgtgattttgttatcgctgaggctgcacttaggaatgtccgacgacgaaattttgagggctgaaatggtcgctcagttatgtatgaatgatagaactcattcgtctctgctcgatttgatccctgagaatccaaatccaaagtccgggatcatcccgggctcttattcctttgagagcgtgctgtccgcggttgcggactttaaagcaccagtgttcgagcccggtggctccatgcagcaggggatgtacactcctaaagcagaggtgtgggatcaggagtttgatccagttatggtaattttgaggactgtctaccgacgagacgtgcagtcagccatggaccgttacactgcctttctcaagcaatctggaaagtttcccggcaatccatggcctccatacaaaaaacggacctcattacatccaagttataagggcctcatgcgcctcctgcactgtaaaacgctacatatcgtgctcttcaccctattgtacaaaattctgatggaccaccagaacttgtcagagcatgtgctgtgcatggtgctgtacctgatcgaattagggctggagaattcggccgaagaagagagtgacgaggaggccagtgtgggtggacccgaacgctgccacgattcgtggtttcccggcagtaacctggtgagtaatatgcggcactttataaactatgtgcgggttagagtaccagaaaccgctccggaagtgaagagggatagtcctgcatctacttcttctgacaacctgggctccctccagaattccggcaccgcccaagtttttagcctggttgccgaaagacggaaaaagttccaggaaatcattaatcgttctagcagcgaagccaatcaggttgtgagacccaaaacctcatcaaaatggtccgctcccgggagcgccccccaactaactaccgcgattcttgagatcaaggagtctatcttgtctttgctgatcaaactgcaccataaactgagcggaaaacaaaactcttactatccgccctggctggatgacatcgagattcttatccaacccgagatccctaaatattctcacggcgatggcatcaccgcagtcgagcggatcctcctcaaggcggccagccagagtagaatgaacaagcgtattatagaggaaatttgccgaaaggttaccccaccagtcccaccaaaaaaagtcacagcagccgagaagaaaaccctcgataaagaagaaaggcgtcagaaggcccgcgaacgtcagcagaagttgcttgcggagtttgcctctaggcaaaagagcttcatggaaacagccatggacgttgacagcccggagaacgacattcccatggaaattacaacggctgagccgcaggtgtccgaggccgtatacgactgtgtgatctgtggccagtctgggccctcgtcggaagatcgcccaactggccttgtggtgctgctgcaggcctcctcggttttggggcaatgccgcgataacgttgagccaaaaaagctgcctatcagcgaagaagaacagatctacccatgggatacttgtgccgccgtgcacgacgtccggttatcccttttgcaaagatactttaaggactcttcttgcctcctcgcggtctctatcggttgggaaggtggagtctacgtgcagacttgtggtcatacccttcatatcgattgccataagtcctacatggaaagccttcgtaacgaccaggtgttgcagggatttagcgtcgataaaggggagttcacttgccctctgtgcaggcagttcgcgaacagtgtgctcccttgctatcccggatctaatgttgaaaataacccatggcagaggccatccaacaaatctatccaggacctaataaaagaagttgaagaactgcagggacgaccgggcgcattccccagcgagacaaacctgtccaaggagatggagtctgtgatgaaagacatcaaaaacacgacccaaaagaagtatcgagattactctaagaccccaggttccccggacaacgatttcctctttatgtactcagttgccaggactaacctcgagctggaacttatacataggggaggcaatctgtgttccggtggagccagcaccgccggtaaaagatcctgtttgaatcagcttttccacgtgctggctcttcacatgcgactgtatagcatcgacagcgagtataacccatggagaaagctgacgcagcttgaggaaatgaacccacagctgggctatgaggagcagcagcccgaggttcctattctttaccacgacgtgacaagtctactgctcattcagatcttgatgatgccccaacccctgcgcaaggaccacttcacttgtattgttaaagtcctttttacactcctttacacccaagccctcgcagcactttccgtgaagtgtagtgaggaagatagaagcgcctggaaacacgccggagcattgaaaaagtctacatgcgacgccgagaagagttatgaggtgctgttgagcttcgtcattagtgagctctttaaaggcaaactctaccacgaggagggtacccaggagtgtgcgatggtcaatcctattgcttggagtcccgagtccatggaaaagtgcctgcaagacttttgtctcccttttttacggatcaccagccttctgcagcatcacttgttcggtgaggacctcccctcctgtcaggaggaggaagagttctctgtactggcaagttgtctcggattgctgcccactttctaccagacagaacaccctttcatctccgcgagctgtcttgattggccggttcccgcctttgacatcatcactcagtggtgttttgaaatcaagtctttcactgagcgtcatgcagagcagggcaaggccctgctgattcaggagagcaaatggaagctaccccaccttcttcagctgccggaaaactacaatacaatattccagtattaccataggaaaacttgttccgtgtgtactaaagtccccaaggacccagcggtttgccttgtgtgcggaaccttcgtatgtcttaagggcttatgttgcaaacagcagagttattgcgagtgtgtccttcatagccaaaactgtggagcgggcaccggtatatttttactgatcaatgcttcagtcatcatcatcatcaggggccataggttttgcctgtggggctccgtctatctggatgcccacggcgaagaggaccgggatctgcgcagaggaaaaccgctttatatatgtaaggagaggtacaaggtgttggaacagcaatggatctctcatacttttgaccacataaacaagcggtgggggcctcactataacggcctctag

SEQ ID NO: 247944 - DNA, 5667 bp, Artificial Sequence
  derived and/or modified sequence
atggctgctgccgctgctgccgctgtgggcggccagcagccaagccagcccgagctcccggccccaggactggccctagacaaagccgctaccgcggctcacctcaaggcggccctgtcacgccctgataacagggccggggcggaggaactgcaagccttattggagagagtcttaagcgcggaacgtccactggctgcagcggctgggggcgaagatgcagcagcagccggaggtgggggcggccccggagctgccgaggaggaagcgctggagtggtgtaagtgcctgttggccggaggagggggatatgatgagttctgcgctgccgttcgcgcatatgatcctgctgccctgtgcggtctagtgtggaccgcaaacttcgtagcctacaggtgccgaacctgtggaatcagcccttgcatgtcactttgcgccgaatgtttccaccagggagaccacacagggcatgactttaatatgtttcgctcccaagccggtggagcttgcgactgtggtgatagcaatgttatgcgggagtctggtttttgtaagaggcaccaaatcaagtctagctctaatatcccctgcgtccctaaagacctgttgatgatgtccgagtttgtgctgccgcgcttcattttctgtctcatccagtacctgagagagggatacaatgagcctgccgcagatggcccaagtgaaaaggatttgaataaagtccttcagcttttggagcctcaaatcagctttcttgaggacctcacaaaaatgggtggtgccatgagatctgttctgactcaggtgctgaccaaccagcagaactacaaggatttgacctctggcctcggtgaaaatgcttgtgtaaagaaaagtcacgagaagtacctgatagcactgaagtccagtggactgacctatccggaagataaactcgtgtatggcgttcaggagccttccgccggtactagcagtttagcagtccagggatttatcggagcgaccgggactctagggcaggtagactcaagtgacgaagacgaccaggacgggtctcagggtttaggcaaaaggaagcgcgtgaagcttagctccggaactaaagatcagagcatcatggacgtgctcaaacataagagttttctcgaggaactgctgttctggacgatcaagtacgaattcccgcagaagatggtgacctttttgctgaacatgctgcctgatcaggaatacaaagtggcattcacaaaaaccttcgttcagcattatgcgttcattatgaaaactttaaagaaatcacacgagtctgataccatgtccaataggattgtgcatattagcgtgcagttgttctctaatgaggagctcgcaaggcaagtgaccgaggaatgtcagctcctggatatcatggtcaccgtgctactctacatgatggaaagttgcctgattaagagcgaactacaggacgaggagaattctctccacgttgtggtgaactgcggcgaggctctcctgaagaacaacacttattggcctcttgttagcgacttcattaatattctgtcccatcagagtgtcgccaagagatttttggaagatcacggtctcttggtcacttggatgaatttcgtgagcttctttcaaggaatgaatctcaacaagcgggaattgaatgaacatgtcgaattcgaatctcagacatattacgcggcgtttgcagccgagctagaagcgtgcgctcagcccatgtggggcttactctcacattgcaaggttcgcgagacacaggagtatactcgcaacgtggttcggtactgtctggaagccttacaggactggttcgatgccatcaacttcgtggatgaacctgctcccaaccaggtgacattccacttgccacttcacagatactacgccatgttcctgagcaaggccgtcaaatgtcaagaactcgacctcgactccgtgttgccggatcaggaaatgctgatgaaactgatgattcacccactccagatccaagcatctctggccgagattcacagcaatatgtgggttaggaacgggcttcaaattaaagggcaggccatgacttacgtgcagtcacacttctgcaattccatgatcgacccagatatttatctgctccaggtgtgcgcctccaggctcgaccctgattactttatcagctccgtcttcgaacgctttaaagtagttgacctgctcaccatggcctcacagcatcagaataccgtgctagacgcggagcacgaaagatccatgctggaaggtgccttgacattcctagttattctcctgagtctgcgcctgcacttaggaatgtccgacgatgaaatcttgagggccgaaatggtcgcccagctgtgtatgaacgatcgtacccattcgagtctgctggatttaatccctgaaaacccaaaccccaagagcgggattatcccgggcagctacagcttcgaatcagtgctctccgcagttgccgactttaaagctcccgtctttgagcccggaggtagcatgcagcagggcatgtacacccccaaagccgaggtgtgggaccaagagtttgacccagtaatggtcatcctgcgcacagtctacaggcgcgacgtccagtccgccatggacaggtataccgccttccttaagcagagcggtaagtttcctggaaatccctggcctccatacaagaagcggaccagcctgcatccatcttataagggactgatgcgcctgctgcattgtaagaccctgcatattgtgctcttcactctactgtacaagattctgatggaccaccagaacctgtccgaacatgtcttatgtatggtcttgtacttgatcgagctcgggctggagaattcggctgaggaggagtccgacgaagaagcttctgtgggaggtccagagaggtgccacgacagctggttccctggatcaaacctggtcagtaatatgcgacacttcattaactacgtgagggtgcgggttcctgagactgctcctgaggtcaaaagggatagtcctgcctctacaagcagtgataacctggggagtttacaaaacagcggaactgcacaggtgttcagcttggttgcagagcggcgtaagaaattccaggaaatcataaaccggtcaagctccgaagctaaccaggtggtcaggcccaaaactagcagcaagtggtctgcccccgggtctgctcctcagctgactacggccatacttgagatcaaggaatcaattttgagtctcctcatcaagttgcaccacaagttatctgggaagcagaactcttattacccaccttggctggacgacatcgagatcttaatccagcccgagattcccaagtacagccatggtgacgggattactgccgtggagcgcatcctccttaaggctgcatcgcagtcccgtatgaataagcggatcatcgaggagatttgtcggaaggtgacaccccccgttccccctaaaaaagtgacggcagctgaaaaaaagactctcgacaaggaggagaggcgccagaaagccagagagcgccagcagaagctcttagccgaattcgctagcagacagaagtcattcatggaaaccgccatggatgtcgactctccagagaacgacattcctatggagatcaccactgcagaacctcaagtttccgaggccgtttatgattgcgtgatctgtggccagagcggcccttcctccgaggatcgacctaccgggttggtggttctgctgcaggcttcatcagttttggggcagtgtagagataatgtggagcctaagaaattacccatttcagaggaagagcagatttacccttgggatacctgcgccgccgtgcatgacgtgaggctctccctcttacaaagatatttcaaagattcctcctgtctgcttgccgtgagtattggctgggaaggtggcgtctacgtccagacgtgtggacacacactgcacatcgattgccacaagtcatatatggagtccctaagaaacgatcaggttctacagggcttttcagttgacaagggcgagttcacatgccccctttgccgacagttcgctaactctgtcctgccttgttaccccggatctaacgtggaaaataatccctggcagaggccatcaaataaaagcattcaggatctcattaaggaagtggaagagctgcagggcagacctggagctttcccttccgaaacaaacctctcaaaggaaatggaatccgtgatgaaggacattaaaaataccacgcagaagaagtatagggattacagcaaaaccccaggctcacctgataatgactttctgttcatgtattcggtggcccgtacgaatctggagctagagttgatacatagggggggcaatctgtgttctggcggcgcctccactgctgggaagcggtcatgcctgaatcagctgttccatgtgctcgccctgcacatgcggttgtacagtatcgacagtgagtacaacccctggaggaaactgactcagctggaggaaatgaaccctcagctcggctacgaggaacagcaaccagaggtcccaatcctgtaccatgatgttacaagtttgctgctgatccagatcctgatgatgccacaacctctcagaaaagaccacttcacctgtattgtaaaagttttgttcaccttgctgtatactcaggccttggccgctctgtcggtgaaatgctctgaagaggatagatcagcatggaaacatgccggtgcactgaagaaaagcacctgcgatgccgaaaagtcatatgaggtgctacttagttttgtaatctccgagttgtttaagggtaagctgtaccacgaagaggggacccaggagtgcgccatggtgaatccaatcgcgtggtcgccagaaagcatggaaaaatgcctgcaggatttctgtttgccctttctgcggatcaccagtctgctccagcatcatctgtttggcgaagacctcccttcctgccaggaagaagaagagttttccgtcttagcgagttgtctcggtctgctccctaccttctaccaaactgagcacccatttattagcgcatcctgtttagattggcccgtgccggctttcgacatcattacacaatggtgctttgagattaaaagcttcaccgaaaggcacgcagaacagggcaaagccctgctcattcaggaaagcaagtggaaacttccccacctgctgcagctgcctgagaattataatacaattttccagtactaccaccggaaaacatgttcagtgtgtaccaaagtgccaaaggatcctgcagtttgcctggtttgcgggacctttgtttgcctcaaagggctctgttgcaagcagcaaagctactgcgagtgcgtcctccacagtcaaaattgcggtgccggaacaggaatcttcctgttaatcaatgccagtgttatcatcattattcgggggcaccgcttctgcctatgggggagcgtgtacctggatgctcacggtgaggaggaccgggatctgcgcagggggaaacctctgtacatatgcaaagagcgatacaaggtattggagcaacaatggatctcacacacgtttgatcatataaacaaacgctgggggcctcattataatggcttgtag

SEQ ID NO: 247945 - DNA, 5754 bp, Artificial Sequence
  derived and/or modified sequence
atggctgccgccgccgctgccgctgtgggtgggcagcaaccctcccaacctgagctgccagcacccggactcgcactcgacaaggcagcaaccgcagcccaccttaaagctgcactgagcaggccagacaaccgagctggcgcagaggagttacaagcgctcctggaacgtgtgctctcagcagagaggcctctggctgccgccgctgggggagaagacgcagcagctgcaggagggggcggcggacccggggcggcggaagaagaggcactagaatggtgcaagtgccttctggccggaggcggcggctatgatgaattttgtgccgctgtgagagcctatgatccagcggccttatgcggactcgtgtggactgcaaacttcgtcgcatacaggtgtcggacctgcgggatctctccctgcatgagcttatgtgccgaatgttttcaccaaggcgatcatacaggccatgacttcaatatgtttcggagccaggccgggggtgcgtgtgactgcggagactccaatgtcatgcgcgagtcgggcttttgcaagagacaccagataaaaagcagttcaaacataccctgtgttccgaaagacctcctaatgatgtctgaatttgttttgccacggtttatcttttgtctaatccaatacctgcgagagggatataatgaacctgctgctgatggcccctccgagaaagacctgaataaggtactgcagctcttggagcctcagatcagttttctggaggacctgacaaaaatgggcggcgccatgagatctgtgctgacgcaagtcctaacaaaccagcagaattataaggatctgacatcaggactgggtgaaaatgcctgcgtgaaaaaaagccatgagaaatatctcatagccctcaaatcctccggcctgacatacccggaggataaactggtgtacggcgtacaggaacccagtgctgggacaagcagcctcgctgtgcagggctttattggcgccaccggtacattgggccaggtcgatagtagcgatgaggatgaccaggatggttcccagggactcggtaagcgcaagcgggttaaactgtcctccggcacaaaggaccaaagtattatggacgtgctaaaacataaatcttttctggaggagcttctgttctggactattaagtacgaatttcctcagaaaatggtgaccttcctccttaacatgctccccgatcaggaatataaggtcgcctttaccaagacgtttgttcagcactatgcatttattatgaaaacattaaaaaaaagccacgagagcgacaccatgtccaatcgtatcgtacatatcagcgtccagcttttcagcaacgaggagttggctcgtcaggttacagaagagtgtcaactacttgacataatggtcacggtgctcctgtatatgatggaatcctgtctgatcaagagcgaattgcaggacgaggagaacagcctgcatgtggtagtgaactgtggcgaggcgttactgaagaacaacacatactggccgctggtttccgatttcatcaacatactgtctcaccagtctgttgcaaaaaggtttctggaggaccatgggctgttggttacttggatgaacttcgtctctttttttcagggtatgaatctgaacaagagagaactgaacgaacatgtcgaatttgaatcacagacttactatgccgccttcgctgccgagctggaagcctgtgcccagcccatgtggggactcctaagtcactgtaaggtgcgggaaactcaggagtacaccagaaatgttgtgcgctactgtctggaagctctgcaggactggtttgatgccatcaacttcgttgatgaaccagcacccaaccaggtcactttccacctgcctcttcataggtactacgccatgtttctgagtaaagcagtgaaatgccaggagttggacctcgatagtgttctgccggaccaggagatgttgatgaagttgatgatccatcccttacagattcaagcctcactggcggagatccactccaacatgtgggtaagaaatggattgcagatcaaggggcaggccatgacttatgttcagagtcacttttgtaactctatgattgatccggacatctacctcttgcaagtctgcgcatctcgcctggatccggactactttatctcttctgtctttgagcgattcaaggtggtcgatctgcttacgatggcctcccagcaccagaatacagtgttggacgctgaacacgaacgcagtatgctggaaggtgccctgacctttctcgtcattttactgtccctgaggctccatctgggcatgtctgacgatgagatattaagagccgaaatggtggcccagctgtgcatgaacgaccgcactcatagctccctactggatctaatccccgaaaaccccaaccctaagagcggcataattcccggcagctattccttcgagagcgtcctcagtgcagtcgcagattttaaggctcctgtattcgaacctggcggctcaatgcagcagggaatgtatacgcctaaggcggaggtgtgggaccaggagttcgaccctgtcatggtcatcctgcgcactgtctatcgtcgagacgtacagtccgccatggatagatacaccgcatttttaaagcagagtgggaagttccccggaaatccctggcccccatataaaaagaggacaagcttgcaccctagttacaaggggctgatgaggctgctccattgcaagactctgcacatcgtcctcttcaccctgctgtataagatcctaatggatcaccagaacctgtctgaacatgtattgtgcatggtcctctatcttattgagctcggcctcgagaattcagcagaagaggaatctgacgaggaggcaagcgtgggcgggccggagagatgtcatgacagctggtttccaggatccaatctcgtgagtaacatgcgccattttatcaactacgtcagggtgcgggttcctgagacggccccagaagttaagcgagattcccccgcgtctaccagttccgacaaccttgggtccttacagaacagcgggactgcccaggtattttcgctggtcgcggaaaggaggaaaaaatttcaggaaatcatcaatagatcttcgtctgaggctaaccaagtggtcaggcctaagacctcgagtaagtggtccgctcccggtagcgccccccaacttaccactgcaattttggagatcaaggaaagcattttgtccctgcttatcaagctgcaccacaaactgtcgggaaagcagaactcctattatcctccatggctcgatgatatcgagatccttatccagccggaaatcccaaaatatagccacggagatgggataacagccgtcgaacgcatactcctgaaagctgcttctcagtcgcgtatgaacaaaagaattatcgaggaaatctgtagaaaagtcacacccccagtgccccctaagaaggttaccgccgcagagaagaaaaccttggataaggaggaacgccgccagaaggcacgggaaaggcagcagaagcttctggccgaattcgccagtcggcagaaatctttcatggagactgctatggacgtggattccccagagaatgacataccaatggagattaccacggcggagccgcaggttagtgaggcggtgtatgactgcgtcatctgcggccagagcgggccctcgtccgaggaccggcccacgggcctcgtggtgttgctgcaagcaagcagtgttctgggccagtgtagggacaacgtcgaaccgaaaaaactgccaatttccgaggaagagcagatctacccatgggatacctgtgcggcagtccacgacgtacgcctgtccctgctccaaagatacttcaaggacagtagctgcttgttagcagtgagtattgggtgggaggggggcgtgtatgtgcagacatgtggtcacacactacacattgattgccacaagagctatatggagtcacttcgtaacgatcaggtgctccagggcttcagcgtagacaagggagaatttacttgcccactctgcaggcagtttgccaatagtgtccttccctgttatccaggcagcaatgtggaaaacaatccttggcagagaccctctaataagagtatccaggatctcatcaaggaggtcgaagagctccagggccgccccggggccttcccttccgaaaccaatttgtctaaagagatggagtcggtcatgaaggacatcaagaatacaacccaaaaaaagtatcgagactacagtaagacaccagggtcacccgacaacgacttcctgttcatgtacagcgttgcccgcacaaatctagaactggaattgatacaccggggaggaaacctctgttccggcggcgcaagcaccgctggtaagcgctcatgcttgaatttctgcttcattatctttccattcaccaaaagcgagattatcctgtgccagtaccgaaaatcccatgacaaggtgtatcccaagtaccaactcttccatgtgctggcactgcatatgcgactgtactccatagactctgagtacaacccatggagaaaactgactcagcttgaggaaatgaaccctcaactgggttacgaggaacaacaacccgaggtgcccatcttgtaccatgacgtgacgtctctcttgctgatccagattctcatgatgccacagccactgagaaaggaccattttacttgcatagtcaaagtgctgttcaccctcctgtatactcaggctttggccgctttgagtgttaagtgtagcgaggaagatcggagtgcttggaagcatgctggtgctctcaaaaaatctacctgcgatgcagagaaaagctatgaagtgctgcttagctttgttatctctgaactgttcaaaggaaagctataccacgaagagggaacccaggagtgcgctatggtcaacccaatcgcttggagtcccgaaagcatggagaaatgcttacaagatttttgcctgccgtttctcagaatcacttcactgttgcagcaccacctgtttggagaagatctcccctcctgtcaggaagaagaagagttcagcgtactcgcttcctgtctcggattactgcccactttttaccagaccgagcacccttttatcagcgcttcttgcctggactggccagtacctgccttcgatattattacccagtggtgttttgagatcaagtcatttacagagcgtcacgctgagcaaggaaaagccctgctgatccaagagtctaagtggaaactgccacacctgctgcaattgcccgaaaattataacaccatatttcagtactatcacaggaagacatgctctgtgtgtaccaaagtccctaaggatcccgctgtgtgccttgtgtgtggcactttcgtctgcttgaagggtctgtgctgcaagcagcagagctattgcgaatgcgttttgcacagtcagaattgtggcgccggaaccgggatttttcttctgatcaatgcatcggttataatcattatacggggtcaccgattttgcctgtggggcagcgtttacttggacgcgcacggggaagaggacagggatcttaggcgaggcaagcccctttatatttgcaaggagcgctataaggtgttagaacagcagtggatttcgcacaccttcgaccacatcaacaaacggtggggtcctcactataatggattgtag

SEQ ID NO: 247946 - DNA, 5667 bp, Artificial Sequence
  derived and/or modified sequence
atggctgctgctgctgctgctgctgtgggcggccagcagcccagccagcctgagctgcctgcccctggcctggccctggacaaggccgccacagctgcccacctgaaggccgccctgagcaggccagacaacagagctggagctgaggagctgcaggccctgctggagcgggtgctgtctgctgagcggcccctggccgctgctgctggaggagaagatgctgctgctgctgggggcggcggcggccctggagctgctgaggaggaggccctggagtggtgcaagtgcctgctggccggcggcggcggctatgatgagttctgtgccgctgtgcgggcctatgaccctgctgccctgtgtggcctggtgtggacagccaactttgtggcctaccgctgcaggacctgtggcatcagcccctgcatgagcctgtgtgccgagtgcttccaccagggcgaccacactggacatgacttcaacatgttccgcagccaggccggcggggcctgtgactgtggggacagcaatgtgatgagggagagcggcttctgcaagaggcaccagatcaagagcagcagcaacatcccctgtgtgcccaaggacctgctgatgatgtctgaatttgtgctgccccgcttcatcttctgcctgatccagtacctgcgggagggctacaatgaacctgctgctgatggccccagcgagaaggacctgaacaaggtgctgcagctgctggagccccagatctccttcctggaggacctgaccaagatgggcggggccatgaggtctgtgctgacccaggtgctgaccaaccagcagaactacaaggacctgaccagcggcctgggagaaaatgcctgtgtgaagaagagccatgagaagtacctgattgccctgaagagcagcggcctgacctacccagaggacaagctggtgtatggagtgcaggagcccagcgctggcaccagcagcctggccgtgcagggcttcatcggggccaccggcaccctgggccaggtggacagcagtgatgaagatgaccaggacggcagccagggcctgggcaagaggaagagggtgaagctgagcagcggcaccaaggaccagagcatcatggatgtgctgaagcacaagagcttcctggaggagctgctcttctggaccatcaagtatgagttcccccagaagatggtgaccttcctgctgaacatgctgcctgaccaggagtacaaggtggccttcaccaagacctttgtgcagcactacgccttcatcatgaagaccctgaagaagagccatgaaagtgacaccatgagcaacagaattgtgcacatctctgtgcagctgttcagcaatgaggagctggcccggcaggtgacagaggagtgccagctgctggacatcatggtgacagtgctgctgtacatgatggagagctgcctgatcaagtctgagctgcaggatgaggagaacagcctgcacgtggtggtgaactgtggggaggccctgctgaagaacaacacctactggcccctggtgtctgacttcatcaacatcctgagccaccagagcgtggccaagcgcttcctggaggaccacggcctgctggtgacctggatgaactttgtgtccttcttccagggcatgaacctgaacaagcgggagctgaatgagcacgtggagtttgagagccagacctactatgctgcctttgctgctgagctggaggcctgtgcccagcccatgtggggcctgctgagccactgcaaggtgcgggagacccaggagtacaccagaaatgtggtgcgctactgcctggaggccctgcaggactggtttgatgccatcaactttgtggatgagcccgcccccaaccaggtgaccttccacctgcccctgcaccgctactatgccatgttcctgagcaaggctgtgaagtgccaggagctggacctggacagcgtgctgcctgaccaggagatgctgatgaagctgatgatccaccccctgcagatccaggccagcctggccgagatccacagcaacatgtgggtgagaaatggcctgcagatcaagggccaggccatgacctacgtgcagagccacttctgcaacagcatgattgatcctgacatctacctgctgcaggtgtgtgccagccggctggaccctgactacttcatcagctctgtgtttgagcgcttcaaggtggtggacctgctgaccatggccagccagcaccagaacacagtgctggatgctgagcacgagaggtccatgctggagggcgccctgaccttcctggtgatcctgctgagcctgcggctgcacctgggcatgtctgatgatgagatcctgcgggcagagatggtggcccagctgtgcatgaatgacaggacccacagcagcctgctggacctgatccctgagaaccccaaccccaagagcggcatcatccctggcagctacagctttgagagcgtgctgtctgctgtggccgacttcaaggcccctgtgtttgagcccggcggctccatgcagcagggcatgtacacccccaaggccgaggtgtgggaccaggagtttgatcctgtgatggtgatcctgaggacagtgtacagaagagatgtgcagagcgccatggaccgctacacagccttcctgaagcagagcggcaagtttcctggcaacccctggccaccctacaagaagaggaccagcctgcaccccagctacaagggcctgatgaggctgctgcactgcaagaccctgcacatcgtgctcttcaccctgctgtacaagatcctgatggaccaccagaacctgtctgagcacgtgctgtgcatggtgctgtacctgattgagctgggcctggagaacagcgctgaggaggagagtgatgaggaggcctctgtgggcggccctgagcgctgccacgacagctggttccctggcagcaacctggtgagcaacatgaggcacttcatcaactacgtgcgggtgcgggtgcctgagacagcccctgaggtgaagagggacagccctgccagcaccagcagtgacaacctgggcagcctgcagaacagcggcacagcccaggtgttcagcctggtggccgagaggaggaagaagttccaggagatcatcaacagaagcagcagcgaggccaaccaggtggtgcggcccaagaccagcagcaagtggagcgcccctggcagcgccccccagctgaccacagccatcctggagatcaaggagagcatcctgagcctgctgatcaagctgcaccacaagctgagcggcaagcagaacagctactacccaccctggctggatgacatcgagatcctgatccagcctgagatccccaagtacagccatggagatggcatcacagctgtggagcgcatcctgctgaaggccgccagccagagcaggatgaacaagaggatcatcgaggagatctgcaggaaggtgaccccacctgtgccccccaagaaggtgacagctgctgagaagaagaccctggacaaggaggagcggcggcagaaggcccgggagcggcagcagaagctgctggccgagtttgccagccggcagaagagcttcatggagacagccatggatgtggacagcccagaaaatgacatccccatggagatcaccacagctgagccccaggtgtctgaggccgtgtatgactgtgtgatctgtggccagagcggccccagcagtgaagatcggcccaccggcctggtggtgctgctgcaggccagctctgtgctgggccagtgccgggacaacgtggagcccaagaagctgcccatcagcgaggaggagcagatctacccctgggacacctgtgccgctgtgcatgatgtgcggctgagcctgctgcagcgctacttcaaggacagcagctgcctgctggccgtgtccatcggctgggagggcggcgtgtatgtgcagacctgtggccacaccctgcacatcgactgccacaagagctacatggagagcctgagaaatgaccaggtgctgcagggcttctctgtggacaagggggagttcacctgccccctgtgccggcagtttgccaacagcgtgctgccctgctacccaggcagcaatgtggagaacaacccctggcagaggcccagcaacaagagcatccaggacctgatcaaggaggtggaggagctgcagggccggcctggggccttccccagcgagaccaacctgagcaaggagatggagagcgtgatgaaggacatcaagaacaccacccagaagaagtacagagactacagcaagaccccaggcagcccagacaatgacttcctgttcatgtacagcgtggcccggaccaacctggagctggagctgatccacagaggaggcaacctgtgcagcggcggggccagcacagctgggaagaggagctgcctgaaccagctgttccacgtgctggccctgcacatgaggctgtacagcattgacagcgagtacaacccctggaggaagctgacccagctggaggagatgaacccccagctgggctatgaggagcagcagcctgaggtgcccatcctgtaccatgatgtgaccagcctgctgctgatccagatcctgatgatgccccagcccctgaggaaggaccacttcacctgcatcgtgaaggtgctcttcaccctgctgtacacccaggccctggccgccctgtctgtgaagtgcagcgaggaggacagaagtgcctggaagcacgccggggccctgaagaagagcacctgtgatgctgagaagagctatgaggtgctgctgagctttgtgatcagcgagctgttcaagggcaagctgtaccacgaggagggcacccaggagtgtgccatggtgaaccccatcgcctggagccctgagagcatggagaagtgcctgcaggacttctgcctgcccttcctgcgcatcaccagcctgctgcagcaccacctgtttggagaggacctgcccagctgccaggaggaggaggagttctctgtgctggccagctgcctgggcctgctgcccaccttctaccagacagagcaccccttcatcagcgccagctgcctggactggcctgtgcctgcctttgacatcatcacccagtggtgctttgagatcaagagcttcacagaaagacatgctgagcagggcaaggccctgctgatccaggagagcaagtggaagctgccccacctgctgcagctgcctgagaactacaacaccatcttccagtactaccacaggaagacctgcagcgtgtgcaccaaggtgcccaaggaccctgctgtgtgcctggtgtgtggcacctttgtgtgcctgaagggcctgtgctgcaagcagcagagctactgtgaatgtgtgctgcacagccagaactgtggggccggcaccggcatcttcctgctgatcaatgccagcgtcatcatcatcatccggggccaccgcttctgcctgtggggctctgtgtacctggatgcccacggggaggaggaccgggacctgcggcggggcaagcccctgtacatctgcaaggagcgctacaaggtgctggagcagcagtggatcagccacacctttgaccacatcaacaagcgctggggcccccactacaacggcctgtag

SEQ ID NO: 247947 - DNA, 5754 bp, Artificial Sequence
  derived and/or modified sequence
atggctgctgctgctgctgctgctgtgggcggccagcagcccagccagcctgagctgcctgcccctggcctggccctggacaaggccgccacagctgcccacctgaaggccgccctgagcaggccagacaacagagctggagctgaggagctgcaggccctgctggagcgggtgctgtctgctgagcggcccctggccgctgctgctggaggagaagatgctgctgctgctgggggcggcggcggccctggagctgctgaggaggaggccctggagtggtgcaagtgcctgctggccggcggcggcggctatgatgagttctgtgccgctgtgcgggcctatgaccctgctgccctgtgtggcctggtgtggacagccaactttgtggcctaccgctgcaggacctgtggcatcagcccctgcatgagcctgtgtgccgagtgcttccaccagggcgaccacactggacatgacttcaacatgttccgcagccaggccggcggggcctgtgactgtggggacagcaatgtgatgagggagagcggcttctgcaagaggcaccagatcaagagcagcagcaacatcccctgtgtgcccaaggacctgctgatgatgtctgaatttgtgctgccccgcttcatcttctgcctgatccagtacctgcgggagggctacaatgaacctgctgctgatggccccagcgagaaggacctgaacaaggtgctgcagctgctggagccccagatctccttcctggaggacctgaccaagatgggcggggccatgaggtctgtgctgacccaggtgctgaccaaccagcagaactacaaggacctgaccagcggcctgggagaaaatgcctgtgtgaagaagagccatgagaagtacctgattgccctgaagagcagcggcctgacctacccagaggacaagctggtgtatggagtgcaggagcccagcgctggcaccagcagcctggccgtgcagggcttcatcggggccaccggcaccctgggccaggtggacagcagtgatgaagatgaccaggacggcagccagggcctgggcaagaggaagagggtgaagctgagcagcggcaccaaggaccagagcatcatggatgtgctgaagcacaagagcttcctggaggagctgctcttctggaccatcaagtatgagttcccccagaagatggtgaccttcctgctgaacatgctgcctgaccaggagtacaaggtggccttcaccaagacctttgtgcagcactacgccttcatcatgaagaccctgaagaagagccatgaaagtgacaccatgagcaacagaattgtgcacatctctgtgcagctgttcagcaatgaggagctggcccggcaggtgacagaggagtgccagctgctggacatcatggtgacagtgctgctgtacatgatggagagctgcctgatcaagtctgagctgcaggatgaggagaacagcctgcacgtggtggtgaactgtggggaggccctgctgaagaacaacacctactggcccctggtgtctgacttcatcaacatcctgagccaccagagcgtggccaagcgcttcctggaggaccacggcctgctggtgacctggatgaactttgtgtccttcttccagggcatgaacctgaacaagcgggagctgaatgagcacgtggagtttgagagccagacctactatgctgcctttgctgctgagctggaggcctgtgcccagcccatgtggggcctgctgagccactgcaaggtgcgggagacccaggagtacaccagaaatgtggtgcgctactgcctggaggccctgcaggactggtttgatgccatcaactttgtggatgagcccgcccccaaccaggtgaccttccacctgcccctgcaccgctactatgccatgttcctgagcaaggctgtgaagtgccaggagctggacctggacagcgtgctgcctgaccaggagatgctgatgaagctgatgatccaccccctgcagatccaggccagcctggccgagatccacagcaacatgtgggtgagaaatggcctgcagatcaagggccaggccatgacctacgtgcagagccacttctgcaacagcatgattgatcctgacatctacctgctgcaggtgtgtgccagccggctggaccctgactacttcatcagctctgtgtttgagcgcttcaaggtggtggacctgctgaccatggccagccagcaccagaacacagtgctggatgctgagcacgagaggtccatgctggagggcgccctgaccttcctggtgatcctgctgagcctgcggctgcacctgggcatgtctgatgatgagatcctgcgggcagagatggtggcccagctgtgcatgaatgacaggacccacagcagcctgctggacctgatccctgagaaccccaaccccaagagcggcatcatccctggcagctacagctttgagagcgtgctgtctgctgtggccgacttcaaggcccctgtgtttgagcccggcggctccatgcagcagggcatgtacacccccaaggccgaggtgtgggaccaggagtttgatcctgtgatggtgatcctgaggacagtgtacagaagagatgtgcagagcgccatggaccgctacacagccttcctgaagcagagcggcaagtttcctggcaacccctggccaccctacaagaagaggaccagcctgcaccccagctacaagggcctgatgaggctgctgcactgcaagaccctgcacatcgtgctcttcaccctgctgtacaagatcctgatggaccaccagaacctgtctgagcacgtgctgtgcatggtgctgtacctgattgagctgggcctggagaacagcgctgaggaggagagtgatgaggaggcctctgtgggcggccctgagcgctgccacgacagctggttccctggcagcaacctggtgagcaacatgaggcacttcatcaactacgtgcgggtgcgggtgcctgagacagcccctgaggtgaagagggacagccctgccagcaccagcagtgacaacctgggcagcctgcagaacagcggcacagcccaggtgttcagcctggtggccgagaggaggaagaagttccaggagatcatcaacagaagcagcagcgaggccaaccaggtggtgcggcccaagaccagcagcaagtggagcgcccctggcagcgccccccagctgaccacagccatcctggagatcaaggagagcatcctgagcctgctgatcaagctgcaccacaagctgagcggcaagcagaacagctactacccaccctggctggatgacatcgagatcctgatccagcctgagatccccaagtacagccatggagatggcatcacagctgtggagcgcatcctgctgaaggccgccagccagagcaggatgaacaagaggatcatcgaggagatctgcaggaaggtgaccccacctgtgccccccaagaaggtgacagctgctgagaagaagaccctggacaaggaggagcggcggcagaaggcccgggagcggcagcagaagctgctggccgagtttgccagccggcagaagagcttcatggagacagccatggatgtggacagcccagaaaatgacatccccatggagatcaccacagctgagccccaggtgtctgaggccgtgtatgactgtgtgatctgtggccagagcggccccagcagtgaagatcggcccaccggcctggtggtgctgctgcaggccagctctgtgctgggccagtgccgggacaacgtggagcccaagaagctgcccatcagcgaggaggagcagatctacccctgggacacctgtgccgctgtgcatgatgtgcggctgagcctgctgcagcgctacttcaaggacagcagctgcctgctggccgtgtccatcggctgggagggcggcgtgtatgtgcagacctgtggccacaccctgcacatcgactgccacaagagctacatggagagcctgagaaatgaccaggtgctgcagggcttctctgtggacaagggggagttcacctgccccctgtgccggcagtttgccaacagcgtgctgccctgctacccaggcagcaatgtggagaacaacccctggcagaggcccagcaacaagagcatccaggacctgatcaaggaggtggaggagctgcagggccggcctggggccttccccagcgagaccaacctgagcaaggagatggagagcgtgatgaaggacatcaagaacaccacccagaagaagtacagagactacagcaagaccccaggcagcccagacaatgacttcctgttcatgtacagcgtggcccggaccaacctggagctggagctgatccacagaggaggcaacctgtgcagcggcggggccagcacagctgggaagaggagctgcctgaacttctgcttcatcatcttccccttcaccaagtctgagatcatcctgtgccagtacaggaagagccatgacaaggtgtaccccaagtaccagctgttccacgtgctggccctgcacatgaggctgtacagcattgattctgagtacaacccctggaggaagctgacccagctggaggagatgaacccccagctgggctatgaggagcagcagcctgaggtgcccatcctgtaccatgatgtgaccagcctgctgctgatccagatcctgatgatgccccagcccctgaggaaggaccacttcacctgcatcgtgaaggtgctcttcaccctgctgtacacccaggccctggccgccctgtctgtgaagtgcagtgaagaagatagaagtgcctggaagcatgctggggccctgaagaagagcacctgtgatgctgagaagagctatgaggtgctgctgagctttgtgatcagcgagctgttcaagggcaagctgtaccacgaggagggcacccaggagtgtgccatggtgaaccccatcgcctggagccctgagagcatggagaagtgcctgcaggacttctgcctgcccttcctgcgcatcaccagcctgctgcagcaccacctgtttggagaggacctgcccagctgccaggaggaggaggagttctctgtgctggccagctgcctgggcctgctgcccaccttctaccagacagagcaccccttcatcagcgccagctgcctggactggcctgtgcctgcctttgacatcatcacccagtggtgctttgagatcaagagcttcacagaaagacatgctgagcagggcaaggccctgctgatccaggagagcaagtggaagctgccccacctgctgcagctgcctgagaactacaacaccatcttccagtactaccacaggaagacctgcagcgtgtgcaccaaggtgcccaaggaccctgctgtgtgcctggtgtgtggcacctttgtgtgcctgaagggcctgtgctgcaagcagcagagctactgtgaatgtgtgctgcacagccagaactgtggggccggcaccggcatcttcctgctgatcaatgccagcgtcatcatcatcatccggggccaccgcttctgcctgtggggctctgtgtacctggatgcccatggagaggaggaccgggacctgcggcggggcaagcccctgtacatctgcaaggagcgctacaaggtgctggagcagcagtggatcagccacacctttgaccacatcaacaagcgctggggcccccactacaacggcctgtag

SEQ ID NO: 247948 - DNA, 5667 bp, Artificial Sequence
  derived and/or modified sequence
atggccgccgccgccgccgccgccgtgggcggccagcagcccagccaaccggagctcccagcgcccgggctggcacttgacaaagctgcgacggctgctcacctgaaggctgccctgagcaggccagataatcgtgcgggcgctgaagagctgcaggccctcctagagcgagttctcagcgcagagcgacctctggcggcagccgccggaggagaagacgctgcggcggccggcggcggtgggggcccaggggccgcggaggaggaggccctggaatggtgtaagtgtctgctcgctgggggcggaggctacgacgaattctgcgctgcggttcgcgcttacgatcctgcagctctctgtggcttggtctggaccgcaaattttgttgcgtaccgatgcagaacttgtggtatcagcccatgtatgtccctgtgtgcggaatgcttccatcagggcgatcatactggtcacgatttcaacatgttccgctcacaagctgggggggcctgcgactgtggggatagtaatgtgatgagggagagtggcttttgtaaaagacaccagattaagagttcctcgaacatcccatgcgtgccgaaggacctcctgatgatgtccgagttcgttctgcccaggtttattttttgcctgatccaatacttgagagagggctacaacgagccagcagccgatgggcccagcgaaaaggatctgaacaaagttttacagctgttggaaccccagatcagtttccttgaagacttgacgaagatggggggcgctatgcgctctgtcttgacacaagtgctgacaaaccaacagaattacaaagacctcacatctggcctgggggaaaatgcatgtgtcaagaaaagtcacgagaaatatcttatcgcccttaagtcctccggccttacctacccagaggataagttggtgtacggggtgcaagagccgtcagccgggacctcatccctggctgttcagggcttcatcggtgcaacagggacgctagggcaagttgattcttctgacgaggatgatcaagatggctcccagggtctgggaaagcggaagagggtcaagctgagtagcgggaccaaagatcagtccattatggacgtcctgaagcataaaagctttcttgaggagcttctgttctggacgatcaagtacgagttccctcaaaagatggtaacctttctcctcaatatgcttcccgaccaagagtataaggtggcatttaccaagactttcgtgcaacactacgcttttatcatgaaaactcttaaaaagtcccatgagtcagatacgatgtcgaacaggattgtgcacatcagcgtacaactgttctccaatgaggagctcgcacgccaggtcacagaggaatgccaacttctggatatcatggtgactgttctattgtacatgatggaatcctgtctcatcaagagcgaactgcaggacgaggagaacagcctccatgtggtggttaattgtggtgaggctctgctcaagaataatacctactggcctctcgtctcggacttcattaacattctctcacatcaaagtgttgccaagcgcttcctagaggatcacggcctgctagtcacttggatgaattttgtgtcatttttccagggtatgaacttgaacaagagagagctcaacgagcatgttgagtttgagtcacagacctattacgcggctttcgccgccgagttggaagcctgcgctcagccaatgtggggcctactgtcacactgcaaagtccgcgaaactcaggaatacactcgcaacgtggtgcggtactgtctggaagctctccaagattggttcgatgccatcaacttcgtggatgaaccagcccccaatcaggttacatttcacctgcccttgcaccgctattatgctatgtttctgagcaaggcagtaaaatgccaggagttagacctcgattccgtgctcccagatcaggagatgctgatgaaactcatgatccatccgttgcagatccaggccagcctggcagagatccactccaatatgtgggtaaggaatggactgcagattaaggggcaggcaatgacttatgtccagtcgcacttttgtaattctatgatcgaccctgacatttacctgctgcaggtgtgcgcgtcaaggctggatccggattactttatttctagcgtcttcgaacggtttaaggtggtggacctgctgactatggccagccagcaccaaaacacagtcctcgacgcagaacacgagagatccatgctggagggcgcactgacattcctggtcatcttgctgtcgctgaggttgcacctgggcatgtccgatgacgagattttgcgcgccgagatggtggcacagctttgcatgaatgataggacacacagttcgctcctggatcttatccccgaaaaccctaatcccaaatctggcatcatccctggcagttactctttcgaatcggtcctgagtgctgtggcagatttcaaggcccccgtgtttgagcctggggggagcatgcaacaaggaatgtatacaccaaaagccgaagtatgggatcaggagtttgacccagtgatggtgatcctacggacagtgtatcgtcgggatgtgcagagcgcaatggataggtacactgccttcctgaagcagtctggcaagttcccaggtaatccctggcccccttacaagaagcggactagcctgcaccctagctacaaaggactgatgagacttctgcactgcaagacccttcacatcgtcctgttcacactgctctataaaatactgatggatcatcagaacctctctgaacacgtactctgtatggttctgtatctgattgagctcggtttggagaactctgcagaggaggaatcagacgaagaagcttccgtgggaggccctgaacgatgccatgacagttggtttcccggatctaacttggtgtccaacatgcgacattttattaactacgtgagagtgcgggtccctgagaccgcccccgaagtaaagcgcgattccccagcaagtacaagcagcgataacctgggaagcttgcaaaatagtggcacagcccaagtcttcagcctcgtagcggagcgcagaaaaaaattccaagagattatcaaccgctcttcgagcgaggccaaccaagtggtgcgacccaaaacatcctctaagtggagcgccccaggcagcgccccacaattaacaacggcaattctggaaataaaagagtccattctgtcattactgatcaaactgcatcacaagctgtccggcaagcagaactcttattatccgccctggttggatgatattgagatcctgatacagccagagatacccaaatattctcatggagacggaattacggctgtcgagagaatcctgttaaaggccgcttcccagtctaggatgaacaaacgcatcattgaggaaatctgccggaaagttacacccccagtcccccccaagaaagtgacagccgctgaaaaaaaaaccctagataaggaagaacggaggcaaaaggccagggaaagacagcaaaagctcttggccgagtttgctagtcggcagaagtctttcatggagacagccatggatgttgactcccccgagaacgatatcccgatggagatcaccacggccgaacctcaggtgtccgaagccgtctacgactgcgtcatctgcggacagtcaggcccctcaagtgaagaccgacctacaggactggtcgtgctgctacaagcgtcctcagtgcttgggcagtgccgggacaatgtggagccaaaaaagctgccaatatctgaagaagagcagatctacccctgggatacatgcgctgccgttcacgatgtgcgcctttccctgctccagaggtatttcaaagatagtagttgtcttctggccgtatccattggatgggaggggggggtgtacgtccagacctgcggacatactctgcatatagactgtcacaagagctacatggaaagcttacggaatgaccaagtgctccagggattttccgtggataaaggcgagttcacgtgtcctctgtgtagacaatttgccaattctgtcctgccatgctacccaggctccaatgttgaaaataacccatggcaacgcccgagtaacaagagcatacaagaccttattaaggaagttgaggagcttcaaggacgcccaggcgccttccccagcgagaccaatctctcaaaggagatggagtcggtgatgaaggatatcaagaacactacccagaaaaagtaccgcgattattccaaaacaccgggcagtccagataatgattttttattcatgtatagcgtggcgcgtacaaatctcgagcttgaattaatccataggggagggaatctctgttctggcggcgcctcaactgcagggaagaggtcatgcctaaatcagctgttccatgtgctggctctccacatgaggctctatagcatcgatagtgaatataacccttggaggaagcttacccagcttgaggagatgaatccacagctgggatatgaggaacagcagcccgaggtgccaatactttaccatgacgtaacttctctgctactgatccaaattctaatgatgcctcagccactgcgaaaggaccatttcacctgtatcgtgaaggtgctgttcacactgttatacacacaggctctcgcagctctgagcgtcaagtgttccgaagaggataggtcagcttggaaacacgccggggcactgaagaagagcacttgcgacgctgaaaaatcatacgaggtgctgctgtcattcgttatcagcgagctgttcaagggcaaattgtatcacgaggaaggcacacaggaatgcgccatggttaacccaattgcttggagcccagaatccatggaaaagtgtctccaagacttttgcctcccctttctccgcatcacatcactgcttcagcaccatctgttcggcgaggatctcccatcttgtcaggaggaagaagaattctccgtgctggcctcatgtttgggcctcctgcccactttttatcagaccgagcatccttttataagtgcttcttgtctggattggcctgtccctgccttcgacatcatcacacaatggtgttttgagatcaagtccttcactgaaagacacgccgaacaaggcaaagcgttgctgatacaagagagcaagtggaagctgccacacctgctccagctgcccgagaattacaacacaatcttccagtactaccacaggaagacttgcagcgtgtgcaccaaggtgcccaaagacccggcagtatgcctcgtatgtggaacttttgtctgcctcaaagggttgtgttgcaagcaacagagctactgcgagtgcgtgctccactcccagaactgtggggcagggacagggatctttctgctcatcaatgcttctgtcattatcattatccgtggccacagattttgtttatgggggtccgtgtatcttgatgctcacggagaggaagacagggatctaaggcgcgggaagcccttgtatatctgcaaagagcggtacaaggtgctcgaacagcagtggatctctcacacttttgatcacatcaataaacgttggggcccccactacaatggcttgtag

SEQ ID NO: 247949 - DNA, 5667 bp, Artificial Sequence
  derived and/or modified sequence
atggccgccgccgccgccgccgccgtgggcggccagcagcccagccagccagagctcccagctcccggcctcgcgctcgacaaggcagcaacagcagcccacttgaaggctgctctttcacgccccgacaatagggcaggcgccgaggagttgcaggccctcctggaacgtgtgctgagtgcagagagaccactggccgccgctgccgggggtgaagatgccgcagccgcaggcggcgggggaggcccgggcgctgccgaagaagaggctctcgagtggtgcaagtgcctgctggcaggcggcggaggctacgacgagttctgtgcggccgtccgggcctatgatcctgcagctctgtgcgggctagtgtggacagcaaactttgtggcatatagatgcaggacctgcggcataagtccatgtatgtcactttgcgctgagtgttttcaccagggtgatcacactggacatgacttcaatatgtttcgcagccaggctggaggtgcctgtgattgcggtgactctaacgtgatgcgggagagcggattctgtaaacgccatcaaattaagtcgagtagcaacattccatgcgtgcctaaggacttgctgatgatgtccgagtttgtgcttccccgcttcattttttgtctcatccagtacttgagagaaggctataacgaacccgcagccgacggaccgtcagaaaaggatctcaataaggtgctccagctcctcgagcctcaaatttctttcctcgaagatctgacgaagatgggtggggccatgagatcagttctaacacaggttttgaccaatcagcagaactataaagatctgacaagtgggctcggagagaacgcctgcgtgaagaaatctcatgaaaagtatctgattgctctaaagtcctctgggctgacatacccagaagataaactggtgtatggagtccaagagccatccgcggggaccagcagccttgctgtgcagggtttcatcggtgctaccggaaccctgggccaagtggacagctcggacgaagacgatcaggatggatctcagggcctgggaaagaggaagagggtgaagctgtcctcaggcactaaggaccagagtatcatggacgttctgaagcacaagtcgttcttagaagagttactgttctggactattaagtatgagtttccccagaagatggtgacgtttctcctcaacatgctgcctgatcaggaatataaagttgcttttaccaagacttttgtgcaacattatgcatttataatgaagacactgaagaagagtcatgagagtgacactatgtctaataggatcgtccacataagcgtacaactcttctctaatgaagagctcgcacgtcaagtgaccgaggagtgtcagcttctggatattatggtgaccgtgctgctgtacatgatggagtcatgcttgattaagagcgagttgcaagatgaggaaaatagcctccacgttgtggtcaactgcggtgaagcccttctgaaaaataacacctattggccactggtgtccgacttcattaatattctgtcccaccagagcgtggctaaaaggttcttggaggaccatggcttgctcgtgacttggatgaatttcgtgtctttttttcaagggatgaatctaaataaaagggaactgaatgagcacgtagaatttgagtcccagacatactatgccgcctttgcagccgaacttgaagcctgcgcccaaccaatgtggggccttctatcccattgcaaagttcgcgagacccaagagtatacaaggaatgttgtgcgctattgcctggaagccctgcaagactggttcgacgcaatcaattttgtggatgagcccgcaccaaatcaggtgacatttcacctgcccctgcatagatactacgctatgttcctcagcaaggcagttaagtgtcaggaacttgacctggattcggtcttgcctgaccaggaaatgttaatgaagctgatgattcatcccctgcaaattcaggccagtttggcagaaatacatagcaatatgtgggtgcgcaatggactgcagatcaaggggcaagcaatgacatacgtgcagtctcacttctgcaatagtatgattgaccctgacatttacttactccaggtttgcgcctccaggctcgacccagactactttatctctagtgtattcgaacgatttaaggttgtggacctgttgaccatggcttcacagcaccagaacactgtactggatgctgagcacgagaggtctatgctagaaggagccctgaccttcttggtgattctgctctctctgagactccacctggggatgagcgatgatgaaatcctccgagccgagatggttgcacaactgtgtatgaatgacaggacccactcgtccctgcttgatttgatccctgagaatccgaatcccaagagtgggattattcccggtagctactcttttgaatcggtgttgtcggcagtggccgatttcaaagcacctgtattcgagcccggtggcagcatgcagcaggggatgtatacgccaaaggccgaggtgtgggaccaggagtttgacccagttatggtgattctgcggaccgtctaccggcgggatgtccaaagtgcgatggatagatacaccgcgtttctgaagcaaagcgggaaattccccggaaatccttggcctccatataaaaaacggactagcctacacccaagctacaagggacttatgcggctgcttcactgcaagaccctacatatcgtactgtttactctcctctataagatcttgatggaccaccagaatctgagcgaacatgtgctctgcatggtcctctacctgatagaattgggcctggagaactccgctgaggaagaatcagacgaggaggcaagcgttggaggtcccgagagatgccacgacagctggtttcctggaagcaacctggttagtaatatgagacactttatcaattacgttcgggtccgagtgcctgaaactgctccggaggtcaaacgagattctcccgccagtactagttcagataatttaggcagtctccaaaattctggcacagctcaggttttctcactggtcgccgagaggcgcaaaaaatttcaggaaattatcaataggagctccagcgaagccaaccaagtggtccgacctaagacttcctccaaatggtctgctcccggctccgctccccaactcaccactgccatactcgagatcaaagagagcattctgtctctgttgattaagctccaccacaagctgagtggaaagcagaatagttactatccaccttggctggacgatattgagattttgatacaacctgagattcctaaatattcgcatggcgacggcatcaccgccgtagaacgaattctgttgaaagctgcatcgcagtcaaggatgaacaaacgcatcatcgaagagatttgtcgcaaggtcacaccacccgtgccccctaaaaaggttactgccgcggagaagaaaactctggacaaggaggagcgccgtcaaaaggctagagagcgccaacaaaaattgctggcagaattcgcgtccagacagaagtccttcatggaaacagccatggatgtcgattctcctgagaatgatatacctatggaaatcaccacggcagaaccgcaggtgagcgaagctgtctacgactgcgtcatctgtgggcagagcggccccagctccgaggatcgccccacaggactagtggtcctactgcaagctagcagcgtactgggacagtgcagagataatgtggaacccaaaaagctgccaatttctgaagaggagcagatttacccatgggacacatgcgccgccgttcacgatgtgcgtctcagtctgctacaacggtacttcaaggattcctcctgcctgttggcagtatcaatcggatgggaggggggcgtttacgtgcaaacatgcggccacaccctgcacattgattgccataagagctacatggaatctctgcggaatgaccaggtgttgcaggggttctctgtggacaaaggagagtttacatgtcccctttgcagacagtttgcaaattctgtgcttccttgctaccccggttccaacgtggagaacaacccttggcagcggccttcaaacaaaagcatccaggacttgataaaggaagtggaggagctccaggggagacctggcgccttcccatcagaaacaaacctctccaaggagatggagtccgtgatgaaagatataaagaacaccacacaaaagaagtaccgagattattccaagacccccgggtcgcccgacaatgactttttgtttatgtatagcgtagcccgcacaaatctcgagctggagcttatccatcggggtggtaatctttgttctgggggagcgagcacagcagggaaaagatcctgcctgaaccaattattccacgtgctagccctgcatatgcgcctgtactccatcgattccgagtataacccatggagaaagcttacccagcttgaagagatgaacccacagctgggctacgaagagcagcagccagaggttccgatcctgtaccatgacgtgacctccttgctgctgatccagatactgatgatgccccagccgctccggaaggaccacttcacgtgcatcgttaaagtcctgtttactcttctgtatactcaagccctggcagccctgagcgtcaaatgtagtgaggaggacagatcagcctggaagcatgccggcgctctgaagaagagtacgtgtgacgcagaaaagagctacgaggtattgctgtcttttgttatttccgagctgtttaagggcaaactttaccacgaggaaggcactcaagaatgtgcaatggtgaatcccatcgcctggtcgccagagagcatggaaaagtgcctgcaggatttctgtctgccgtttttgaggataacctctctccttcagcaccacctttttggggaggatttgccctcttgtcaggaagaggaggagttcagtgttttggcctcctgtcttggcttgcttccgacattctaccagacagagcaccccttcatatcagccagttgccttgattggcctgttccagccttcgacattattacacagtggtgtttcgagattaagtccttcacggaacggcacgcagaacagggtaaagccctcttaatccaggaatctaagtggaagctaccacacctcctccaactcccagagaactacaacacaatttttcagtattaccaccgtaagacctgcagcgtgtgcactaaagtgcccaaggatcctgccgtgtgtctcgtgtgtggcaccttcgtttgcttgaagggcctatgctgtaagcagcagtcctactgcgagtgcgtcctccactcacaaaattgtggagccggaaccggcatttttctgttgatcaacgcttcggtaattatcataatcagaggccaccggttttgcctctgggggtcagtgtatctcgacgcacacggggaagaagatagggaccttagaaggggaaaacctctgtatatttgtaaagagcggtacaaggtccttgagcagcagtggatcagccacacgtttgatcacattaataaacgctggggtcctcattacaatgggctatag

SEQ ID NO: 247950 - DNA, 5754 bp, Artificial Sequence
  derived and/or modified sequence
atggccgccgccgccgccgccgccgtgggcggccagcagcccagccagcctgagctaccagcacccgggcttgccctggacaaagctgcaaccgccgcccacttaaaagcggccctgtccaggccagacaatcgggcaggcgctgaggagctacaagccctcttagagcgcgtactcagcgccgagagaccattagccgccgcagccggcggtgaggacgcagccgctgcgggcggtggggggggcccaggcgccgcagaggaggaagctcttgaatggtgcaagtgtcttctagcggggggaggcggctatgatgaattttgtgcagccgtacgggcatacgacccggccgccctctgcggactggtctggaccgctaactttgtagcgtatcgctgccggacttgcggaatcagcccgtgcatgagcctttgcgcagaatgttttcatcagggcgaccacacaggtcacgatttcaacatgttcaggtcgcaagcgggtggagcctgtgactgcggcgactccaatgtgatgagggagagtggattttgcaaaagacatcaaatcaagtcttcctctaacatcccatgcgtccctaaagatctccttatgatgtccgagttcgtgctgcccaggttcatcttctgcctcatccagtacttgagagaaggatacaacgagcctgccgcagacggaccgtctgagaaagacttaaacaaggtgctccagctcctggaacctcaaattagcttcctggaggatctgactaagatgggtggagccatgcggagtgttttgactcaggtcctgacaaaccagcagaactataaggacctgacatccggcttaggcgaaaacgcctgcgtaaagaaaagccacgaaaagtatctaatcgccctcaaatccagtggtctcacataccccgaggacaaactggtctatggcgtccaggaacctagcgccgggactagctccctggcggtacagggattcatcggtgcaacaggaacgctgggccaggtcgattcttcagatgaggacgaccaagatggatcacaggggctcgggaaaagaaagagagtgaagttatcctctgggacaaaagaccagtctattatggatgtgctgaaacataagagctttctggaggaactgctgttttggaccattaaatacgagttcccgcagaaaatggtaacattcctccttaatatgcttccagaccaggaatacaaagtggcgtttacgaagactttcgtccaacactatgcttttattatgaagaccctcaagaagtcacacgagagcgacacaatgagcaatcgcattgtgcacatcagcgtacagctattcagcaatgaggagttggctcggcaggtgacagaggaatgccagctcctggatataatggtaaccgtgcttctatatatgatggaaagctgtctgatcaagtccgagctgcaagacgaggagaactccttacatgtcgtggtcaattgcggtgaggcgctgctaaaaaataatacctattggcctctcgtcagtgacttcatcaacatcctcagccaccagtcggtcgcaaagcgctttttggaggaccatggactactggtgacctggatgaactttgtctccttcttccagggcatgaatctcaacaagcgggaacttaatgaacatgtagaattcgagtcccaaacatattacgccgcttttgctgccgaattggaagcgtgtgcacagcccatgtggggtcttctgagtcattgcaaagtgcgcgagactcaggagtatacgcgaaacgtggttagatattgcttagaagccctacaagactggttcgacgctattaacttcgtggacgaaccagcgccaaatcaggtaacattccatcttccactacataggtactacgcaatgttcctgagtaaagccgtgaaatgtcaggagctagaccttgatagtgtgctgccggaccaggagatgcttatgaagcttatgatccatccactgcagattcaggcctctctggctgagatacactcaaacatgtgggtccgcaatggcctgcaaatcaaaggccaggcgatgacttatgtacagagtcatttctgcaattccatgattgatcccgacatctatctgctccaggtgtgcgcatctcggctggaccccgattatttcattagctctgtctttgagcgcttcaaggtggttgatttgctcaccatggcatcccagcaccagaacactgttttggatgccgagcacgagagatcaatgctcgaaggggccctgacttttctggttatactgctgtcacttaggctgcacctgggtatgagcgatgacgaaatccttagggctgagatggtggcgcagctgtgtatgaacgaccgtacacatagcagccttctggacctgatcccagagaatcctaacccgaagtctggaatcatccctggaagctactccttcgagtcggttctgagcgccgtggcagattttaaggcacccgtgtttgagcctggggggtccatgcagcaaggcatgtacacacccaaagccgaggtctgggaccaggagtttgatccagttatggtgatccttaggaccgtctatcgaagggacgtgcagagcgcgatggatagatatactgcattcctgaaacagtctgggaaattcccgggtaatccatggcctccttacaagaagcggacttccctgcacccgtcctacaaaggactgatgcgcttgctgcactgcaaaaccctgcatatcgtcttgtttaccctactgtataaaatcctaatggatcatcagaatttaagcgagcacgtgctctgtatggtgctctatctcatcgaactcgggcttgaaaattccgcggaagaggaatccgacgaggaggcctctgtcggcgggccggagcggtgtcatgacagttggttccctggttcaaaccttgtgtccaacatgcgccattttataaattatgtcagggtccgggtccccgaaacagcacctgaggtgaagcgcgattcccctgccagcacttcttctgataatctcggctctctccagaacagtggtactgcacaagtgttcagtctcgtagcagagagaaggaagaagttccaagaaattatcaataggtcgtccagcgaagctaaccaggttgtccggcctaagacctcctctaagtggagcgcccctggaagcgctccccagctgaccactgccattctagaaattaaggagtccatactgtccctactgatcaaattgcatcacaagctgtccgggaagcagaattcatattaccctccttggctcgatgatattgagattttgatccaaccagagattccaaagtactcccacggagacggcattactgctgtagaaaggatcctgttgaaggcagccagccaatcccggatgaataaacgtataattgaagaaatttgccggaaggtcaccccccctgttcctccaaaaaaagtgactgcggccgaaaagaagacactggataaagaggagcgaagacaaaaagcccgagagcgccagcaaaagctcttggcggagttcgcatcaagacaaaagagtttcatggagaccgccatggatgtggattctcccgagaacgacatcccaatggagatcaccactgcagaaccacaggtgagcgaagctgtatacgattgtgtgatctgtggccaaagcggcccctccagtgaggaccggcccaccgggcttgttgtgctgctgcaagcaagcagtgtactcggtcagtgccgtgataatgtagagcccaaaaagcttccaattagcgaagaggaacagatttacccatgggacacctgcgccgccgttcatgatgttcggttgtccctcttgcagcggtattttaaggactccagctgcctcttggccgtgagtatcggctgggagggcggcgtgtatgtacagacttgcgggcacactctgcacatcgattgccacaagagctatatggagtctctaaggaatgatcaggtgttacagggtttctcggtggacaaaggcgaatttacttgccctctctgcagacagttcgccaattctgtcctgccttgttacccagggtcaaacgtcgaaaataacccatggcagagacctagcaacaaatctattcaggatttgataaaagaggtagaagaactccaggggcgcccaggcgcttttccaagcgaaacaaacttgtctaaggaaatggaatccgtgatgaaggacataaaaaatacaactcagaagaaatatcgggattactccaagacccccggttcccctgacaatgatttcctgttcatgtacagtgtcgccagaacaaatttagaactggaactgattcatcgagggggcaacctctgctccgggggcgcttcaacagcaggcaaacggtcgtgtctaaatttctgctttattatcttcccttttacgaagtcggaaatcattctttgtcagtacaggaagtctcacgataaggtctatcctaagtatcagctgttccatgtattagctttgcatatgcgtctttattctattgactccgaatacaacccctggcgtaaactgacccagcttgaagagatgaacccacagcttggctatgaggaacagcagcctgaggtacctatcctatatcacgatgtgacttccttgctcctcatccaaatcttgatgatgccccagccactccggaaggatcactttacatgtatcgtgaaagtcctgtttacactcctgtacacacaggccttagccgcgctgtctgtgaagtgtagtgaggaggacagaagtgcctggaaacatgcaggagctcttaagaaatcgacgtgcgacgctgaaaagtcctatgaagttttgctgtccttcgtgatttctgagctcttcaaggggaagctgtaccatgaggaaggaacccaagagtgcgcaatggtcaatcctattgcgtggtctccagagagtatggaaaagtgtttacaggatttttgcttgccctttttacggatcacatccctgctccagcaccaccttttcggggaagacctgcccagttgccaggaggaggaggagttctctgtgctggcttcatgcttgggtctgctcccgactttttatcaaactgaacaccctttcatttcagcctcctgtctcgactggcctgtgccagcctttgatatcataacccagtggtgctttgaaatcaaatcctttactgagaggcatgcggagcaggggaaggctttgcttatccaggaatccaagtggaagctccctcatctcctgcagttgccggagaactataacaccattttccagtattatcacagaaaaacgtgtagtgtgtgtactaaggtgcccaaggacccggccgtgtgtctggtgtgtggtacctttgtttgtctgaaggggctatgctgtaagcagcagagctattgcgaatgtgttcttcatagtcagaattgtggagctggtacagggattttcctgctaattaacgcaagcgtgatcattatcatccgcggtcaccgtttttgcctttggggctccgtctacctcgatgcacacggcgaagaagacagggatttgcgaagagggaaacctctctacatctgtaaggaaaggtacaaggtgctggagcagcagtggataagccacactttcgatcacattaataaaaggtgggggcctcactacaacggactttag

SEQ ID NO: 247951 - DNA, 5667 bp, Artificial Sequence
  derived and/or modified sequence
atggcagccgcagcggctgccgcagttgggggacaacaaccctctcagcctgagttacctgcccctggcctggcactagataaagccgctaccgccgcacacctcaaggctgccctctctagacccgacaacagggccggagccgaagagctgcaagcactgttggagagagtgctctccgccgagaggcctttggcagcggcagctggtggggaggacgccgctgctgccggaggcggagggggtccaggtgcagctgaggaagaggcattagagtggtgtaagtgcctgctcgccggaggaggaggctatgacgagttctgcgccgctgttcgtgcatatgatcccgctgctctttgcggccttgtttggaccgctaatttcgtcgcctatcgctgcaggacttgtgggatctctccatgtatgtctctgtgcgccgagtgctttcaccaaggcgatcacactggacatgattttaacatgtttaggtcgcaggctggcggagcttgtgactgcggagacagcaatgtgatgagagagtccggcttttgcaagcgacatcagataaagtcatccagcaacatcccttgtgttccaaaggacctgctaatgatgtcagagtttgttctgcccagatttatcttctgcctgatccagtatctgcgcgagggatataatgagccagccgcagacggtccatctgaaaaggacctgaataaggtgctgcagcttctggagccccagatttcctttctggaggacctgaccaaaatgggcggagcgatgcgcagtgtcttaacacaggtgctcaccaaccaacagaactataaagacttaacctcaggactaggggagaatgcctgcgttaaaaaaagccatgaaaaatatctgattgctctgaagagtagcgggttgacctaccctgaggacaaattggtctatggtgtgcaggagcccagcgccggtacttcttcgctggctgtccagggtttcattggcgcaacaggaacactgggacaggtcgattctagcgatgaggacgaccaggacgggagtcaggggctgggtaagcggaagcgggtcaagctttccagcggcaccaaagatcagtccatcatggacgtcctgaaacataagtccttcctggaagagctgttgttctggaccataaagtacgaattcccccaaaagatggtaacgttcctgcttaatatgttgccggaccaggagtacaaagtcgcatttaccaagacatttgttcaacattacgcgtttataatgaagacactgaaaaagagtcatgagtcagatactatgagtaatcgcattgtgcatatctcagtgcaacttttctcaaacgaagaactggccaggcaggtgactgaagaatgtcaactgcttgatattatggtcaccgtccttctgtacatgatggagtcctgccttattaagtcagaactgcaggacgaagaaaatagcctgcatgtggtggtcaactgtggcgaggctctactgaaaaacaatacatattggccactggtgagtgattttattaacatcctcagccaccaatccgtcgctaaacgtttcctagaagatcatggactgctggtaacctggatgaactttgtgtcttttttccagggtatgaatctgaacaagagggagctcaacgagcacgtggagttcgagtcccagacttactacgcagccttcgccgctgaactggaagcatgtgctcagccaatgtggggacttctttcccactgtaaggtccgcgagacccaagagtatacacgaaacgttgtgcggtactgtcttgaagcgctgcaggactggtttgacgctataaattttgtggatgagcctgccccaaaccaggtcaccttccacctgccattgcatcgctactacgccatgttccttagcaaagcggtgaaatgccaggaactcgacctagacagcgtgctccctgaccaagagatgttgatgaaactgatgattcaccccctccagatccaagcttcactagcggagattcattctaatatgtgggtgagaaacggtttgcagatcaagggccaggccatgacgtatgtacagagccatttctgtaactcaatgatcgatccagatatatatctgctgcaagtttgcgcctcacgcctcgatccggactactttatcagttcggtctttgaacgcttcaaggtggtggatctgctcaccatggcatctcagcaccagaacactgttctggacgccgagcacgaacggtcgatgctcgagggggctctaacttttcttgtaatcctgttgtcactgcggctccacttaggcatgtccgacgacgagattctcagagccgagatggtggcacagctctgtatgaatgacagaacccactcaagtctgttagacctgataccagaaaatcccaaccctaaatcaggaattattccaggctcttatagtttcgagagcgtgctgagcgctgtagccgactttaaagctcctgtctttgagcctggcggaagcatgcagcaggggatgtatacccccaaggccgaagtttgggatcaggagttcgatcccgtcatggtgattctgaggaccgtgtatagaagggatgtgcagagtgctatggacaggtataccgccttcctcaaacagtccggaaaattccccggaaatccttggcctccatacaaaaaacgaacatcactgcacccctcttacaaggggttgatgaggcttctccattgtaagacacttcacatcgtcctgtttaccttgctttacaagatactcatggaccaccagaatctttctgagcacgtcctgtgcatggtattgtaccttatcgaacttggtttggagaattccgccgaagaagagtccgacgaggaagccagtgtgggaggacccgagcgatgccacgacagctggtttcctggatccaacttagtgtcgaacatgcggcacttcataaattatgtcagggtgcgcgttccagagacagcacccgaagtgaagcgtgacagccctgcctcaacatcaagcgacaatctgggctcccttcagaactccgggaccgcacaagtattctcattggtcgccgaacgacgtaagaagttccaggaaatcatcaataggtcttcctctgaagcaaatcaggttgtgaggccaaagacctcttctaagtggagtgctcctgggtctgccccacaattgacaacagccatcctcgagatcaaagagtcaattctgtccctgctgataaagctgcaccataagttgtctggaaaacagaattcatattatccaccatggctcgacgacatcgaaattcttatccagccagagattcccaaatactcccacggcgacggtattacagcggttgagcgcattctgctgaaagcagcttctcagtcccgcatgaacaaacgcataattgaggaaatatgtagaaaagtcacccctcccgtccccccaaaaaaggttacagcggctgagaagaagacccttgacaaagaagagcgacgacagaaagcaagggagcgacagcagaaattattggctgaattcgcttcccgccagaagagttttatggagaccgcaatggatgtggattctccagaaaatgacattcctatggaaataactaccgccgagccacaggtgagcgaggccgtctacgactgcgtcatatgcggccaatctggtccttcgagtgaagaccggccaaccggtttagtggtcctcctgcaggcatcctccgtgctcggacagtgccgtgataacgtcgagcccaagaaactacctattagcgaggaggagcaaatatacccctgggacacatgcgcggcagtgcacgacgtgcgtcttagtctgctccagcgctatttcaaagactccagctgcctgctcgctgtgtctataggctgggaagggggagtatacgtacagacctgtgggcacaccctccatatcgactgccacaagagctacatggaaagcctgagaaacgatcaggtgttgcaaggcttttccgtcgataagggagagttcacctgtcctctgtgccgacaattcgcaaactctgttcttccgtgttatcccggatctaatgtcgaaaataatccatggcaacggccatccaacaagagcatccaagatctcatcaaggaggtggaggagctccagggccgtcccggagccttcccatccgaaacaaatttgtctaaagagatggaatccgtgatgaaagacatcaaaaataccactcagaagaaataccgcgattactctaaaacacccggatcacccgacaacgacttcctcttcatgtatagtgtggcaagaactaacctggagctagagctgatccaccgcggtggcaacctgtgtagcggaggagcctcaaccgcgggtaagagatcgtgcctgaatcagctgtttcatgtgctggcactgcacatgcgcctgtactccattgattcagagtacaacccttggcgaaagctgactcagctggaggagatgaacccacagttgggctacgaggagcaacagcctgaagtgcccatcctgtatcacgatgtgacgtcgcttctgctgatccaaatcctgatgatgccgcagcctctccgtaaagatcacttcacctgcatagttaaagtcctgttcacgttactctacacacaggctctggcagcactgtccgtgaaatgcagcgaagaggaccgatcggcgtggaagcacgcaggagctctcaaaaagagcacttgcgacgctgagaaatcatacgaagtgttactgtcattcgtgatctcagagctgttcaagggcaagctataccatgaagagggtacacaggagtgtgccatggtgaaccctatcgcctggagtcctgagtcgatggaaaagtgtctgcaggacttttgtctcccgtttctccggattacatctctcttacagcaccacctttttggtgaggacctgccatcttgccaggaagaagaggagtttagtgtactggcttcatgtctcggcttgctacccactttttaccagacagaacatccttttatcagtgctagctgcctggattggcctgtgccagcctttgacattatcactcagtggtgcttcgaaataaaaagctttactgaacgccacgcagaacaaggcaaggccctgctgattcaggagagcaagtggaaactgccccaccttctgcaattgcctgaaaattataacaccatctttcagtattatcatagaaagacctgctccgtatgcaccaaagttcccaaggatcctgcggtctgcctggtgtgcgggacattcgtttgtttgaaaggcctgtgctgtaaacagcagtcttactgtgaatgcgtcctacactcccaaaactgtggtgccggaactggcattttcctgctgattaacgctagcgtgattataattatcagaggacatagattctgtttgtggggctcagtctacctggatgcccacggcgaagaagacagggatcttcggaggggcaagcccctgtacatctgcaaggagcgctacaaagttcttgagcagcagtggatatctcacactttcgatcacatcaacaaaagatgggggcctcattataatggcctttac

SEQ ID NO: 247952 - DNA, 5666 bp, Artificial Sequence
  derived and/or modified sequence
atggcagccgctgcagccgcagccgtggggggacagcaaccatcccagccagaactgccagcccctggtctcgccctggataaggctgcaacagcagcgcatctcaaagcggcactgtcgaggcctgataaccgtgccggagccgaggagttgcaggccctgttggagcgcgtgctgagcgcggagcggccattagccgcagccgctggaggggaggatgcagccgctgcagggggaggtggaggtccgggagctgctgaggaggaagctctggagtggtgcaaatgcctacttgctggcggagggggatacgatgaattttgcgccgcagttcgtgcttacgatcctgcagccttgtgtgggttggtatggacggctaattttgtggcctacaggtgtagaacttgcggcatttcgccctgcatgagcctgtgcgctgagtgtttccaccaaggcgaccacaccggtcacgactttaacatgtttagatcacaggccggtggtgcctgtgactgtggggactctaacgtgatgcgtgagtcggggttttgtaagcggcatcaaataaagtctagctctaacatcccatgcgtccccaaagacttgctgatgatgagcgagtttgtcctcccccgatttattttctgcctaatccagtatctgagagagggatataatgagcctgccgctgatgggccttctgaaaaagacctgaacaaagtcctccagctgttggagccgcagatttcatttttagaggaccttacaaagatgggcggagcaatgagaagtgtgctgacccaggtgctcacaaatcagcaaaattacaaagatttaaccagcgggttaggcgagaacgcctgcgtcaagaaaagccacgagaaataccttatcgcattaaaatcttccggtctgacttatcccgaagataagctagtgtacggtgtgcaggaaccaagtgccggaacatcttctctagctgtccagggattcatcggcgctaccgggaccctcggccaggtcgactccagcgatgaggatgaccaggacggtagccagggactcggcaagagaaaaagagtcaaactgagctctggcacaaaggatcaatctataatggatgtgttaaaacacaaaagtttcctggaggagctcctgttctggacaattaaatatgaattccctcaaaaaatggtaactttcctgctcaatatgctcccagatcaggagtataaggttgccttcactaagacattcgtccagcattatgccttcataatgaagaccctcaagaaaagccacgaaagtgacacgatgagcaatcgtatcgtacatatcagtgtccagctcttttccaacgaggaacttgcaagacaggtaacagaagaatgccagttactcgatattatggtgacagtgcttctgtatatgatggaaagctgcttgattaagtcagagctccaagacgaggaaaattcactgcacgtggtcgtgaattgcggggaagccctattgaaaaacaatacctattggccgcttgtatcagattttattaatattctctcacaccagtccgtggcaaaacgctttctggaagaccatggtctcctcgtgacctggatgaattttgtcagtttctttcagggtatgaatttgaacaagcgcgaactgaatgaacacgttgaattcgaatcacagacctactacgcagcatttgcagccgaattggaggcatgcgcacaacctatgtggggcttattatctcattgcaaagtgagggagacacaggaatacactcggaacgtggtgaggtattgtcttgaggctctgcaggactggttcgacgcgattaactttgtagatgaaccagcaccaaatcaggtgacctttcacttaccactccacaggtactacgccatgttcctgagtaaggctgtgaaatgccaggagctggatctggacagtgtgttaccagaccaggagatgctgatgaagctgatgattcacccgctgcagatacaggcttctctcgcagagatacactccaacatgtgggtgcgcaacggactgcagatcaagggacaggctatgacctacgtgcagtcgcatttttgtaacagcatgattgatcccgatatctatctgttacaagtgtgcgcctcgaggctggaccccgactactttatttcctctgtctttgagagattcaaggttgtggacctcttgacaatggctagccagcaccagaacactgtactcgacgcagagcatgagagatccatgttggaaggcgcactaacctttctggtaatactcctcagcctcagactgcacctggggatgtccgacgatgaaattcttcgcgcagaaatggtggcccagttatgtatgaacgatcggacacactcttccctacttgacttgattcctgagaaccccaaccccaaaagtggaattattcctggaagttactccttcgaatccgttctgtctgcggtggccgacttcaaagccccagtgtttgaacccggaggatctatgcaacaaggtatgtatacgccaaaagccgaagtctgggaccaggagttcgatccggtcatggttatattaagaacagtttacagacgggacgttcagtctgccatggatagatacacagcgttccttaagcagagcgggaagtttccagggaatccttggcccccatacaagaaacgcaccagcctccacccaagttacaagggactgatgagactgcttcactgcaaaactctgcatatcgtactgttcacgcttctgtataagattctgatggaccaccagaacctctcagagcacgtgttatgcatggttttgtatctaatcgaactaggccttgaaaactctgcagaagaggaaagcgacgaagaggcttctgtgggaggacccgagagatgtcacgacagttggttccccggaagcaatctcgttagtaacatgcgacacttcatcaattacgttcgggtacgtgtacctgaaaccgcgccagaggtgaaacgagacagccccgcttcgacctcctccgacaacttgggctctctccagaatagcggcactgcgcaagtcttctcactggtagcggaacgtaggaaaaaatttcaggagatcattaataggtcatcttcggaggcaaaccaggtagtgcggccaaaaacttcctcaaagtggtccgcgcctggatctgctccacagctcaccaccgccatactggagataaaggagagcatactgagccttctgatcaaactgcaccataagctttctggcaaacagaatagctattacccaccatggttggatgacatcgaaattctcatccagcctgagatacccaaatactcacatggggacggtatcaccgcggtggagcgcattctcctaaaggctgctagccagtcaaggatgaataaaagaattattgaagagatctgcagaaaggttaccccgccagtcccccctaagaaggtcactgctgccgagaagaagactctcgacaaggaagagcggcgacagaaagcacgcgaacggcaacaaaagttactcgcggagtttgcatctcgtcagaagtctttcatggagactgccatggatgtagactccccagagaacgacatcccaatggagattacaaccgctgagccccaagtatctgaagccgtctacgattgcgtaatctgcggacagagtggtccctcctctgaggatcggccaaccggcctcgttgttctgttacaggcatcttccgtgttaggccagtgccgagataatgtcgagccaaaaaagctgccaatatccgaggaggaacagatctatccatgggatacttgtgctgctgtccatgatgtgaggctgagccttttgcagcggtacttcaaggattcttcctgcctcctcgcagtctcgattggctgggaaggcggagtatacgtgcaaacctgtggtcataccttgcacattgactgccataagagttatatggaatccctcaggaatgaccaggtcctgcagggcttcagcgttgataagggtgaatttacatgccccctgtgcaggcaatttgcgaatagtgtattgccatgttacccgggatcaaatgtcgagaataatccatggcagcgacccagcaataaaagcatacaggacctgattaaggaagttgaagagttacaggggagacctggggcattcccttccgaaactaacctttcgaaggaaatggagtccgtgatgaaagacattaaaaacactacacaaaaaaagtatcgcgactattctaagactccagggagtccagataacgactttctgttcatgtattcggtggcccgaacaaacctagaactggaattgattcaccgaggagggaatctgtgcagtggcggtgctagcacagccggtaagcggtcttgcctcaaccagctgtttcacgttcttgctcttcacatgaggttgtactccatcgacagcgaatacaacccctggcggaagctaactcagctggaagaaatgaacccccagctggggtatgaggagcagcagcctgaggttcccatcctgtaccatgacgtgacatctttactgctcattcagatattgatgatgcctcaaccgctgagaaaggaccacttcacatgcatcgtcaaggtcttgtttaccctgctctatacccaggctctggccgcactgtcggtgaagtgctctgaagaagacagatccgcttggaagcacgccggtgccctgaagaaaagtacatgcgacgcggaaaaaagctacgaagtactgttatcgttcgtaatatctgaattgtttaagggtaagttgtatcacgaagaaggcacacaggagtgcgctatggtgaatcctatcgcatggtctccagaaagtatggaaaaatgtctccaggacttttgcctgccgttcctgcgaatcaccagccttctccagcaccatctgttcggggaagatttaccctcctgtcaagaagaggaagagttctcggttctggccagctgcctgggactcctgcctaccttttaccagaccgagcatccttttatcagcgcctcttgcctggactggccggttcctgcgttcgatatcattacgcagtggtgtttcgagatcaagtcattcacggaacgccacgcggagcagggaaaggcactcctgatacaagagtctaaatggaaactgccgcacctccttcagctgccagagaattataataccattttccagtactaccatcgcaagacctgtagcgtgtgcaccaaagtaccaaaggaccccgctgtttgccttgtatgcggtacgttcgtctgcctgaagggtctttgttgcaaacagcagtcctactgtgaatgcgtgctgcactcccagaactgcggcgctgggactggaatttttcttctcatcaacgcttcagtcatcattatcattcgagggcaccgcttctgtttatggggctccgtctacttggatgcccatggcgaagaggatcgggaccttcgacgcggaaagcctctttacatttgcaaagagcggtacaaagtccttgaacagcagtggatatctcacaccttcgaccacataaataagcgctggggaccgcactataacggactgta

SEQ ID NO: 247953 - DNA, 5753 bp, Artificial Sequence
  derived and/or modified sequence
atggccgctgcagccgcagcagcggtgggaggtcagcagccgtcgcagcccgaattgccagcacctggacttgcactggacaaagcagcaactgctgcccacttgaaagccgcactgtctcgccctgataatagagctggcgctgaggagttacaagcactgcttgagcgagtgctcagcgctgagaggccactggctgctgccgcaggcggtgaggatgccgctgctgctggcggaggagggggtcccggagccgctgaggaagaggccctggaatggtgcaaatgtctgctcgccggagggggagggtatgatgagttttgcgctgctgtgcgtgcctatgaccccgcagcactgtgtggtttggtttggaccgctaatttcgtcgcttacaggtgtcgtacatgtgggatcagcccatgtatgtcgctgtgcgctgagtgctttcatcagggagatcatactggtcatgactttaatatgttccggagtcaggccggtggggcttgtgattgcggagattctaacgtaatgcgcgaatccggattctgtaagaggcaccagattaaatcatctagcaatatcccttgcgtccccaaggatctcctgatgatgtcagagtttgtgctgccacggtttattttttgccttatacaataccttcgtgaggggtacaacgaacctgcagccgacggcccaagtgagaaagatcttaataaagtgttgcagctcttagagcctcaaatcagcttccttgaagacctgacgaagatggggggtgccatgagatcggttctcacgcaagtcctcactaaccagcagaactacaaggatttaacgtcaggactgggtgagaacgcttgtgtgaagaaatctcacgaaaaatacctgatcgccttgaagtcaagcggcctgacttatccggaggataaattagtgtatggcgtccaggaaccttcagctggcaccagtagcttggctgtccaagggttcattggcgctacgggcaccctgggtcaggtcgattcgtcggacgaggacgatcaggatgggtcacagggtcttgggaagcgcaagcgcgtgaagctgagctcaggcacaaaagaccagagcatcatggatgtccttaagcacaaatcttttctggaggaactgctcttctggactataaagtacgagttccctcaaaaaatggtgacctttctcttaaatatgctgcctgatcaggaatataaggtggccttcaccaagaccttcgtacagcactacgcctttatcatgaagactctcaaaaaatcacacgaatctgatacaatgagcaatagaatcgtgcacatatcagtacagctttttagcaatgaggagctggctagacaggtaactgaggaatgtcagctccttgacattatggtcacagtcctgctttacatgatggagagttgcctgatcaagagtgagttgcaggatgaggaaaatagcctacacgttgtagtaaattgcggggaggccctgctgaaaaataacacatactggcccttggtgtctgattttatcaatatcctgtcccaccagtctgtcgccaagcgcttcctagaagaccatggcctgcttgtcacatggatgaattttgtgtccttctttcaaggtatgaacctgaacaagcgcgagttgaacgaacatgtcgaattcgagagccagacatactacgccgctttcgctgccgaacttgaggcatgtgcccagcctatgtggggcctgctctcacattgcaaagtgagagaaacccaggaatacacccgcaacgtggtcaggtattgtctggaggccctgcaagactggttcgatgccatcaattttgtggacgaaccagcccctaaccaggtgacattccacctccctctccacagatactacgccatgttcctgtcaaaggcagtgaagtgccaggaactggatcttgactctgtactgccggatcaggagatgctgatgaagctgatgatccatcccctccagatccaggcctccttggccgagattcactcaaacatgtgggtgcgcaacggcctgcagataaagggtcaggccatgacgtatgtgcaaagtcacttctgcaatagcatgatcgacccggatatttacttgttacaggtgtgtgcctcaagactggaccccgattattttatcagcagtgtctttgagcgattcaaagtggtcgatcttttgacgatggcctcccaacaccaaaacacagtcctggacgccgaacacgaacgatccatgctggaaggggctctgaccttcttggttatactgttgtctctgcgcttacatctgggcatgagcgacgacgaaatcctccgcgcagaaatggtggctcaattatgcatgaatgaccggacgcactcctctttattggatctcatccccgagaacccaaatcctaaatctggcattatccccggtagctattccttcgagagcgtcttaagtgcggtcgcggatttcaaagcaccagtatttgagcccggtggaagtatgcagcaaggaatgtatacccccaaagccgaggtgtgggatcaagaattcgaccccgtgatggtgatactgcggaccgtatatagaagggatgtgcagtccgcgatggacaggtacacagcttttctaaagcagtccgggaaattcccaggaaatccgtggcccccatataagaaaaggacaagcctacaccctagttacaaagggctcatgcgcttgctgcattgtaagactttgcatatcgtgctcttcactcttctgtataaaatccttatggatcaccagaatctgtccgaacatgtgttatgcatggtgctctacttaatagagctggggctggaaaattccgcagaggaagaaagcgatgaggaggcaagcgtggggggaccagagaggtgtcatgacagttggttccccggttctaacctcgtctctaacatgagacattttatcaactatgttagagtgagggtgccggaaactgctcctgaagttaagcgcgatagtccagcctcgacctccagtgataatttaggctccctgcagaatagtggcaccgcgcaggtgttctccctggtcgccgagcgaagaaaaaagttccaagagatcatcaatcgttcatccagcgaggcaaaccaggtcgtgcggcctaaaacatcctctaagtggtccgccccaggctccgcgcctcaattaaccactgcgatcctcgaaattaaagaatcaatcttgtctctgcttataaaactgcaccataaactgtccggcaaacagaacagttattatcccccttggctggacgatattgagattttgatccagcccgaaatccctaaatactctcatggcgacgggatcacggccgtggagcgaatcttactgaaagcagccagtcagtccaggatgaataagcgcatcatcgaggagatatgccgaaaagtgactcccccagtgcccccaaaaaaagtaacagccgctgagaaaaaaaccctggacaaagaagagaggagacagaaggcccgagagagacagcagaaactcctggccgagtttgctagcaggcagaagtcctttatggaaactgctatggatgtcgattcaccggagaacgacatccctatggaaattactacagccgagccccaggtgtccgaggccgtgtacgattgcgtcatctgcggtcagagcggaccctcatctgaggatcgaccgactgggctggtggtgcttcttcaggcaagctccgttctcgggcaatgtagggataacgtggagcccaagaagttgcccatatccgaagaagagcagatctatccttgggacacatgcgctgccgttcacgatgttagattaagcttgttgcaacgctacttcaaggatagcagctgtctgctggcggtctcgatcggatgggagggcggtgtgtatgtccagacttgcggacataccctccacatcgactgtcacaagagttatatggaatctctacgcaacgaccaggttctccagggattcagcgttgacaaaggggagttcacctgtcctctctgtcggcagtttgcaaactcagtcctgccgtgttatcccggtagcaatgtcgagaataacccttggcaaagacccagtaataaaagcatccaggatctgattaaggaggtggaagagttgcagggtcgacccggagcgtttccttccgaaactaacctatctaaagaaatggaatctgtgatgaaagatattaaaaacacgacccagaagaagtatcgagactactctaagactcctgggtctcccgataatgactttttgttcatgtacagtgtcgcacggacaaaccttgaattagaattgatccaccggggtggaaacctgtgctcaggcggtgcttccaccgctgggaagaggtcgtgtctgaacttctgtttcatcatcttcccctttacaaagtctgaaataatattatgtcagtataggaagtcccacgacaaggtttatcccaagtaccagctgttccatgttctagcattgcacatgagactttattccatcgatagcgaatacaacccatggcgcaaacttactcagctagaggaaatgaaccctcagcttgggtatgaagaacagcagcccgaggttcctatcttgtatcatgatgtcacaagcttgctgctgatccagatccttatgatgccgcagccattaagaaaggaccatttcacctgcatcgtaaaagtacttttcacgctgctgtacacacaagcccttgctgctttgtctgtgaagtgcagtgaggaggatcgctctgcctggaagcacgcaggggctctcaagaaaagcacatgtgacgcagagaaaagttacgaggtgctgctgagctttgttatcagcgaattgttcaagggtaaattataccatgaggagggaacccaggagtgcgccatggtgaaccctatcgcctggtcacccgagagcatggaaaagtgtttacaagatttctgcttgccctttcttcgaatcactagcctgttgcagcatcacctgtttggcgaagatttgccgtcttgtcaggaggaggaagaatttagcgtgctggcaagttgtctgggcctcctccctacattttatcaaactgagcatccttttatctcggcttcatgcttagattggccagtgcctgcatttgacatcattacccaatggtgttttgagatcaaaagcttcacagagcgccatgctgagcagggcaaggccctcctgattcaggagtctaagtggaaactgccccacctgctgcagctgcccgagaactacaatactatctttcagtattatcatcgcaagacctgcagtgtgtgtactaaggtccccaaggatcccgcagtgtgcctggtttgtggtacatttgtctgcctgaaaggcctctgctgcaaacaacagtcttattgtgaatgcgtgctacacagtcagaattgcggtgctggcacaggtatttttctgcttattaatgcatcagtgataattatcataaggggacatcgtttttgcctctggggctcagtatatcttgacgctcacggggaggaggaccgcgacttgaggagaggaaaaccactgtatatctgtaaggagcgatataaagttctcgagcagcagtggatctctcacacgtttgatcatataaataaaaggtggggaccccattacaatgggttata

SEQ ID NO: 247954 - DNA, 8005 bp, Artificial Sequence
  derived and/or modified sequence
tccctggaggagccgctggccctggactctccaaattctgagctctcatcatggcggcggcggccgcggcggccgtcgggggccagcagccgtcacagcccgagctgcccgcgccggggctggccctagacaaggcggccaccgccgcgcacctcaaggcggccctcagccggccggacaaccgcgcaggtgctgaggagctgcaggcgctgctggagcgggtgctgagcgccgagcggccgctggccgcggctgccggcggcgaggacgcggcggcggccggaggcgggggcggtccgggggcggccgaggaggaggccctggagtggtgtaagtgccttctggcgggcggcggcggctacgacgagttctgcgcggcggtgcgggcctacgatcccgcggcgctctgcggcctggtctggacagccaacttcgtggcctaccgctgccggacgtgcggcatctcgccctgcatgtcgctgtgcgccgagtgcttccaccagggcgaccacaccggacacgacttcaacatgttccgcagccaggccgggggcgcctgcgactgcggggacagcaacgtgatgcgggagagcgggttttgcaaaaggcatcaaattaaatcaagttcaaatattccctgtgtccctaaagacttactgatgatgtctgaatttgttcttccaagatttatattttgtcttattcagtacttaagagaaggctataatgaaccagcagctgatggaccatcagaaaaggaccttaacaaagtccttcagcttttggaacctcaaatttcctttttagaagacctgactaaaatgggaggagcaatgcggtctgttcttactcaggttttgacaaaccaacaaaactacaaagatctgacttctggtcttggagaaaatgcttgtgtaaagaaaagtcatgaaaagtaccttatagctttaaagagctctggacttacatatcctgaggataagcttgtatatggtgtgcaggagccatctgctggtactagttctctggctgttcaaggtttcataggcgcaacaggaactttgggacaagtggattcttcagatgaggatgatcaggatggtagtcaaggtctgggcaagagaaaaagggtaaaactaagcagtggcaccaaagatcaatccataatggatgttttgaagcataaaagcttcctagaagaactattattttggactataaaatatgaattccctcaaaagatggtaactttcttactcaacatgcttccagatcaagagtataaggttgcttttacaaaaacttttgttcagcattatgctttcattatgaaaacactgaagaaaagtcatgaatcagacacaatgtctaacagaattgtgcatattagtgttcagttgttcagcaatgaggagctagccagacaggtaacagaagaatgtcagctgctggatattatggtcactgtgctattatacatgatggaaagttgccttattaaaagtgagctacaagatgaagaaaatagtttacatgtggtagtgaactgtggagaagcattactgaagaataacacttactggcctcttgttagtgattttattaatattctttctcatcaaagtgtggccaagagatttttggaggatcacggtttgttagttacatggatgaactttgtatctttctttcaaggtatgaacttaaacaagcgagaactaaacgagcatgtggaatttgagtctcagacctactatgctgcctttgctgctgaacttgaggcctgtgcacagccaatgtgggggcttttatcacattgtaaagttagggaaactcaagagtatacccgaaatgttgttagatattgccttgaagctcttcaagactggtttgatgctattaacttcgtagacgagccagcacctaaccaagtcacttttcatctgccactacatcgttactatgctatgtttttgagtaaggctgtgaaatgtcaagaactagatttggattctgttttaccagatcaggaaatgttaatgaaactaatgattcacccactccaaattcaagcaagtcttgcagaaatccacagcaatatgtgggtaagaaatggtctgcaaatcaaaggacaagccatgacgtatgtccagtctcatttctgtaattccatgattgatcctgacatttacctgttacaggtttgtgcttctagacttgacccagattattttatttcatccgtctttgaaagatttaaggtagtggatttgttgacaatggcatcacaacatcaaaatacagtacttgatgcagagcatgagaggtcgatgttagaaggcgctcttacatttcttgtgattcttttgagtcttcgtttacatttaggaatgtctgatgatgagattctcagggccgagatggtagcccagctgtgtatgaatgacaggacacacagttcattgctggacctcattccagaaaatcctaatcccaaaagtggcattattccaggcagttacagctttgaatcagttttatcagctgtagctgattttaaggctcctgtttttgaacctggaggttctatgcaacaaggcatgtatactcccaaagctgaagtctgggatcaagagtttgaccccgtcatggtcattcttcgaacagtttaccgtagagatgtgcagtctgcaatggacagatatactgcatttttaaaacagagtggaaaatttcctggaaatccctggcctccatataagaaaaggacatcactccatcctagctataaaggtcttatgagacttttgcactgtaaaactttacacattgtgctattcactctgctttacaagattttgatggatcatcaaaatctgtcagaacatgtactctgcatggttttatatctgattgaattaggacttgaaaattctgctgaagaagaatcagatgaagaggcatcagtgggtggaccagaacgttgtcatgacagttggtttcctggcagtaacttagtgtcaaacatgcgacactttataaactatgttagagtaagagttccagagactgctcctgaagtaaagagagactcacctgcaagtactagctctgataacttgggttctttacaaaattctggtacagctcaagttttcagtttagtagcagaacgtagaaagaaatttcaggaaatcatcaatcgcagtagcagtgaagcaaatcaggtggttcgtcccaaaacttcaagtaaatggtctgctcctggttcagctccacagttaactacagccattttggaaattaaagaaagcatattgtctttgctaattaaacttcaccacaaactctcaggaaaacaaaactcctactatcctccttggcttgatgacatagaaattttaatccaaccagaaattcctaaatacagtcatggagatggtataactgccgtggaaagaattttactaaaagctgcatcgcaaagtagaatgaacaaacgcatcattgaagagatatgtagaaaagtgacccctcctgtaccacctaaaaaagtcactgcagcagagaagaaaacattggacaaagaagaaaggcgacagaaggctagagagaggcagcagaaattgcttgcggagtttgcttcacgacagaaaagctttatggaaactgcaatggatgttgattctcctgagaatgatattcctatggagatcaccacggcagaaccacaggtttccgaggcagtatatgactgtgttatttgtggacagagtggcccctcctctgaagatcgacctactggattagttgtactgttacaagcatcctcagttttggggcagtgccgtgacaatgttgagccaaaaaagttgccgatcagtgaagaggagcagatttacccttgggatacctgtgcagccgttcatgatgtgaggctttcattattacagcgttattttaaggatagttcatgtctcttggcagtatcaattggctgggaaggaggtgtttatgtacaaacctgtggtcacacattacatatagattgtcataaatcttacatggaatcattacggaatgaccaggttcttcagggcttctcggtggacaaaggagaattcacgtgtccactctgtaggcagtttgctaacagtgttcttccatgttatcctggaagcaatgtggaaaataacccttggcaacgtcctagcaacaaaagcatacaagatctcataaaggaagtggaggagctgcagggacgaccgggagctttcccatcagaaacaaatttaagtaaagaaatggaatctgtaatgaaagatataaaaaataccactcagaagaaatatagagactatagcaagaccccgggctcaccagacaatgattttctctttatgtactctgttgctagaaccaatttagaacttgaattgattcatcgaggaggcaatttgtgttcaggtggtgcaagcacagctggcaaaaggtcttgtttaaatcagctgtttcatgtattagccttgcacatgcggctttatagcattgactctgagtataatccctggagaaagctcacccagttagaagagatgaatccacagctgggatatgaagaacaacagcctgaggttccaattctttatcatgatgtaacatcccttttgctcatccagatcttaatgatgccacaacccttacgcaaagaccactttacctgcattgtgaaggtactttttaccctactgtacacacaggctcttgcagcactctcagttaaatgcagcgaagaagataggtcagcctggaaacacgcgggagctctcaaaaagagtacatgtgatgcagaaaagtcttacgaagtattactgagctttgtgataagtgaactatttaaaggaaagttataccatgaagaaggaactcaggaatgtgcaatggttaaccctattgcttggtctcctgaatccatggaaaaatgcttacaggacttctgcttaccttttctcagaatcaccagccttcttcagcaccacctttttggggaagatttacctagctgccaggaagaagaagaattttcagttcttgccagctgcctgggacttctgccaacgttttaccaaacagaacatccattcatcagtgcctcctgtctggattggccagttccagcatttgatattataactcagtggtgttttgagataaaatcatttactgaaagacatgcagaacaaggaaaggccttgcttatccaagagtcaaaatggaaattaccacacctactacagttgcctgagaattataacaccatttttcagtactaccacagaaaaacctgtagtgtctgcaccaaggttcctaaagatcctgctgtttgccttgtgtgtggtacttttgtatgcctgaaaggactttgctgcaagcaacaaagttactgtgaatgtgtactgcactctcagaactgtggtgcaggaacaggtattttccttttgatcaatgcatcggtaattatcatcattcgaggtcaccgcttctgcctctggggttccgtgtatttggatgctcatggagaggaagaccgggatcttaggcgaggcaaacctctctacatttgtaaggaaagatacaaagttcttgagcaacagtggatttctcatacttttgatcacatcaataaaagatggggtccacattacaatgggctgtgactctccacctcagcattgcatcgtatcatcattttcgctacgaatttatttttcaacaataagctttaacttaatttgggggattaacacttttgctgagggagaaaaagaaaacatacattatgaagcctttccaaaattaggtgcttggtaatcacgttaatggtataattttttttttttaatatctggagaacattaataacaagttaaattattctttagtggtcattttttaagtgcacaattaataagaagcacaacttgttcacaaactcattcagaaatgattctcccaacaatgcgtatcagctattcattgatacttagagtgggtgtgatttatttgacattttactgcttctttctgtctgtgtgttttaatttgcatctgccaagcataatgcatcttttttcctctgccattcttgtgttgattggagaatttttctgtatgtaattagaaaaaaatgtaaaacatgatttatgtgaaatactgtatagtaaaagttggtctaatagtagaactttaaaattttttcttattgtgaggaatctgttaaaagtttaaagctttgctgaaaactgaattcattctcaggaatttcataaatcttctccccaggtaaataattgaaatagctgtaaaataagtagatagctgctgttaatataatacagtacattttggggggcatatgtgtggttggggggtccttaaaaatcaaaatttgccatttcagttggatgaattactagaggtaataacaaatcttactatgaaatcaagaggtttaagaacatacactgggcagatgttgattccgtgcatgcccaccttttattaccaaacaaggttttgtttatatgattgtattagaaatgctcagacttccccagaaatgaaccataaattttggaacttcctttcagctcaagaggttcagctatattgtatttgtgcagtgtaatcactactatttctgctcggtttcctaaaaggaaaaaaaaggcgcagtggtgatgaccctcatgaatgagccacgcttctgcattcttcttagaaactgctgtgaaaaacaatttatgtttgcagggtttaaaaatcagtaaaaatgggaatgattgagctaaaacccactctatgagaaggaagattactgaaaagcatgtgacatattgctacaaagattttttttcctaaatgattcagtaattgaatgattatttaatatatagtgctatcaagcaatccctggtactttggacttccatggcttgttatataaaattacatttttacatgtaaaaataaactaaacaaatctaatgataaaatatgtcagatccatgttctaaaaaatttttgtaatgacatgacattacaagagtataaaaatggacattaaatcatggccttgcattaaaatatggaaagcagagcagtacatattcaaatgtattcagaaagtcaaaagattacctatcgttctacaataaaatacatggaaatagcttgctatttttatatacatttccaaaatattaagataactttctgtaagagtcaatgattctgttcgactaaatagctgtcctttccaacacattgctacttttttaaatactgtatcataagttcagcctgtcatactttttgcattgatcgttatgaataccagaccatttgtaagtgtggttgaagagcaaaatgctaattgacatctctagtaaatactgttacaggattcatgaacttgaataattctacagtttgaaactctgatgctatatatacatggtataatgtattcagactttgattactacttatttaaaatggaatgttttatggttgtgcatatggatgtgaagtgaaaatattagccttaactttaaaatttgggtgtttgatagtgtttattttgatattggtgaattagtcaccagtaaattttaaaaaagcacttggttgaaaattgtacttgaatacatacatgcatgctgctaaactagaactttaatttttccccataacttttataagtcccatttataaacccacttttaaaaataacaggtccaagttagagtgatgtgtgtatattattcaaaaaaatgtactggtgtgatatcttgtatgaatgatcatttaaatacagtacattactgtagaagctaaattgatctttataattaagcagaaattacaaaactaggaataatcaacattgtaagatatgttaataaaaacctgctgtcatttggtttgtgaaaggtccttaaaa

SEQ ID NO: 247955 - DNA, 7951 bp, Artificial Sequence
  derived and/or modified sequence
atggcggcggcggccgcggcggccgtcgggggccagcagccgtcacagcccgagctgcccgcgccggggctggccctagacaaggcggccaccgccgcgcacctcaaggcggccctcagccggccggacaaccgcgcaggtgctgaggagctgcaggcgctgctggagcgggtgctgagcgccgagcggccgctggccgcggctgccggcggcgaggacgcggcggcggccggaggcgggggcggtccgggggcggccgaggaggaggccctggagtggtgtaagtgccttctggcgggcggcggcggctacgacgagttctgcgcggcggtgcgggcctacgatcccgcggcgctctgcggcctggtctggacagccaacttcgtggcctaccgctgccggacgtgcggcatctcgccctgcatgtcgctgtgcgccgagtgcttccaccagggcgaccacaccggacacgacttcaacatgttccgcagccaggccgggggcgcctgcgactgcggggacagcaacgtgatgcgggagagcgggttttgcaaaaggcatcaaattaaatcaagttcaaatattccctgtgtccctaaagacttactgatgatgtctgaatttgttcttccaagatttatattttgtcttattcagtacttaagagaaggctataatgaaccagcagctgatggaccatcagaaaaggaccttaacaaagtccttcagcttttggaacctcaaatttcctttttagaagacctgactaaaatgggaggagcaatgcggtctgttcttactcaggttttgacaaaccaacaaaactacaaagatctgacttctggtcttggagaaaatgcttgtgtaaagaaaagtcatgaaaagtaccttatagctttaaagagctctggacttacatatcctgaggataagcttgtatatggtgtgcaggagccatctgctggtactagttctctggctgttcaaggtttcataggcgcaacaggaactttgggacaagtggattcttcagatgaggatgatcaggatggtagtcaaggtctgggcaagagaaaaagggtaaaactaagcagtggcaccaaagatcaatccataatggatgttttgaagcataaaagcttcctagaagaactattattttggactataaaatatgaattccctcaaaagatggtaactttcttactcaacatgcttccagatcaagagtataaggttgcttttacaaaaacttttgttcagcattatgctttcattatgaaaacactgaagaaaagtcatgaatcagacacaatgtctaacagaattgtgcatattagtgttcagttgttcagcaatgaggagctagccagacaggtaacagaagaatgtcagctgctggatattatggtcactgtgctattatacatgatggaaagttgccttattaaaagtgagctacaagatgaagaaaatagtttacatgtggtagtgaactgtggagaagcattactgaagaataacacttactggcctcttgttagtgattttattaatattctttctcatcaaagtgtggccaagagatttttggaggatcacggtttgttagttacatggatgaactttgtatctttctttcaaggtatgaacttaaacaagcgagaactaaacgagcatgtggaatttgagtctcagacctactatgctgcctttgctgctgaacttgaggcctgtgcacagccaatgtgggggcttttatcacattgtaaagttagggaaactcaagagtatacccgaaatgttgttagatattgccttgaagctcttcaagactggtttgatgctattaacttcgtagacgagccagcacctaaccaagtcacttttcatctgccactacatcgttactatgctatgtttttgagtaaggctgtgaaatgtcaagaactagatttggattctgttttaccagatcaggaaatgttaatgaaactaatgattcacccactccaaattcaagcaagtcttgcagaaatccacagcaatatgtgggtaagaaatggtctgcaaatcaaaggacaagccatgacgtatgtccagtctcatttctgtaattccatgattgatcctgacatttacctgttacaggtttgtgcttctagacttgacccagattattttatttcatccgtctttgaaagatttaaggtagtggatttgttgacaatggcatcacaacatcaaaatacagtacttgatgcagagcatgagaggtcgatgttagaaggcgctcttacatttcttgtgattcttttgagtcttcgtttacatttaggaatgtctgatgatgagattctcagggccgagatggtagcccagctgtgtatgaatgacaggacacacagttcattgctggacctcattccagaaaatcctaatcccaaaagtggcattattccaggcagttacagctttgaatcagttttatcagctgtagctgattttaaggctcctgtttttgaacctggaggttctatgcaacaaggcatgtatactcccaaagctgaagtctgggatcaagagtttgaccccgtcatggtcattcttcgaacagtttaccgtagagatgtgcagtctgcaatggacagatatactgcatttttaaaacagagtggaaaatttcctggaaatccctggcctccatataagaaaaggacatcactccatcctagctataaaggtcttatgagacttttgcactgtaaaactttacacattgtgctattcactctgctttacaagattttgatggatcatcaaaatctgtcagaacatgtactctgcatggttttatatctgattgaattaggacttgaaaattctgctgaagaagaatcagatgaagaggcatcagtgggtggaccagaacgttgtcatgacagttggtttcctggcagtaacttagtgtcaaacatgcgacactttataaactatgttagagtaagagttccagagactgctcctgaagtaaagagagactcacctgcaagtactagctctgataacttgggttctttacaaaattctggtacagctcaagttttcagtttagtagcagaacgtagaaagaaatttcaggaaatcatcaatcgcagtagcagtgaagcaaatcaggtggttcgtcccaaaacttcaagtaaatggtctgctcctggttcagctccacagttaactacagccattttggaaattaaagaaagcatattgtctttgctaattaaacttcaccacaaactctcaggaaaacaaaactcctactatcctccttggcttgatgacatagaaattttaatccaaccagaaattcctaaatacagtcatggagatggtataactgccgtggaaagaattttactaaaagctgcatcgcaaagtagaatgaacaaacgcatcattgaagagatatgtagaaaagtgacccctcctgtaccacctaaaaaagtcactgcagcagagaagaaaacattggacaaagaagaaaggcgacagaaggctagagagaggcagcagaaattgcttgcggagtttgcttcacgacagaaaagctttatggaaactgcaatggatgttgattctcctgagaatgatattcctatggagatcaccacggcagaaccacaggtttccgaggcagtatatgactgtgttatttgtggacagagtggcccctcctctgaagatcgacctactggattagttgtactgttacaagcatcctcagttttggggcagtgccgtgacaatgttgagccaaaaaagttgccgatcagtgaagaggagcagatttacccttgggatacctgtgcagccgttcatgatgtgaggctttcattattacagcgttattttaaggatagttcatgtctcttggcagtatcaattggctgggaaggaggtgtttatgtacaaacctgtggtcacacattacatatagattgtcataaatcttacatggaatcattacggaatgaccaggttcttcagggcttctcggtggacaaaggagaattcacgtgtccactctgtaggcagtttgctaacagtgttcttccatgttatcctggaagcaatgtggaaaataacccttggcaacgtcctagcaacaaaagcatacaagatctcataaaggaagtggaggagctgcagggacgaccgggagctttcccatcagaaacaaatttaagtaaagaaatggaatctgtaatgaaagatataaaaaataccactcagaagaaatatagagactatagcaagaccccgggctcaccagacaatgattttctctttatgtactctgttgctagaaccaatttagaacttgaattgattcatcgaggaggcaatttgtgttcaggtggtgcaagcacagctggcaaaaggtcttgtttaaatcagctgtttcatgtattagccttgcacatgcggctttatagcattgactctgagtataatccctggagaaagctcacccagttagaagagatgaatccacagctgggatatgaagaacaacagcctgaggttccaattctttatcatgatgtaacatcccttttgctcatccagatcttaatgatgccacaacccttacgcaaagaccactttacctgcattgtgaaggtactttttaccctactgtacacacaggctcttgcagcactctcagttaaatgcagcgaagaagataggtcagcctggaaacacgcgggagctctcaaaaagagtacatgtgatgcagaaaagtcttacgaagtattactgagctttgtgataagtgaactatttaaaggaaagttataccatgaagaaggaactcaggaatgtgcaatggttaaccctattgcttggtctcctgaatccatggaaaaatgcttacaggacttctgcttaccttttctcagaatcaccagccttcttcagcaccacctttttggggaagatttacctagctgccaggaagaagaagaattttcagttcttgccagctgcctgggacttctgccaacgttttaccaaacagaacatccattcatcagtgcctcctgtctggattggccagttccagcatttgatattataactcagtggtgttttgagataaaatcatttactgaaagacatgcagaacaaggaaaggccttgcttatccaagagtcaaaatggaaattaccacacctactacagttgcctgagaattataacaccatttttcagtactaccacagaaaaacctgtagtgtctgcaccaaggttcctaaagatcctgctgtttgccttgtgtgtggtacttttgtatgcctgaaaggactttgctgcaagcaacaaagttactgtgaatgtgtactgcactctcagaactgtggtgcaggaacaggtattttccttttgatcaatgcatcggtaattatcatcattcgaggtcaccgcttctgcctctggggttccgtgtatttggatgctcatggagaggaagaccgggatcttaggcgaggcaaacctctctacatttgtaaggaaagatacaaagttcttgagcaacagtggatttctcatacttttgatcacatcaataaaagatggggtccacattacaatgggctgtgactctccacctcagcattgcatcgtatcatcattttcgctacgaatttatttttcaacaataagctttaacttaatttgggggattaacacttttgctgagggagaaaaagaaaacatacattatgaagcctttccaaaattaggtgcttggtaatcacgttaatggtataattttttttttttaatatctggagaacattaataacaagttaaattattctttagtggtcattttttaagtgcacaattaataagaagcacaacttgttcacaaactcattcagaaatgattctcccaacaatgcgtatcagctattcattgatacttagagtgggtgtgatttatttgacattttactgcttctttctgtctgtgtgttttaatttgcatctgccaagcataatgcatcttttttcctctgccattcttgtgttgattggagaatttttctgtatgtaattagaaaaaaatgtaaaacatgatttatgtgaaatactgtatagtaaaagttggtctaatagtagaactttaaaattttttcttattgtgaggaatctgttaaaagtttaaagctttgctgaaaactgaattcattctcaggaatttcataaatcttctccccaggtaaataattgaaatagctgtaaaataagtagatagctgctgttaatataatacagtacattttggggggcatatgtgtggttggggggtccttaaaaatcaaaatttgccatttcagttggatgaattactagaggtaataacaaatcttactatgaaatcaagaggtttaagaacatacactgggcagatgttgattccgtgcatgcccaccttttattaccaaacaaggttttgtttatatgattgtattagaaatgctcagacttccccagaaatgaaccataaattttggaacttcctttcagctcaagaggttcagctatattgtatttgtgcagtgtaatcactactatttctgctcggtttcctaaaaggaaaaaaaaggcgcagtggtgatgaccctcatgaatgagccacgcttctgcattcttcttagaaactgctgtgaaaaacaatttatgtttgcagggtttaaaaatcagtaaaaatgggaatgattgagctaaaacccactctatgagaaggaagattactgaaaagcatgtgacatattgctacaaagattttttttcctaaatgattcagtaattgaatgattatttaatatatagtgctatcaagcaatccctggtactttggacttccatggcttgttatataaaattacatttttacatgtaaaaataaactaaacaaatctaatgataaaatatgtcagatccatgttctaaaaaatttttgtaatgacatgacattacaagagtataaaaatggacattaaatcatggccttgcattaaaatatggaaagcagagcagtacatattcaaatgtattcagaaagtcaaaagattacctatcgttctacaataaaatacatggaaatagcttgctatttttatatacatttccaaaatattaagataactttctgtaagagtcaatgattctgttcgactaaatagctgtcctttccaacacattgctacttttttaaatactgtatcataagttcagcctgtcatactttttgcattgatcgttatgaataccagaccatttgtaagtgtggttgaagagcaaaatgctaattgacatctctagtaaatactgttacaggattcatgaacttgaataattctacagtttgaaactctgatgctatatatacatggtataatgtattcagactttgattactacttatttaaaatggaatgttttatggttgtgcatatggatgtgaagtgaaaatattagccttaactttaaaatttgggtgtttgatagtgtttattttgatattggtgaattagtcaccagtaaattttaaaaaagcacttggttgaaaattgtacttgaatacatacatgcatgctgctaaactagaactttaatttttccccataacttttataagtcccatttataaacccacttttaaaaataacaggtccaagttagagtgatgtgtgtatattattcaaaaaaatgtactggtgtgatatcttgtatgaatgatcatttaaatacagtacattactgtagaagctaaattgatctttataattaagcagaaattacaaaactaggaataatcaacattgtaagatatgttaataaaaacctgctgtcatttggtttgtgaaaggtcctt

SEQ ID NO: 247956 - DNA, 8038 bp, Artificial Sequence
  derived and/or modified sequence
atggcggcggcggccgcggcggccgtcgggggccagcagccgtcacagcccgagctgcccgcgccggggctggccctagacaaggcggccaccgccgcgcacctcaaggcggccctcagccggccggacaaccgcgcaggtgctgaggagctgcaggcgctgctggagcgggtgctgagcgccgagcggccgctggccgcggctgccggcggcgaggacgcggcggcggccggaggcgggggcggtccgggggcggccgaggaggaggccctggagtggtgtaagtgccttctggcgggcggcggcggctacgacgagttctgcgcggcggtgcgggcctacgatcccgcggcgctctgcggcctggtctggacagccaacttcgtggcctaccgctgccggacgtgcggcatctcgccctgcatgtcgctgtgcgccgagtgcttccaccagggcgaccacaccggacacgacttcaacatgttccgcagccaggccgggggcgcctgcgactgcggggacagcaacgtgatgcgggagagcgggttttgcaaaaggcatcaaattaaatcaagttcaaatattccctgtgtccctaaagacttactgatgatgtctgaatttgttcttccaagatttatattttgtcttattcagtacttaagagaaggctataatgaaccagcagctgatggaccatcagaaaaggaccttaacaaagtccttcagcttttggaacctcaaatttcctttttagaagacctgactaaaatgggaggagcaatgcggtctgttcttactcaggttttgacaaaccaacaaaactacaaagatctgacttctggtcttggagaaaatgcttgtgtaaagaaaagtcatgaaaagtaccttatagctttaaagagctctggacttacatatcctgaggataagcttgtatatggtgtgcaggagccatctgctggtactagttctctggctgttcaaggtttcataggcgcaacaggaactttgggacaagtggattcttcagatgaggatgatcaggatggtagtcaaggtctgggcaagagaaaaagggtaaaactaagcagtggcaccaaagatcaatccataatggatgttttgaagcataaaagcttcctagaagaactattattttggactataaaatatgaattccctcaaaagatggtaactttcttactcaacatgcttccagatcaagagtataaggttgcttttacaaaaacttttgttcagcattatgctttcattatgaaaacactgaagaaaagtcatgaatcagacacaatgtctaacagaattgtgcatattagtgttcagttgttcagcaatgaggagctagccagacaggtaacagaagaatgtcagctgctggatattatggtcactgtgctattatacatgatggaaagttgccttattaaaagtgagctacaagatgaagaaaatagtttacatgtggtagtgaactgtggagaagcattactgaagaataacacttactggcctcttgttagtgattttattaatattctttctcatcaaagtgtggccaagagatttttggaggatcacggtttgttagttacatggatgaactttgtatctttctttcaaggtatgaacttaaacaagcgagaactaaacgagcatgtggaatttgagtctcagacctactatgctgcctttgctgctgaacttgaggcctgtgcacagccaatgtgggggcttttatcacattgtaaagttagggaaactcaagagtatacccgaaatgttgttagatattgccttgaagctcttcaagactggtttgatgctattaacttcgtagacgagccagcacctaaccaagtcacttttcatctgccactacatcgttactatgctatgtttttgagtaaggctgtgaaatgtcaagaactagatttggattctgttttaccagatcaggaaatgttaatgaaactaatgattcacccactccaaattcaagcaagtcttgcagaaatccacagcaatatgtgggtaagaaatggtctgcaaatcaaaggacaagccatgacgtatgtccagtctcatttctgtaattccatgattgatcctgacatttacctgttacaggtttgtgcttctagacttgacccagattattttatttcatccgtctttgaaagatttaaggtagtggatttgttgacaatggcatcacaacatcaaaatacagtacttgatgcagagcatgagaggtcgatgttagaaggcgctcttacatttcttgtgattcttttgagtcttcgtttacatttaggaatgtctgatgatgagattctcagggccgagatggtagcccagctgtgtatgaatgacaggacacacagttcattgctggacctcattccagaaaatcctaatcccaaaagtggcattattccaggcagttacagctttgaatcagttttatcagctgtagctgattttaaggctcctgtttttgaacctggaggttctatgcaacaaggcatgtatactcccaaagctgaagtctgggatcaagagtttgaccccgtcatggtcattcttcgaacagtttaccgtagagatgtgcagtctgcaatggacagatatactgcatttttaaaacagagtggaaaatttcctggaaatccctggcctccatataagaaaaggacatcactccatcctagctataaaggtcttatgagacttttgcactgtaaaactttacacattgtgctattcactctgctttacaagattttgatggatcatcaaaatctgtcagaacatgtactctgcatggttttatatctgattgaattaggacttgaaaattctgctgaagaagaatcagatgaagaggcatcagtgggtggaccagaacgttgtcatgacagttggtttcctggcagtaacttagtgtcaaacatgcgacactttataaactatgttagagtaagagttccagagactgctcctgaagtaaagagagactcacctgcaagtactagctctgataacttgggttctttacaaaattctggtacagctcaagttttcagtttagtagcagaacgtagaaagaaatttcaggaaatcatcaatcgcagtagcagtgaagcaaatcaggtggttcgtcccaaaacttcaagtaaatggtctgctcctggttcagctccacagttaactacagccattttggaaattaaagaaagcatattgtctttgctaattaaacttcaccacaaactctcaggaaaacaaaactcctactatcctccttggcttgatgacatagaaattttaatccaaccagaaattcctaaatacagtcatggagatggtataactgccgtggaaagaattttactaaaagctgcatcgcaaagtagaatgaacaaacgcatcattgaagagatatgtagaaaagtgacccctcctgtaccacctaaaaaagtcactgcagcagagaagaaaacattggacaaagaagaaaggcgacagaaggctagagagaggcagcagaaattgcttgcggagtttgcttcacgacagaaaagctttatggaaactgcaatggatgttgattctcctgagaatgatattcctatggagatcaccacggcagaaccacaggtttccgaggcagtatatgactgtgttatttgtggacagagtggcccctcctctgaagatcgacctactggattagttgtactgttacaagcatcctcagttttggggcagtgccgtgacaatgttgagccaaaaaagttgccgatcagtgaagaggagcagatttacccttgggatacctgtgcagccgttcatgatgtgaggctttcattattacagcgttattttaaggatagttcatgtctcttggcagtatcaattggctgggaaggaggtgtttatgtacaaacctgtggtcacacattacatatagattgtcataaatcttacatggaatcattacggaatgaccaggttcttcagggcttctcggtggacaaaggagaattcacgtgtccactctgtaggcagtttgctaacagtgttcttccatgttatcctggaagcaatgtggaaaataacccttggcaacgtcctagcaacaaaagcatacaagatctcataaaggaagtggaggagctgcagggacgaccgggagctttcccatcagaaacaaatttaagtaaagaaatggaatctgtaatgaaagatataaaaaataccactcagaagaaatatagagactatagcaagaccccgggctcaccagacaatgattttctctttatgtactctgttgctagaaccaatttagaacttgaattgattcatcgaggaggcaatttgtgttcaggtggtgcaagcacagctggcaaaaggtcttgtttaaacttttgcttcattatttttccctttactaaatcagaaattatactgtgccaatatagaaaaagtcatgataaagtttatcctaaatatcagctgtttcatgtattagccttgcacatgcggctttatagcattgactctgagtataatccctggagaaagctcacccagttagaagagatgaatccacagctgggatatgaagaacaacagcctgaggttccaattctttatcatgatgtaacatcccttttgctcatccagatcttaatgatgccacaacccttacgcaaagaccactttacctgcattgtgaaggtactttttaccctactgtacacacaggctcttgcagcactctcagttaaatgcagcgaagaagataggtcagcctggaaacacgcgggagctctcaaaaagagtacatgtgatgcagaaaagtcttacgaagtattactgagctttgtgataagtgaactatttaaaggaaagttataccatgaagaaggaactcaggaatgtgcaatggttaaccctattgcttggtctcctgaatccatggaaaaatgcttacaggacttctgcttaccttttctcagaatcaccagccttcttcagcaccacctttttggggaagatttacctagctgccaggaagaagaagaattttcagttcttgccagctgcctgggacttctgccaacgttttaccaaacagaacatccattcatcagtgcctcctgtctggattggccagttccagcatttgatattataactcagtggtgttttgagataaaatcatttactgaaagacatgcagaacaaggaaaggccttgcttatccaagagtcaaaatggaaattaccacacctactacagttgcctgagaattataacaccatttttcagtactaccacagaaaaacctgtagtgtctgcaccaaggttcctaaagatcctgctgtttgccttgtgtgtggtacttttgtatgcctgaaaggactttgctgcaagcaacaaagttactgtgaatgtgtactgcactctcagaactgtggtgcaggaacaggtattttccttttgatcaatgcatcggtaattatcatcattcgaggtcaccgcttctgcctctggggttccgtgtatttggatgctcatggagaggaagaccgggatcttaggcgaggcaaacctctctacatttgtaaggaaagatacaaagttcttgagcaacagtggatttctcatacttttgatcacatcaataaaagatggggtccacattacaatgggctgtgactctccacctcagcattgcatcgtatcatcattttcgctacgaatttatttttcaacaataagctttaacttaatttgggggattaacacttttgctgagggagaaaaagaaaacatacattatgaagcctttccaaaattaggtgcttggtaatcacgttaatggtataattttttttttttaatatctggagaacattaataacaagttaaattattctttagtggtcattttttaagtgcacaattaataagaagcacaacttgttcacaaactcattcagaaatgattctcccaacaatgcgtatcagctattcattgatacttagagtgggtgtgatttatttgacattttactgcttctttctgtctgtgtgttttaatttgcatctgccaagcataatgcatcttttttcctctgccattcttgtgttgattggagaatttttctgtatgtaattagaaaaaaatgtaaaacatgatttatgtgaaatactgtatagtaaaagttggtctaatagtagaactttaaaattttttcttattgtgaggaatctgttaaaagtttaaagctttgctgaaaactgaattcattctcaggaatttcataaatcttctccccaggtaaataattgaaatagctgtaaaataagtagatagctgctgttaatataatacagtacattttggggggcatatgtgtggttggggggtccttaaaaatcaaaatttgccatttcagttggatgaattactagaggtaataacaaatcttactatgaaatcaagaggtttaagaacatacactgggcagatgttgattccgtgcatgcccaccttttattaccaaacaaggttttgtttatatgattgtattagaaatgctcagacttccccagaaatgaaccataaattttggaacttcctttcagctcaagaggttcagctatattgtatttgtgcagtgtaatcactactatttctgctcggtttcctaaaaggaaaaaaaaggcgcagtggtgatgaccctcatgaatgagccacgcttctgcattcttcttagaaactgctgtgaaaaacaatttatgtttgcagggtttaaaaatcagtaaaaatgggaatgattgagctaaaacccactctatgagaaggaagattactgaaaagcatgtgacatattgctacaaagattttttttcctaaatgattcagtaattgaatgattatttaatatatagtgctatcaagcaatccctggtactttggacttccatggcttgttatataaaattacatttttacatgtaaaaataaactaaacaaatctaatgataaaatatgtcagatccatgttctaaaaaatttttgtaatgacatgacattacaagagtataaaaatggacattaaatcatggccttgcattaaaatatggaaagcagagcagtacatattcaaatgtattcagaaagtcaaaagattacctatcgttctacaataaaatacatggaaatagcttgctatttttatatacatttccaaaatattaagataactttctgtaagagtcaatgattctgttcgactaaatagctgtcctttccaacacattgctacttttttaaatactgtatcataagttcagcctgtcatactttttgcattgatcgttatgaataccagaccatttgtaagtgtggttgaagagcaaaatgctaattgacatctctagtaaatactgttacaggattcatgaacttgaataattctacagtttgaaactctgatgctatatatacatggtataatgtattcagactttgattactacttatttaaaatggaatgttttatggttgtgcatatggatgtgaagtgaaaatattagccttaactttaaaatttgggtgtttgatagtgtttattttgatattggtgaattagtcaccagtaaattttaaaaaagcacttggttgaaaattgtacttgaatacatacatgcatgctgctaaactagaactttaatttttccccataacttttataagtcccatttataaacccacttttaaaaataacaggtccaagttagagtgatgtgtgtatattattcaaaaaaatgtactggtgtgatatcttgtatgaatgatcatttaaatacagtacattactgtagaagctaaattgatctttataattaagcagaaattacaaaactaggaataatcaacattgtaagatatgttaataaaaacctgctgtcatttggtttgtgaaaggtcctt

SEQ ID NO: 247957 - protein, 1133 aa, Artificial Sequence
  derived and/or modified sequence
MPVQAPQWTDFLSCPICTQTFDETIRKPISLGCGHTVCKMCLNKLHRKACPFDQTTINTDIELLPVNSALLQLVGAQVPEQQPITLCSGVEDTKHYEEAKKCVEELALYLKPLSSARGVGLNSTTQSVLSRPMQRKLVTLVHCQLVEEEGRIRAMRAARSLGERTVTELILQHQNPQQLSSNLWAAVRARGCQFLGPAMQEEALKLVLLALEDGSALSRKVLVLFVVQRLEPRFPQASKTSIGHVVQLLYRASCFKVTKRDEDSSLMQLKEEFRTYEALRREHDSQIVQIAMEAGLRIAPDQWSSLLYGDQSHKSHMQSIIDKLQTPASFAQSVQELTIALQRTGDPANLNRLRPHLELLANIDPSPDAPPPTWEQLENGLVAVRTVVHGLVDYIQNHSKKGADQQQPPQHSKYKTYMCRDMKQRGGCPRGASCTFAHSQEELEKFRKMNKRLVPRRPLSASLGQLNEVGLPSAAILPDEGAVDLPSRKPPALPNGIVSTGNTVTQLIPRGTDPSYDSSLKPGKIDHLSSSAPGSPPDLLESVPKSISALPVNPHSIPPRGPADLPPMPVTKPLQMVPRGSQLYPAQQTDVYYQDPRGAAPPFEPAPYQQGMYYTPPPQCVSRFVRPPPSAPEPAPPYLDHYPPYLQERVVNSQYGTQPQQYPPIYPSHYDGRRVYPAPSYTREEIFRESPIPIEIPPAAVPSYVPESRERYQQIESYYPVAPHPTQIRPSYLREPPYSRLPPPPQPHPSLDELHRRRKEIMAQLEERKVISPPPFAPSPTLPPTFHPEEFLDEDLKVAGKYKGNDYSQYSPWSCDTIGSYIGTKDAKPKDVVAAGSVEMMNVESKGMRDQRLDLQRRAAETSDDDLIPFGDRPTVSRFGAISRTSKTIYQGAGPMQAMAPQGAPTKSINISDYSPYGTHGGWGASPYSPHQNIPSQGHFSERERISMSEVASHGKPLPSAEREQLRLELQQLNHQISQQTQLRGLEAVSNRLVLQREANTLAGQSQPPPPPPPKWPGMISSEQLSLELHQVEREIGKRTRELSMENQCSLDMKSKLNTSKQAENGQPEPQNKVPAEDLTLTFSDVPNGSALTQENISLLSNKTSSLNLSEDPEGGGDNNDSQRSGVTPSSAP

SEQ ID NO: 247958 - DNA, 3402 bp, Artificial Sequence
  derived and/or modified sequence
atgcctgtgcaggccccacaatggactgattttctaagctgtcccatctgcacgcaaacatttgacgagaccattagaaagccgatatctctaggctgtgggcacaccgtctgtaagatgtgtctcaacaagttgcatcgcaaggcttgtccgtttgatcagaccaccataaacacagacatcgaattgctacctgtgaacagtgccctcttgcagctcgttggagcgcaggtccctgagcagcagcccatcaccctgtgcagtggagtggaagatactaagcactatgaggaggcaaagaaatgtgttgaagagcttgcgctgtacttgaaaccgctttctagtgccagaggtgtgggtctcaattctacgacccagtctgtcctgtcaagacccatgcagcggaagctggtgaccttggtccattgtcagttagttgaggaagagggccgaatccgtgctatgcgagcagctaggagtctgggggagcggaccgtgacggagctgatcttgcaacatcagaatcctcaacaactgtccagcaacctgtgggcagcagttcgggcaaggggttgccagtttttagggccagctatgcaggaagaagcactaaaactcgtgttactggccctggaagatggcagcgctttgagccggaaggtgctggtgcttttcgtagttcagagactcgagcctcgttttcctcaggctagcaagacgtcaatcgggcatgttgtgcagctgctctatcgggcgagttgttttaaagtcacaaagcgcgacgaagattcttctctgatgcagctcaaggaggaattcagaacatacgaggccctccgccgggagcacgatagccaaattgtgcagattgctatggaggcggggcttcggattgcacccgaccagtggtcgtcccttctctatggcgaccagtctcacaagtctcacatgcagagcatcatagataagctgcagacccctgctagctttgcccagagcgtccaagagttgacaattgccctgcagagaacaggcgacccagccaatcttaaccgccttcgcccccatttagagctcttagctaacatcgacccctccccggacgcaccaccccccacctgggaacagctggagaacggactcgtggcagtgcgaacagttgtccacggtttagtggactacatacaaaatcatagtaaaaagggagcagatcagcagcagccacctcagcactcaaaatacaaaacctacatgtgccgggacatgaaacagcggggtggttgtccaagaggcgcttcctgcacattcgcacacagtcaggaagaacttgagaaatttagaaagatgaacaaaaggctcgtaccgaggaggcccctgagtgccagcctcggacagctgaatgaggtgggccttccctcggccgccatactacctgacgagggcgctgtagatttgccatcacggaaaccgcccgctctgcctaatggaatcgtgtccaccggaaatacagtgactcagctgatacccaggggaacggaccccagctacgactcgagcctgaaaccaggtaaaattgaccatttaagcagcagcgctcccggatcaccccctgaccttctggaaagcgttcctaaatctatctccgccctgcccgtgaatcctcattcaatacccccacggggacctgccgatttaccacctatgccggtcaccaagccattacagatggtgccaagagggtctcagctgtaccctgcacagcagaccgatgtttattatcaagacccacgtggagccgcccctcctttcgaacccgcaccctaccagcagggcatgtattataccccccctcctcaatgcgtctccagattcgtcaggccgccgccgtcagcgcccgaacccgcccctccctacctggatcactaccccccctacctgcaggagagagtagtcaatagtcagtacggcacccagccccagcagtatccccctatctatccttcccattacgatggccgccgggtgtaccctgctcccagctacactcgtgaagagatcttccgggaatcgccaatccctatcgagatcccaccggccgctgtccccagttacgttccggaatcaagagagagatatcagcagatcgaatcgtattatcctgttgctccccacccgacacaaatacgccctagctacctacgcgaacctccatattcgagactgcctccccctccacaaccacatcccagtctggatgagttgcatcgtaggcgcaaagagatcatggcccagctggaagaaagaaaggtaatcagccctccccccttcgccccgtctccaaccctgcctcccacgtttcatcccgaagaattcctagatgaggacttgaaggttgctggaaagtacaagggaaatgattattcccagtactcgccctggtcctgcgacactattggatcctacattggcaccaaagatgctaaaccaaaagatgtagtggccgctggctccgttgagatgatgaacgttgagtcaaagggcatgagagaccagcggctagacctgcaaagacgggccgccgagacgtcagatgacgatctcatcccattcggagatcgcccgacagtgtcgcgcttcggggccatctcccggacatcgaaaacaatctatcaaggagcaggaccaatgcaggccatggcaccccagggtgctcccactaaaagcattaatatatccgactactctccttacggcacacacggcggctggggggcttccccctattctcctcaccagaacatcccatcacagggacacttctccgaacgtgagcgcattagtatgagcgaagtggcctcccacggcaagccgcttccatccgcggaacgcgagcagctgcggctagagctgcagcagctgaaccaccagattagccagcaaactcagctgcgcggactcgaagccgttagtaatcggttggttttgcagcgggaggctaacacattagcagggcaatcacagccgccaccacccccaccgccaaaatggccaggcatgatttcatccgagcagctgtccttggaactccatcaggtggaaagagaaatcggtaagcgtactcgggaactatctatggagaaccaatgctctttagacatgaagagcaagctgaacacttctaaacaagccgaaaacggacagcctgaaccgcaaaacaaggttcctgccgaggacctgaccttaaccttctccgacgtaccaaatgggtccgccttaacacaggagaatatatctctcttaagcaacaaaacttcgtcgctgaatctgagcgaggatccagaaggtggaggggataacaacgattcccagcggtccggtgtgacaccatcgtccgcaccctag

SEQ ID NO: 247959 - DNA, 3402 bp, Artificial Sequence
  derived and/or modified sequence
atgcctgtacaggcccctcagtggaccgatttcttatcatgccctatttgtacccagactttcgacgagaccataagaaagcctatttctctggggtgtggtcacaccgtgtgtaaaatgtgtttgaataagctgcacaggaaggcctgcccgttcgaccagacaacaattaacacggacatcgagctgctgccagtcaactctgcattactgcagctggtgggggcccaagttcccgagcagcagcccattactctttgcagtggcgtggaggacacaaaacattacgaagaagcaaaaaaatgcgttgaggaactggcactatatctgaaacccctgtctagtgcaaggggcgttggtttgaactccaccacccagagcgtgctttcacgcccaatgcagcggaagctggtgactttagtgcactgtcaattagtagaggaagaggggcggatcagggctatgcgggctgccagatccctgggcgagcgtacagtgactgaactcatcctccagcatcaaaacccgcagcagctgagctcgaacctgtgggccgccgtgagggcacgtggatgccagttcttaggccccgcaatgcaggaggaagccctgaagctcgtcttactggctctcgaggatggaagtgccctgagcagaaaagtgttggtgctgtttgtcgtccaaagacttgaacccaggttcccccaagcttcaaagacttccatcgggcacgtggttcagcttctttaccgcgcttcttgctttaaagtcaccaagcgcgacgaggactcgtcgctcatgcagctgaaggaagaattcagaacctatgaagcacttcgccgggagcatgactcccaaatcgtgcagattgccatggaggctgggctccgtattgcacctgaccagtggagttcgttgttatatggtgatcagagccacaagtctcatatgcaatcaataattgacaagttgcagactccagcgagctttgcccagtctgtacaggaattaacgatagcgcttcaacggactggagatccagccaatttaaataggctcagaccccatctggaactcctggccaatatagatccttcacctgacgcacctcccccaacatgggagcagctcgagaacggcttggttgccgtacgaactgttgtgcacggcctggtcgactatattcagaaccattcaaagaaaggagctgaccaacaacagcctccacagcactcgaagtacaaaacatacatgtgtagagatatgaagcagcgcgggggctgtcctcggggtgccagctgcacctttgcacatagccaggaagagctagagaagtttaggaagatgaataaacgacttgtgccgaggaggcctctctccgcgagtttgggtcagctgaacgaggtgggactgccctcagccgctatattacccgacgagggcgccgttgacctgccgtcacggaagccgcccgcattacctaacggcatcgtgtccactggcaatactgttactcaattaataccccgcgggacagatccatcatacgactcttccttgaagcccggtaaaatagaccatttgagcagctccgccccagggagtccccctgacctgctggaatcagtacccaagtctatatccgccctgcccgtaaacccccacagtatcccacctcggggacccgccgatctgccccccatgccggtaactaaacccctgcagatggtgccccgcggaagccaactgtatcctgcccaacagaccgatgtttattatcaggatccacggggcgctgctcccccatttgagcctgctccttaccaacagggaatgtattacaccccaccgccccagtgtgtcagtcggttcgttaggccccctccctctgctcccgagccagcacctccatacttggaccactaccctccctatctgcaggagagggtcgtgaactctcagtacggcactcagccgcagcagtatcccccaatatatccaagtcactatgacggccgccgagtgtaccccgccccaagctataccagggaggaaatatttcgcgagagcccaataccgattgaaatacccccagcggcggttccctcctacgtgcccgagagcagagaacggtaccagcagattgaatcttactatccagtagctccacaccctacacagattcgccctagctacttgagggagcctccatatagcagactgcctcctccaccccagccacatccaagcttggatgaactccataggcggaggaaagaaattatggcgcaattagaggagaggaaagttataagccccccacctttcgctccgtctccaaccctccctccgaccttccatccagaagagtttctggatgaggatctaaaggttgccggtaaatataagggcaacgactatagccagtattccccatggagctgcgacaccatcggctcttacattggaaccaaggatgccaagcccaaggatgtggttgccgcggggtctgtcgagatgatgaatgtcgaatcaaagggcatgagggatcagcggctggatctacaaagaagggctgccgagacaagcgatgatgacctcatccccttcggcgatcggccaaccgtgagtcgctttggcgctatatcccggaccagcaaaacgatctaccaaggggcgggacccatgcaagcaatggccccacagggggcacccaccaagagtattaacattagtgactacagcccttacggtactcacggcggttggggggcttcaccatactccccacaccagaacatccccagtcagggtcacttttctgaaagagaaagaatttccatgtcggaagtcgcttcccatggcaaaccgcttccctctgcagaacgcgagcaacttcgccttgagcttcaacaattaaaccaccagatatctcagcaaacccagctgcgcggtctagaggcggtgtcaaaccgcttagtgttgcagagagaggccaacacactcgcggggcagagccaaccccctccacctccacctccaaaatggccaggcatgatttcctctgaacagctgagtcttgagctccatcaggtggaacgtgagattgggaagcgtaccagagaactctcaatggagaaccagtgttcccttgacatgaagagcaagctcaatacttctaagcaggccgagaatgggcagccagagcctcaaaacaaggtgcccgctgaggatctcactcttacattctcagacgtaccgaacgggtctgcccttacccaggagaacatctcactcctgagcaacaaaacgagcagcctaaacctgagtgaggaccccgaaggaggcggagataataacgattctcagaggagtggtgtgacgccgagctctgccccctag

SEQ ID NO: 247960 - DNA, 3402 bp, Artificial Sequence
  derived and/or modified sequence
atgcctgtgcaggccccccagtggacagacttcctgagctgccccatctgcacccagacctttgatgagaccatcaggaagcccatcagcctgggctgcggccacacagtgtgcaagatgtgcctgaacaagctgcacaggaaggcctgcccctttgaccagaccaccatcaacacagacatcgagctgctgcctgtgaacagcgccctgctgcagctggtgggcgcccaggtgcctgagcagcagcccatcaccctgtgcagcggcgtggaggacaccaagcactatgaggaggccaagaagtgtgtggaggagctggccctgtacctgaagcccctgagcagcgcccggggcgtgggcctgaacagcaccacccagagcgtgctgagccggcccatgcagaggaagctggtgaccctggtgcactgccagctggtggaggaggagggccgcatccgggccatgagagctgcccggagcctgggggagaggacagtgacagagctgatcctgcagcaccagaacccccagcagctgagcagcaacctgtgggccgctgtgcgggcccggggctgccagttcctgggccctgccatgcaggaggaggccctgaagctggtgctgctggccctggaggatggcagcgccctgagcaggaaggtgctggtgctgtttgtggtgcagaggctggagccccgcttcccccaggccagcaagaccagcatcggccacgtggtgcagctgctgtaccgggccagctgcttcaaggtgaccaagagagatgaggacagcagcctgatgcagctgaaggaggagttccgcacctatgaggccctgcggcgggagcatgacagccagatcgtgcagatcgccatggaggccggcctgcgcatcgccccagaccagtggagcagcctgctgtatggagaccagagccacaagagccacatgcagagcatcatcgacaagctgcagaccccagccagctttgcccagagcgtgcaggagctgaccatcgccctgcagaggactggagaccctgccaacctgaaccggctgcggccccacctggagctgctggccaacatcgaccccagcccagatgcccccccacccacctgggagcagctggagaatggcctggtggccgtgaggacagtggtgcacggcctggtggactacatccagaaccacagcaagaagggagctgaccagcagcagcccccccagcacagcaagtacaagacctacatgtgccgggacatgaagcagaggggcggctgccccaggggggccagctgcacctttgcccacagccaggaggagctggagaagttcaggaagatgaacaagaggctggtgccccggcggcccctgagcgccagcctgggccagctgaatgaggtgggcctgcccagcgctgccatcctgcctgatgaaggagctgtggacctgcccagcaggaagcccccagccctgcccaatggaattgtgtccacaggcaacacagtgacccagctgatcccccggggcacagaccccagctatgacagcagcctgaagccaggcaagattgaccacctgagcagcagcgcccctggcagccccccagacctgctggagagcgtgcccaagagcatcagcgccctgcctgtgaacccccacagcatccccccccggggccctgctgacctgccccccatgcctgtgaccaagcccctgcagatggtgccccggggcagccagctgtacccagcccagcagacagatgtgtactaccaggaccccagaggagctgcccccccatttgagcccgccccctaccagcagggcatgtactacaccccaccaccccagtgtgtgtccagatttgtgcggcccccacccagcgcccctgagcccgccccaccctacctggaccactacccaccctacctgcaggagcgggtggtgaacagccagtatggcacccagccccagcagtacccacccatctaccccagccactatgatggaagaagagtgtacccagcccccagctacacccgggaggagatcttccgggagagccccatccccatcgagatccccccagctgctgtgcccagctatgtgcctgagagccgggagcgctaccagcagatcgagagctactaccctgtggccccccaccccacccagatccggcccagctacctgcgggagcccccctacagccggctgcccccaccaccccagccccaccccagcctggatgagctgcacagaagaaggaaggagatcatggcccagctggaggagaggaaggtgatcagccccccaccatttgcccccagccccaccctgccccccaccttccaccctgaggagttcctggatgaggacctgaaggtggccggcaagtacaagggaaatgactacagccagtacagcccctggagctgtgacaccatcggcagctacatcggcaccaaggatgccaagcccaaggatgtggtggccgccggctctgtggagatgatgaatgtggagagcaagggcatgagggaccagaggctggacctgcagaggagagctgctgagaccagtgatgatgacctgatcccctttggagaccggcccaccgtgtccagatttggagccatcagcaggaccagcaagaccatctaccagggcgccggccccatgcaggccatggccccccagggcgcccccaccaagagcatcaacatcagtgactacagcccctacggcacccacggcggctggggcgccagcccctacagcccccaccagaacatccccagccagggccacttcagcgagcgggagcgcatctccatgtctgaggtggccagccacggcaagcccctgcccagcgctgagcgggagcagctgcggctggagctgcagcagctgaaccaccagatcagccagcagacccagctgcggggcctggaggccgtgagcaaccggctggtgctgcagcgggaggccaacaccctggccggccagagccagcccccacctcctcctccacccaagtggccaggcatgatcagcagcgagcagctgagcctggagctgcaccaggtggagcgggagatcggcaagaggacccgggagctgtccatggagaaccagtgcagcctggacatgaagagcaagctgaacaccagcaagcaggccgagaatggccagcctgagccccagaacaaggtgcctgctgaggacctgaccctgaccttcagtgatgtgcccaacggcagcgccctgacccaggagaacatcagcctgctgagcaacaagaccagcagcctgaacctgtctgaagatcctgagggcggcggggacaacaatgacagccagaggtctggagtgacccccagcagcgccccctag

SEQ ID NO: 247961 - DNA, 3402 bp, Artificial Sequence
  derived and/or modified sequence
atgcccgtgcaggccccccagtggaccgacttcctgagctgccccatctgtacacagacttttgatgagacaattcgcaagcctatctccctaggatgcggccacaccgtgtgtaagatgtgtctgaacaagctccaccggaaagcttgcccattcgatcagaccactatcaataccgacattgaacttctcccggtgaatagcgctctccttcaactggtaggcgcccaggtccccgagcagcaacccatcactctatgctccggtgtcgaagacactaagcattatgaagaggctaaaaaatgtgtggaagagctcgctttgtacctcaagccactatcctctgcccgcggagtgggccttaattcaaccactcagagcgtactgtcacgcccaatgcagaggaagcttgtgaccctggtccactgccagctggtagaggaagagggcagaatccgcgcgatgagagctgctcggtccttgggcgaaagaactgtgacggagctcattctgcagcatcagaacccgcagcagctctctagtaacctctgggccgcggtcagagcccgaggctgccaatttctcgggccggccatgcaggaggaagcgctgaagctggtgcttctcgcactggaagacggatcagccctgtctcgcaaagtcctggttctctttgttgtgcagcgactggagccccggttcccacaagcctctaagacatcaatcggccacgtggttcagctgctgtaccgcgcaagctgttttaaggtaaccaaaagggacgaggattccagtctgatgcagctcaaggaagaattccggacctacgaagctctgagaagagagcacgactcccaaattgttcagatcgccatggaggcaggcctgaggatcgccccagatcaatggagttctttgctatatggggatcaaagtcacaaatcacatatgcagtccattatcgacaagttgcaaacacccgcaagtttcgcgcagagcgttcaggaactgaccatagcgctccaacgcaccggtgatcctgctaatttaaataggctccggccacacctggagctgctagctaacatcgatccaagcccagacgccccacccccaacttgggaacagctggaaaacggtttagtggcagtgaggactgtggtgcatggtctggtggactatatccagaatcatagcaagaagggcgccgatcaacagcagccaccgcagcactcaaagtacaagacctacatgtgcagagatatgaagcagaggggtggatgcccacggggagcttcgtgtaccttcgctcattcccaggaggagttggagaagttcagaaaaatgaataagcgactcgtcccaagacgacctcttagtgcaagcttagggcagttaaacgaggtggggctgccctctgcagccatcctaccagatgagggagctgtcgacctccccagtcgcaaacctccagcactgcccaacggaatcgtaagtaccggaaacacagttactcagctgatcccccgtggaactgatccctcatacgactcctctttgaaacccggtaagatcgatcatctgagctcatctgctcccggaagtccccccgatctcttggaatccgtgcccaaatccatctccgccctgccagtgaatccacattcaattccgccacgagggccagcagacctgccccctatgcctgttacaaaacccctgcagatggtgcctaggggcagtcagttgtacccagctcagcagactgacgtttactaccaggaccctaggggcgctgcaccgcctttcgaacctgccccctatcaacaaggtatgtattatacgccaccacctcaatgtgtgtcccggttcgtgcggcctccacctagcgctcccgagcccgctcccccctatctggatcactatcctccttacttgcaagagagagtagtgaattcccagtacggtacacaaccccagcagtatcctcctatctaccctagccactatgacgggagacgggtctatccagctcccagctatacccgcgaagagatctttagggaaagccctatccccatagaaattccgcctgccgcggttccaagttatgtacccgaaagcagagagcggtaccagcagatcgaaagctactatcctgtggcgcctcacccaactcaaattcggccctcctatctgcgggaacccccctactcaagacttccccctccgccacagccacatccctcactggatgaattgcaccgcaggcggaaagaaattatggcccaacttgaagaaaggaaggtaatctctccaccaccttttgccccatcgcccactcttcctcccacctttcacccggaagaatttttagatgaggaccttaaagtggcgggcaagtataagggcaatgattacagtcagtacagtccttggtcctgtgataccatcggcagttacatcggaactaaagacgcaaagcccaaagacgtggtggctgccggctcagtagaaatgatgaacgtggagtccaagggaatgagggatcaacgcctggacttgcagaggcgggccgcggaaacgtctgacgacgacctcatccctttcggggatagacccaccgtgtcccgcttcggagctatatcacggacatcaaaaaccatttaccagggggccggacccatgcaagccatggcccctcagggcgcacccactaagagcatcaatatcagcgattacagtccatacggcacccatggaggctggggcgctagcccgtacagcccacaccagaacattccctctcaggggcattttagtgagagggagcgcatctcaatgtcagaagtggccagtcacggcaaacctttgccgtctgcggagagagaacagctgaggttagagctccagcaacttaaccaccaaatttcgcagcagacgcagctgcggggactggaggcagtgtctaatcgcctggtgcttcagcgcgaagctaacacattggctggacaaagccaaccacctccacctccaccaccaaagtggccgggcatgatttccagcgagcagctgtcactggagctccaccaggtcgagcgggagattggaaaacgcactcgagaattgtccatggaaaaccagtgttctttggatatgaaatccaaattaaacacttcaaaacaagcggagaacggtcagcccgaacctcagaacaaggtacctgccgaggacttgacactgacatttagcgatgttcctaatggatccgcccttacacaggaaaacatctcacttttatcaaacaaaacttcatcattaaacctgtccgaggaccccgaaggtggcggtgacaacaatgactcacaacggtccggcgtgaccccatcaagtgcgccttag

SEQ ID NO: 247962 - DNA, 3402 bp, Artificial Sequence
  derived and/or modified sequence
atgcccgtgcaggccccccagtggaccgacttcctgagctgccccatctgcacgcaaaccttcgatgagactatcaggaagccaataagcctaggatgtgggcacactgtgtgtaagatgtgtctgaataaactgcaccgaaaggcttgtcccttcgaccagacgacgatcaacacagatattgagctgttgccagtgaacagcgccctgctgcagttagtgggagcacaggtcccagaacagcagccaatcacactctgtagtggagtcgaggataccaaacactatgaagaggcaaaaaaatgtgtcgaagagctggctttatacctcaaaccactaagctccgctagaggcgttggtctgaacagcactactcagtctgtcttaagtcgtccgatgcagcggaagctggttacgctggtacactgtcaacttgtcgaggaggagggccggatccgcgccatgcgcgcagcccgctcattaggcgagagaaccgttaccgagcttatccttcagcatcagaatcctcagcagttgagttcaaacctgtgggccgctgtacgagcacgtggctgccagttcctaggcccggctatgcaagaagaagcgttgaaattggtcttgctcgcactcgaggatggctccgcactctctagaaaagttctggtcctttttgtagtacagcggctcgagccaagatttcctcaggcctccaagacatcaatcgggcatgtcgtccagttgctgtaccgtgcctcgtgcttcaaggtaacaaaaagggacgaagactccagcctcatgcagctgaaggaagagtttaggacatacgaggctcttcggcgggagcacgacagccagattgtccagattgccatggaggcaggcctgcggatcgcccccgaccaatggtcttcccttctgtacggcgaccagtctcacaagtcccacatgcagagtatcattgacaagttgcagactccagcctccttcgcccaaagtgtgcaagaactaactattgctttacaacgaacaggtgatcctgcgaatctgaatcgcctacgaccccatctggagctgctggcgaacattgacccttctcctgacgcacctccaccaacgtgggagcagcttgaaaacggcctggttgccgtcaggaccgtggtgcatggcctggttgattacatccagaatcactcaaagaagggcgcggaccagcagcagcccccacagcactctaagtataaaacatatatgtgtcgcgatatgaagcagcgcgggggctgtccccggggggcctcctgcaccttcgcccactcacaggaggagctggaaaagttcaggaagatgaacaagcggttagtgccccgccgcccactgtccgcctctcttgggcagctcaacgaggtgggcctcccgtcagccgcaatcctacctgacgagggtgctgtggacttaccctcccgaaagcccccagcgctcccaaacgggattgtaagtactggaaacacagtgactcagcttattccaagaggtacagacccaagctatgacagctccctcaaaccagggaaaatcgatcacctgagttccagtgctccgggcagcccacccgacctgctagaaagcgtgcccaaaagcattagtgcccttccagtaaacccacactcaataccccctaggggccctgccgatcttcctcctatgcctgtaacaaagcccttgcaaatggtgccccggggatcccagctttaccccgcccaacagactgatgtgtattaccaggacccccggggcgcagcaccgcccttcgagccagcgccttaccagcagggcatgtactatactccccctccccagtgcgtgtcgcgattcgttagaccccccccttcagcacctgagccagcacctccatatctagatcactacccgccttacctgcaggaacgagtcgtcaattcacagtacggaacgcagcctcagcagtacccaccaatctacccaagtcattacgatgggcgaagggtgtatcccgctcccagttacacgcgtgaggagatttttagagaatcccccatcccaatcgagattccccccgcagccgtgccttcctatgttccagaatcaagagagcgttaccagcaaatcgagagctactacccagtcgcgccacaccccacgcagatccgaccctcctatctgagagagcctccctattccagacttcctcctcctccccagccgcatccgagcctcgatgaactgcaccgcaggcggaaagagatcatggctcagctggaggaacgcaaagtgatcagcccacccccatttgccccatctcctactttgcctcctacatttcaccctgaggagtttctggacgaagatctgaaggtggctggtaagtacaagggcaacgactactctcagtactcgccctggagctgcgacacaattggttcctacatcggtactaaggacgccaaaccaaaagacgtggttgccgccggctcagtcgaaatgatgaacgtagaaagcaaaggaatgagggaccagagactggatctccagagacgagctgcagaaacctctgatgacgatctgattcctttcggggatagaccaacagtgtctcggtttggggctatctctcgaacatcaaagacaatctatcagggcgccgggccaatgcaggccatggcaccgcagggcgctcccacaaagagtatcaatatcagtgattacagtccgtacggcacacacggaggctggggggcgagtccctattcgccgcaccaaaatataccctctcagggacacttctctgagcgtgagcgcatctctatgtctgaagtcgccagccacggaaaaccgctcccgagcgccgagagagagcagctcaggctagagcttcaacagttgaaccaccaaatttctcagcaaacacaactgcggggtctggaagcagtcagcaataggttggtcctccagagggaagccaacacgctggccggccagagtcagcctcccccacccccgcctcctaaatggcctgggatgattagtagtgagcagttaagtttggagctgcaccaggttgagagggaaattggtaagcggactcgagagctctcaatggagaaccagtgtagcctggacatgaagtccaagctaaatacttcaaagcaggccgagaacggccagccggaaccccagaacaaggtgccagcagaggatctcactctgacatttagcgatgttcctaatgggtccgctctcacacaggagaatatctcacttctttccaacaaaacatcatcccttaacctatccgaagatcctgaaggaggcggcgacaataatgattctcaaagaagcggcgtgacgccatcctccgctccatag

SEQ ID NO: 247963 - DNA, 3402 bp, Artificial Sequence
  derived and/or modified sequence
atgcctgtccaggcaccccagtggactgattttctctcatgtcccatatgtacccagacgttcgatgagacaattcggaagccaatctctctgggttgcggccacacggtttgtaagatgtgcctgaacaaactccacaggaaggcctgccctttcgaccaaaccacaatcaacaccgacattgaattactacccgtgaacagtgcactgttgcagctggtcggggctcaggtgcccgaacagcagcccatcacattatgtagcggagtagaggacacgaagcattatgaagaggctaagaaatgtgtggaggaactggcgttatatctcaagcccctctcttcagcaaggggcgtgggcctgaacagcacaacccagagcgttctttcaagaccaatgcagaggaagttagtcaccctggtgcattgtcaactggtggaagaggaaggccgaatcagagcgatgagagcagccagatcactgggcgagaggacagtcacggagctgatcttacagcatcagaaccctcagcagctatcctccaacctttgggctgccgttcgggctagaggctgccagtttcttgggccagcaatgcaggaagaggctttgaagcttgtcctcttagctttggaggacgggagcgccctgtcccggaaagtgttggtcctgtttgtggttcagagacttgaacccagattcccacaggcaagcaagacctcaattggtcatgtggtccagctgctgtatcgggcttcatgttttaaggttaccaaacgcgacgaggactccagcctgatgcagttgaaggaagagtttagaacgtatgaggctctgaggcgagaacacgacagtcagattgttcagatcgcaatggaggcaggcctgagaattgctcccgaccaatggtccagccttctgtatggggaccagtcccacaagtcccacatgcagtccattattgacaaactacagactccagcaagcttcgcccaaagtgtccaggagctgaccatcgctttgcagaggacaggagatcccgcaaatcttaacagattacggcctcatctcgaactactggctaacatcgatcctagccctgatgcccctcccccaacctgggaacagttagagaatggcctcgtggccgtgagaacagtggtgcacggccttgttgattacattcagaatcattccaaaaaaggcgctgatcagcagcagccaccgcaacactccaagtacaagacatacatgtgcagagacatgaagcagagagggggatgtccacgtggcgcatcatgtactttcgcacacagccaggaggagctcgaaaagtttaggaagatgaacaagcgcctggtgccccgacgacctctgtctgcatctctgggccagctgaatgaagttggcctccctagcgccgctatcctgccagacgagggggcagtggacctgcctagtcgaaaacctcccgctctgcctaatgggatagtcagtactgggaacactgtgactcagctgatcccgaggggcacagaccccagctatgatagttccctgaagccaggcaagatagaccatctctcatcctcggccccaggctcccctccggacttactggaatccgtgccaaagtctatttctgctctgccggtgaacccacactcaattccacctaggggtcctgctgaccttccacccatgcccgtgaccaagccactgcaaatggttcctcgagggtcacaactgtaccccgctcagcagacagacgtgtattatcaagatccacgcggagctgcccctccattcgagccagccccatatcagcaaggcatgtactatacaccacctcctcagtgcgtttccagattcgtgagaccaccaccctccgctccggagcccgctcccccatatctggaccactaccccccttatcttcaggagagggtggtgaactcacagtatgggactcagccccagcagtatccacctatctacccgtcccactacgacggcaggcgggtgtatcctgctccgagttatacaagggaggagattttccgggaaagccccattccgattgagatcccaccggcagcagtcccttcttacgtgcccgagtctcgtgagcgctatcagcagattgagagttattaccctgtcgctccacatcccacacaaatccgtccatcataccttcgggaacccccatattcacgcctgccacctcctccacagccacatccatccctggacgagctgcaccggagaaggaaggaaatcatggctcaactggaggagaggaaggtcatttctccaccaccatttgcgccttctcccacactgccacccactttccacccagaagagtttctggatgaggatctgaaggtcgcaggcaaatacaaagggaatgactattctcaatatagcccatggagttgcgatactatcgggtcctatatcggtaccaaagatgctaaacctaaagatgtcgtcgccgcaggatccgtggagatgatgaacgtggaatctaagggcatgcgggatcagcgattggatttgcagcgacgtgccgcagagacctcggacgatgacttgataccattcggggaccgcccaaccgtgtcaaggtttggcgctatttctcgaacgtccaagacaatataccagggagctggtccgatgcaggctatggcccctcaaggtgctccgactaagagtattaacatcagcgactactctccctatggaacccacggcggatggggcgcatcaccatacagcccccatcaaaacattccgagccagggacatttctctgaaagagagcggatctcgatgtccgaagtagcatcacatgggaagcctctaccttccgccgagcgagaacagttgaggttggagttacaacaactaaaccaccagatcagtcagcaaactcagttgagaggattggaggccgtaagcaaccggctcgtcttacagcgcgaggcaaacacactggctggacaaagccaaccgccacctccgcctccaccaaagtggcctggcatgatctcctctgaacagctgtccttagaactgcaccaggtcgagcgcgagataggaaagcggaccagggagttgtctatggagaatcagtgtagcctggatatgaagagtaagctcaatacaagtaaacaggctgagaatggacaacccgagccccagaataaagtgccagcggaggatctgaccttgacattttcggatgtgcccaatggcagcgcactgacacaagagaatatctctctgctgtccaataaaacaagttctctaaacctcagcgaggaccccgaaggcggaggcgataataatgatagccaaagaagcggcgtcacacctagttccgccccttag

SEQ ID NO: 247964 - DNA, 3402 bp, Artificial Sequence
  derived and/or modified sequence
atgccggtgcaagctccgcagtggaccgatttcctcagctgccccatatgtactcagacctttgacgagaccatccggaaacccatcagccttgggtgcggacatactgtgtgtaaaatgtgcttgaacaagctgcatcgtaaggcttgcccgttcgatcagactacaatcaataccgatattgagctgctccctgtgaattcagcattactccagctggtcggcgcacaggtaccggagcagcagccgattacattgtgtagcggggtcgaagataccaaacattacgaagaggccaagaagtgtgtggaagaacttgccctgtatttaaaaccactgtcctccgcaaggggagtcgggctgaactctacaacacaaagcgtgctctccagacctatgcagcgtaagctggtgacactcgtccactgtcagcttgtggaagaagaaggaaggattagagccatgcgcgcagccaggtccctgggtgagcgcacggtcacagagctcatccttcagcaccagaaccctcagcaactgagtagcaacctgtgggccgcagtacgcgctcgcggatgccagtttctggggcctgctatgcaggaagaggctctgaagttggtgcttctggctttggaggacgggtcagcattatcaaggaaggttctggtcctgttcgtcgtacaacggctcgagccacgctttccccaagccagcaagactagtataggccatgtggtgcaactcttgtatagggcctcctgctttaaagtaaccaaaagggacgaagactcttccctgatgcaattgaaagaggagtttagaacttacgaagctctgagacgggagcatgactctcagatagttcagatcgctatggaggccggacttcgaattgcacccgatcaatggtcctcgctcctatatggagatcagagtcataagtcccatatgcaatcaataatcgataagctccagaccccagcgtcatttgcccagagcgtccaggaattgaccattgccctccagaggaccggcgatccggcaaatctgaaccggctcaggcctcacctagaactactggcgaacatcgacccatccccagacgcaccacctccaacctgggagcagttggagaacgggcttgtcgcggttcggacagtggtacatgggctcgttgattacatccagaatcattccaagaaaggagctgaccagcagcagcccccacaacatagcaaatataaaacttatatgtgccgggacatgaagcagagaggaggttgtccaaggggcgcatcatgcactttcgcgcattctcaagaggagctggagaagtttcgaaagatgaacaagaggcttgtgccgcgaagacctctgagcgcaagcttaggccagctgaacgaagttggactgcctagtgcagcaatcctacccgacgaaggggcagtggatctcccaagtcggaagccacccgctctgccaaacgggattgtgtctaccggcaacaccgtgacgcagctgatccccagaggcaccgaccccagctacgactcctctctcaagccaggaaagatcgaccacctctccagctcagcacccggatcccctcccgatctgctcgaaagcgtgcctaaaagtatttctgcgctgcctgtaaatccccactccatcccccctaggggtcccgcagacctgccccctatgcctgttactaagcccttgcaaatggtgcccagaggtagccagctgtatcccgctcaacaaactgatgtctactaccaggacccccgaggagccgcaccgcctttcgaacctgctccataccagcagggcatgtattatacgcccccaccccagtgcgttagcaggttcgtgcggccacctccatcagcgcctgaacccgctcccccttatttggatcactacccaccctacctccaagaacgtgtggtgaattcccaatatggaactcagcctcagcagtaccccccaatctaccccagccactacgacggaaggcgagtgtatcccgcaccgagctacaccagggaagagatcttcagggagagccctatccccatcgagattccgccagcagcagttccctcttatgtccccgagagtagagaacgataccagcaaattgaatcttattatcccgtcgctccacatcccactcagatccgcccatcttacctccgtgaacccccatacagccgcctgccccctccaccgcagcctcacccgtcactcgatgaacttcacaggagacggaaagaaatcatggcccagcttgaggagaggaaggtgatctccccccctcccttcgctcccagcccgacactgcccccaacattccaccctgaggagttcttagacgaggacctgaaagtggccggaaaatacaaaggtaacgattactctcagtattctccgtggtcatgtgatactatcggcagttacatcggaaccaaagatgccaaaccaaaagatgtggtggctgctggctccgtggagatgatgaatgtagagagcaaaggtatgcgcgatcagaggctggacctgcagcgcagggccgcagagacctccgacgatgacctcatcccctttggcgaccgtccaaccgtatctcggtttggggctatctctagaacatccaagaccatctatcaaggtgccggtccaatgcaggcaatggctccccaaggggctccaaccaaaagcattaatatctccgactacagcccctatggaacccatggcggttggggggctagtccgtattctccccatcagaacatcccttcccaaggccatttctctgaaagagagaggatctccatgagtgaggtggctagtcacgggaaacctttgcctagcgctgaaagagagcagctcagactggagctgcagcagctgaaccatcagatttcccaacagacccagcttcggggtcttgaggccgtcagtaaccgcttagtcctgcagcgggaagcgaacacgttggccggacagtcccagccgcctccaccacctccacccaagtggcctggcatgataagtagtgagcagttgtctctggaactgcaccaggtcgagagagaaattggaaaacgcacccgtgaactaagcatggaaaatcaatgtagcctggatatgaaatccaagctgaatacctcaaaacaggcagaaaatgggcagcccgaacctcaaaacaaggtgccggctgaggaccttactttgactttttccgacgttcctaacgggtcagcactgactcaggagaacattagccttcttagcaacaaaacttccagcctcaacctgagcgaagacccggaaggagggggtgataacaacgactcacagcgctcgggcgtcacaccatcctcagccccatag

SEQ ID NO: 247965 - DNA, 10988 bp, Artificial Sequence
  derived and/or modified sequence
caaagattttgattccagtggaatctttgctttagatttgtgtgtgtgtttgtgttcgtgaattgtaactccagaagcaatgcctgtacaagctccacaatggacggatttcctctcctgcccaatttgcactcagactttcgacgaaacaattcgaaagcccatcagtttgggttgtggccatactgtctgcaagatgtgcctgaataaactccaccgcaaggcttgcccatttgaccagaccactatcaatacagacattgagctcctccctgtgaactcagcattgctgcagctcgtgggtgctcaggtccctgagcagcagcctattactttgtgtagtggggttgaagacacaaagcattatgaggaagccaagaaatgtgtagaagaattagcattgtacttaaaaccgctcagcagtgctagaggagtgggtctgaacagcactactcagagtgttctgagtcgcccaatgcagaggaagcttgtgactctagtccactgtcaactagtagaagaagaaggcaggattcgtgccatgagggcagctcgatctttaggtgaacgaacagttacagagctcattctccagcaccagaatcctcagcaactctcttccaatctttgggcagcagtaagggctaggggatgccagttccttggaccagcaatgcaggaggaagctttaaagttggttctgctggccttagaagatggttctgctttgtcaagaaaagtattggttctgtttgtggtgcaaagattggagccacggtttcctcaagcctctaaaactagcattgggcatgttgttcagctcctttatagagcctcctgtttcaaggtcaccaaacgtgatgaagactcttctttgatgcagctgaaagaagaatttagaacctatgaagctctgcggcgagaacatgactcccagatagtgcagattgctatggaagcaggcttacgaattgcaccggaccagtggtcctctttgctttatggagaccagtctcacaaatctcatatgcagtccattattgacaagttgcagactccagcctcttttgcacagagtgttcaggaactaacaattgctctccagcgaactggagacccagcaaacttgaaccgactaagaccccatttggagctgttagcaaacattgaccctagtccagatgctcctcctcctacttgggaacagctggaaaatgggctggttgctgtgcgtacagtggtacatgggctggttgattatatccagaaccacagcaaaaaaggagcagatcagcagcagcctccacagcatagcaaatacaaaacatacatgtgtcgagatatgaagcagagaggaggatgccctcgtggggccagctgtacatttgcacactcacaggaggaactggaaaaatttcgtaaaatgaataagcgcctggttccgagaagacccttgagtgcctctttgggtcaacttaatgaggtgggcctgccttcagcagctatccttccagatgaaggtgcagtggatctccctagcagaaaacctcctgctctgccaaatggaattgtatcaacagggaatacagtaacacagcttattccgcgagggacagaccccagctatgattctagtctgaaaccaggaaaaatagatcatctgagcagtagtgctcctggatcccctcctgacctgctagaatctgttcctaagagtatttctgccttacctgtgaatccacattctatacctccaagggggccagcagatctgcctccaatgcctgttaccaaaccacttcagatggtacctcgaggttctcagttatatccagcacaacagacggatgtttattatcaggatcctcgaggagcagctccgccatttgaaccagcaccttatcagcagggtatgtattatactccaccaccacaatgtgtgtcccgctttgtccgacctccaccatctgctcctgaacctgctcctccctacttggatcattatccaccctacctccaagaacgtgttgtaaactctcagtatggcacacagccacagcagtacccacctatatacccatctcactatgatggccgtcgagtgtaccctgctccgtcttacacaagagaagagatattccgagaaagccctatacccattgagattccacctgcagcagtaccatcgtatgtaccagaatccagagaaagataccaacagatcgagagttactatccagtggctcctcatccaactcagatcagaccttcgtacctcagagaacctccttatagccggcttcctcctcctccccagcctcatcctagtctagatgaactacatcgccgacgaaaggaaataatggcccagctagaggaaagaaaggttatctctccacctccttttgcaccttcaccaaccttgcctcctacctttcatccggaagaatttttggatgaagacttgaaggtagctgggaaatacaaaggaaatgattatagccaatactctccctggtcatgtgacaccatcggctcctacattggaaccaaagatgcaaaacccaaagatgttgtggcagcagggagtgtggaaatgatgaatgtggagagtaaaggaatgagggaccagcgattagatcttcagagaagagcagcagaaaccagtgatgatgacctcatcccatttggagaccgaccaacagtgtctcggtttggtgccatctcacgaacttccaaaactatatatcagggtgctggtccaatgcaggctatggcacctcagggagctcctacaaaatctattaacatttcagattatagtccatatggaacccacggtggctggggagcttctccatattcacctcatcaaaacataccttctcagggacacttcagtgagagggagagaatatctatgtcagaagtggccagtcatggaaaaccccttccatctgctgagagagaacagctacgactagaattgcagcaattgaaccatcagattagccagcagacccagctacgtggactagaggctgttagtaacaggctggtgttgcagagggaggcaaacaccctggcaggccagtcacagcccccaccaccgccacctccaaaatggcctgggatgatctcaagtgagcagttgagcttggaactgcaccaggtggaaagggaaatcgggaagagaacacgggaactgagtatggaaaaccagtgttctctggacatgaaaagcaaactgaatacaagtaaacaagcagaaaatggacaaccagaaccacaaaacaaggttccggctgaggaccttacattgacattcagtgatgtaccaaatggatcagccttgacacaagagaatatcagcctcctatcaaacaagaccagctctctgaacctgtcagaggaccctgagggaggaggggataataatgactcccagagatcaggagttactcccagttctgctccttaaaatatgaggagtcctacttttatcttctgctcctaatcagtttgtcgggcataggggtaggagaacgcataacttctaaactttttctcttaagagcggtcagagaaatccaggaaattcaccagaggcaatgtgcacaaacaccactactaaaaacaaaccctgcacatagttcacattaatgcatttttttaatttaaagaaaaagaaaattagcagtatctgcaagcaattcagattaaatttgtttttgttctgtgaatgaactttattttaataactttggacgccttggatccagggctttaaaaaaaaaagatattatatatacactctgtttgattaattgtatgatcttaatgaagtaggttttcttgtattttggtattacatacccagtgtataatttgtataattcctcacccccaatccttatcaattctcaccaccccataaacttaaaacagaccaaaaatgtcagctttcagagaattctgtggtgcttgagaaacagacagtactagactgagttattagaaaatgtgcagcaaaccaacttttcccagagctgttatttggaattctttatccctttctagatcactagcttcattggatacgtatatttttcttgacattgaagctttttgtttgtttgggagggttttatttcttgtttttattttcaacttttcaaatagaattaccaattttgaagtcctcattttcatattaaggatcatttgcattctcttaatataatcagaaagctgattcagtgtttaattagatttaaatgttgatcaagaattaactgtaacttactagcactgaaaatacatgtttggtgtttcgcctgcgttcagctcatggttggaaatttgaagcagtgcttttcaaattaaacttttgctgacatcataggatgctaaaaaacaaggacaatcaactatgttttaaaactgcaacatttgatttgaacttaaaatgaatagagccacattattttaatggatgttttgttttacttgtgaactgattgagtcttaaggatagtttatgaattgatcacttgttgctcagaatcattagtataagtaggtaggaaatagtttgaagtcatttttcatagacttaactgtccaatgttgcaaatgtttcttcatgaaaatattgaaaagagtaaggttttttttttttttaattctgctgcacatattctgatgccatgtgtctgtgcttaattaactaagaccctataaaacgtgtttagtggggactgtttgatatagttgccctctccattcctctatttgcctgatttttttcagtttccctttctgtattttactactaaattagaaagcactggttatgtaataagttactacattgctttggttgagtaaaaacaagagtttatatttttcttgtttcttattttcttaacccttaactcctgctgaggtcataacaacctcagtctaagctctgtgtccatcatactgttaacttaaacaaatgggtggtgggggtgggaagggtaatacagtcctgccattgcctaccagtaggagagtccaaacagaacactcttttgagtagcaattatttaatttgcccagtcaaggcaccgtgtttatatactatttcacattgaatttgattatgccctacagacctggctggtcaaggatttgatatacacatattggcttgggattcgagctttcttttttatttaaataaaaatttatatatatattatatatatacatatatacatagctatatctgtatatatattgggtatgttttaaggattttttcgcatgagcgcagctgttgcgataaattgaccgattgggaggtggtagaagcactgaatgaaggtgaggctttttttttttccagttttcttatacatttgtcttctttttttaaaaaaaaaaaaaaaaatatatatatatatatatatatatatatatatgtatgctttttcttttttttttggcttttgtttgctttttgacttttacttaaaacccttttacatttccactttaaatgcctattgtttattgggagaaggaaagaaacttttgtatgtctgacagagtcccaagatttttcatttctctgcataacagtaaaaggcaacattattggcctccaaccttctttttttttttttttttttttttttggagagggagtctgcttctgttgcccaggctggagtgcagtgggttgatctcggctcgctacaacctccacctcccgggttcaagcgattctcctgcctcagcctcctgagtagctgggactacaggcacgcgccaccacgtccagctaatttttgtactacaaccttcttataagcagatttggactgatcttctcctttgggtatgtcagatcatcctaaattttagaagcagttgattcactttggaattcagaatgattcttgtattagaagataatttgtgggtattaatttttgtttaagtttaaaataaaagtaaagattcattttggatatcagttgaaaccccttagtaactcagtttctgttattcttgttctcatttcctttaaatacacttgttcttggcttttgccattttgattctgtgaagtaggcaggagcagggattaatttatacagtattcctgttctgaacaaaaccagaaaagtcactgtataaacttgacttaaaatagtatctttctcttttcatgtattttcatttgggggaaaaaaaatctctttaattgtaacctgaattcaagctgtacccctccatggtcctacactctagagctaatctggttgggcagaaaggcagaaggatggtatattgtcccattgtgcctataatgtattttaaattggtcattccaccttacctaatggaaattcttgcagctttcctagtgctcatcagcggttttaggaattcactaacacccccaaaatttgttttttgttttttgctttttttccttttccttttctctgtgatatcatgagcctgtaaggacaaatggcatatttgggcataactgcttgactctgtaactacttttttaaaatcaaaattgaaaaggtattaattgcttctggctttttaatttttttttttagagacaaagatgaaaccagataggaaatacagtttttatgttttctacttactaaaatattagtttcttctaaatattactttatttgtatttcactaaattccaaagcaaaaatcagatatctgagatgaacaattttgaatgggttaaggtaggagtaataagcattgtgttcactcatacataggtgagggaattttatttatagcgagaaatataaaagtattttgacttactcttttttcaaggagtcgctaggaaagggtagaagaactgagaataagacatctagattccatttctggtttatatgtagctcttttgcctaatttatatataattttgtcataagataagtccagtaactgtcctgtcttagataacgtacagaggctgaagtgaccaaagatccattccttattacttttctaattaaaagaagagttagctagatttctagtagtagtattctagatattgataagacattattcctaatgccaactacaaatattcaactactcagaatgtatttaaaaaattgtttggtacagcattaatgttggtgattcctttctcccatcttatttcccttcccttctattctttcccatgtatttcttttgcctaaaagaatattggtatgattctcatttgctactttgagtatataactccatcagactttccagagttcttcagggatggagctcaaagtttacatttttccatatatgtctttttttttcttgacctttttccaccctgtaatttccccttgacttacccactgccctccccaatctgcaacagtgacagtttgctgcctcaaaacagagcattcaaatgaattcgcttagccaataacttctgtgaagttgccttttctaatggtgttattactcagtgatgcacaaatgtggtatttgccctactggtaggcaaacaaaggtctggttaagaatggtaacctgctgttttctttaaaggagagccaaagacttgtgctttactctgttttggttttgggggaagtagtagccattttgatcatgaaaccttttagtatttgtgagttgattgtactgtgtaagtagatttatctaaagttaactgttaaagttagctagccttataaaatgtaaaagtaatgaaaattcatcagtttctctaagccagtgaatgtcgtcttttgtaatattgtgtataagcatttgtgcccaccccagcttctgctatcactgtggtcaagtcatgggtctgagtaaaagaattcttgagtatgtgactggtgagaaataactaactatagtcagtacatgtacagattgttaaaattcaagacaaaatactttcactaaaaaaaaggattcgtctcagtaaagaagtattcagttgctgtcacttacatacaaatggtggtgggtagcagtctcaccatttttctactctctttttgctcgttttaaataattgagtaaaggttttatttgtaaaatctatctgtaaaaagcacctgtaacgatttatatgtcattgaaaggaatggcccagttactttttaggagagattaataacctacctggaaattaactgcagtgtttacttagattttttccccctaataagagtctaagtgtgttaaatttttaactgatgatatggttacagtgttgcaaggtgatctcttcccctgaaaaatctgcctatccttttaagaaaaattagacctactaaactaaagcaaattttactttcatcattagcacctaaacaagcaagcagtctactactgtcatcattttacctgagtgcccattttgctgatccacattcatacctttctaccttggacagctatgatttttatatttatttgttgcttcagctcaggtttatgaaattttcctgctgaaatgacttattgggagttgtaggttgattatagttactattaaacattttctcaatttagcttttctgagccacttcaagaagaaagctgtttttgtcaaaaggtactattaattgtagcaagtaaatcttaagatttgaatttttaagattttatttctgtgttcactaaagatctttccacaagtaatagattataattgataagtaatactagctatagtgttaataaagagtaagactatcaccaccaggaataagtaacaccttttaataataaatctattcctaataggtatgttttcaatactgcactgaacaaagtgggtaaagagccctttgaaatcttattgtaataaagggacttacctcaccactggaatccttgttttcagagcctctggattttcagccaaacactgaatttctcctaaactttatccctgaaacatccctagagaacgaactttattttcacaagaaaataaggcacaataagggggaagaacttaaacctcaacataatatcgtgtccaaaaatgtgtatttagaaaaataaaatcctgtggagtttgttatcctaatgtttattttatactagataaggtgacttgttttcttgtattgaggtcttactgtttcagatttgtttttgtttctgttctaactctaagcagacagagctcacaagtctttggcatccattttaggttgtacactcagagtcatcttataactggaaactgtcaggtggtcccccaccccagtgagtgtatgaaagagtcaagaaaaagattggaaacaaactattgggtgaataattggttgctctattattattattattattatttgcctttttttaatcaccatttatttgtgtaatctttctccattgattggctgtcattcttataatatctgaactaccccataaaataattctctgacttaaaggcatttagcttttgcttatcgtttttacatcctctattcaactaagacactgtcttgagagttattttttccagatggatcgttggcctaaattttcacacttctcccctgttcatcctttttcctcttccctgcttcctgggaataaaaggaacttttttaaaaaaattaattagtccacaggtctcattatctttctttatgattaatctatgactttttggtacaagaacaatggaaaaagtgaattaaggtaatgaacaaaacctttcacccacttaaacattttccagttttgagattcctcttcgtgtttgtggtgtcttccccttgttaccccttctgccctttttctctgactatggtaatttggtctttaggctcatatcagtctccccgagacattctgcagtcattatcacctttttgggtggattttattttgttttattttgttttttttaaaaaaataactttttaacattggtgcatatttgcttgggatagagcttgtgtaatttaccaatcgtattgattgtaagtgattgtgccctgcagaggtatatttaacaagacaaaaataatcttggttaataaaggagcccatgagatttgagtcaggttgtaagtgaaatcacttacacttttggatagaatttatactcctgctcttataaatcagtggtagacttaccattttttaaagttttcttgcatttttttgtttttttattgccacagctccctattctttcttgcctgcctccacccccctgttcaggaaaaaaaaaaattgagccttaaagtgacagctgattttttaattgctgaattttgtgaaattttactttttccaagtgtttccaactttaaaaagagaagtgaagacaaataggttggaatggtgaagacaaatggattggaatttcacaggctgtgaataattccttaggatctggcaaaccgtgaagtcttatttgaagaccttatctcctgagagttcttttggagtaggaaaaagaaccctatttgaaatagaccgtttttctcttgtttttaatctgtttaatatttctgatttttaagcagctttcaaaacaagtgtggtggaaaaaaagaaatagtagtaggaagatgtttagggcagcagaactctgggtctaaataagtacatgttcccacttgttgccgatttttgagagtactagggccatctttctcaattttgtattatttgtgtgcatgtttatatcaaagatgcccattttgttaaaatgctatttcctttattaccttggaaactgactcagcctcatgttgctcctaattagtgtttaaggctcccatgagttgcagataaaatgatttattttaacaagtagaaggaggtgattcaccttttggattgtaaatatatgaaaatgtctacaaggtctttatctgctttctgtcagcatttatattaaatgataaattaatgaggaa

SEQ ID NO: 247966 - DNA, 11261 bp, Artificial Sequence
  derived and/or modified sequence
tggcccctgctgcaggagcagcctcagcagcagcaggtgggaggccggaggcggtgctggcggtggcggcggcagccgtggcccggcggcctgggacagaatcagagtcaacggtggcctcggcggcggcggcggctgccgcggcggtggcgacggccgcggggactcggagctgagaggagctgctgctcggaccagcgcggttatatttcacactatgtgctgactgtatctacagaagatatttaaaaaaaaaaaagataaactttttttcaaagattttgattccagtggaatctttgctttagatttgtgtgtgtgtttgtgttcgtgaattgtaactccagaagcaatgcctgtacaagctccacaatggacggatttcctctcctgcccaatttgcactcagactttcgacgaaacaattcgaaagcccatcagtttgggttgtggccatactgtctgcaagatgtgcctgaataaactccaccgcaaggcttgcccatttgaccagaccactatcaatacagacattgagctcctccctgtgaactcagcattgctgcagctcgtgggtgctcaggtccctgagcagcagcctattactttgtgtagtggggttgaagacacaaagcattatgaggaagccaagaaatgtgtagaagaattagcattgtacttaaaaccgctcagcagtgctagaggagtgggtctgaacagcactactcagagtgttctgagtcgcccaatgcagaggaagcttgtgactctagtccactgtcaactagtagaagaagaaggcaggattcgtgccatgagggcagctcgatctttaggtgaacgaacagttacagagctcattctccagcaccagaatcctcagcaactctcttccaatctttgggcagcagtaagggctaggggatgccagttccttggaccagcaatgcaggaggaagctttaaagttggttctgctggccttagaagatggttctgctttgtcaagaaaagtattggttctgtttgtggtgcaaagattggagccacggtttcctcaagcctctaaaactagcattgggcatgttgttcagctcctttatagagcctcctgtttcaaggtcaccaaacgtgatgaagactcttctttgatgcagctgaaagaagaatttagaacctatgaagctctgcggcgagaacatgactcccagatagtgcagattgctatggaagcaggcttacgaattgcaccggaccagtggtcctctttgctttatggagaccagtctcacaaatctcatatgcagtccattattgacaagttgcagactccagcctcttttgcacagagtgttcaggaactaacaattgctctccagcgaactggagacccagcaaacttgaaccgactaagaccccatttggagctgttagcaaacattgaccctagtccagatgctcctcctcctacttgggaacagctggaaaatgggctggttgctgtgcgtacagtggtacatgggctggttgattatatccagaaccacagcaaaaaaggagcagatcagcagcagcctccacagcatagcaaatacaaaacatacatgtgtcgagatatgaagcagagaggaggatgccctcgtggggccagctgtacatttgcacactcacaggaggaactggaaaaatttcgtaaaatgaataagcgcctggttccgagaagacccttgagtgcctctttgggtcaacttaatgaggtgggcctgccttcagcagctatccttccagatgaaggtgcagtggatctccctagcagaaaacctcctgctctgccaaatggaattgtatcaacagggaatacagtaacacagcttattccgcgagggacagaccccagctatgattctagtctgaaaccaggaaaaatagatcatctgagcagtagtgctcctggatcccctcctgacctgctagaatctgttcctaagagtatttctgccttacctgtgaatccacattctatacctccaagggggccagcagatctgcctccaatgcctgttaccaaaccacttcagatggtacctcgaggttctcagttatatccagcacaacagacggatgtttattatcaggatcctcgaggagcagctccgccatttgaaccagcaccttatcagcagggtatgtattatactccaccaccacaatgtgtgtcccgctttgtccgacctccaccatctgctcctgaacctgctcctccctacttggatcattatccaccctacctccaagaacgtgttgtaaactctcagtatggcacacagccacagcagtacccacctatatacccatctcactatgatggccgtcgagtgtaccctgctccgtcttacacaagagaagagatattccgagaaagccctatacccattgagattccacctgcagcagtaccatcgtatgtaccagaatccagagaaagataccaacagatcgagagttactatccagtggctcctcatccaactcagatcagaccttcgtacctcagagaacctccttatagccggcttcctcctcctccccagcctcatcctagtctagatgaactacatcgccgacgaaaggaaataatggcccagctagaggaaagaaaggttatctctccacctccttttgcaccttcaccaaccttgcctcctacctttcatccggaagaatttttggatgaagacttgaaggtagctgggaaatacaaaggaaatgattatagccaatactctccctggtcatgtgacaccatcggctcctacattggaaccaaagatgcaaaacccaaagatgttgtggcagcagggagtgtggaaatgatgaatgtggagagtaaaggaatgagggaccagcgattagatcttcagagaagagcagcagaaaccagtgatgatgacctcatcccatttggagaccgaccaacagtgtctcggtttggtgccatctcacgaacttccaaaactatatatcagggtgctggtccaatgcaggctatggcacctcagggagctcctacaaaatctattaacatttcagattatagtccatatggaacccacggtggctggggagcttctccatattcacctcatcaaaacataccttctcagggacacttcagtgagagggagagaatatctatgtcagaagtggccagtcatggaaaaccccttccatctgctgagagagaacagctacgactagaattgcagcaattgaaccatcagattagccagcagacccagctacgtggactagaggctgttagtaacaggctggtgttgcagagggaggcaaacaccctggcaggccagtcacagcccccaccaccgccacctccaaaatggcctgggatgatctcaagtgagcagttgagcttggaactgcaccaggtggaaagggaaatcgggaagagaacacgggaactgagtatggaaaaccagtgttctctggacatgaaaagcaaactgaatacaagtaaacaagcagaaaatggacaaccagaaccacaaaacaaggttccggctgaggaccttacattgacattcagtgatgtaccaaatggatcagccttgacacaagagaatatcagcctcctatcaaacaagaccagctctctgaacctgtcagaggaccctgagggaggaggggataataatgactcccagagatcaggagttactcccagttctgctccttaaaatatgaggagtcctacttttatcttctgctcctaatcagtttgtcgggcataggggtaggagaacgcataacttctaaactttttctcttaagagcggtcagagaaatccaggaaattcaccagaggcaatgtgcacaaacaccactactaaaaacaaaccctgcacatagttcacattaatgcatttttttaatttaaagaaaaagaaaattagcagtatctgcaagcaattcagattaaatttgtttttgttctgtgaatgaactttattttaataactttggacgccttggatccagggctttaaaaaaaaaagatattatatatacactctgtttgattaattgtatgatcttaatgaagtaggttttcttgtattttggtattacatacccagtgtataatttgtataattcctcacccccaatccttatcaattctcaccaccccataaacttaaaacagaccaaaaatgtcagctttcagagaattctgtggtgcttgagaaacagacagtactagactgagttattagaaaatgtgcagcaaaccaacttttcccagagctgttatttggaattctttatccctttctagatcactagcttcattggatacgtatatttttcttgacattgaagctttttgtttgtttgggagggttttatttcttgtttttattttcaacttttcaaatagaattaccaattttgaagtcctcattttcatattaaggatcatttgcattctcttaatataatcagaaagctgattcagtgtttaattagatttaaatgttgatcaagaattaactgtaacttactagcactgaaaatacatgtttggtgtttcgcctgcgttcagctcatggttggaaatttgaagcagtgcttttcaaattaaacttttgctgacatcataggatgctaaaaaacaaggacaatcaactatgttttaaaactgcaacatttgatttgaacttaaaatgaatagagccacattattttaatggatgttttgttttacttgtgaactgattgagtcttaaggatagtttatgaattgatcacttgttgctcagaatcattagtataagtaggtaggaaatagtttgaagtcatttttcatagacttaactgtccaatgttgcaaatgtttcttcatgaaaatattgaaaagagtaaggttttttttttttttaattctgctgcacatattctgatgccatgtgtctgtgcttaattaactaagaccctataaaacgtgtttagtggggactgtttgatatagttgccctctccattcctctatttgcctgatttttttcagtttccctttctgtattttactactaaattagaaagcactggttatgtaataagttactacattgctttggttgagtaaaaacaagagtttatatttttcttgtttcttattttcttaacccttaactcctgctgaggtcataacaacctcagtctaagctctgtgtccatcatactgttaacttaaacaaatgggtggtgggggtgggaagggtaatacagtcctgccattgcctaccagtaggagagtccaaacagaacactcttttgagtagcaattatttaatttgcccagtcaaggcaccgtgtttatatactatttcacattgaatttgattatgccctacagacctggctggtcaaggatttgatatacacatattggcttgggattcgagctttcttttttatttaaataaaaatttatatatatattatatatatacatatatacatagctatatctgtatatatattgggtatgttttaaggattttttcgcatgagcgcagctgttgcgataaattgaccgattgggaggtggtagaagcactgaatgaaggtgaggctttttttttttccagttttcttatacatttgtcttctttttttaaaaaaaaaaaaaaaaatatatatatatatatatatatatatatatatgtatgctttttcttttttttttggcttttgtttgctttttgacttttacttaaaacccttttacatttccactttaaatgcctattgtttattgggagaaggaaagaaacttttgtatgtctgacagagtcccaagatttttcatttctctgcataacagtaaaaggcaacattattggcctccaaccttctttttttttttttttttttttttttggagagggagtctgcttctgttgcccaggctggagtgcagtgggttgatctcggctcgctacaacctccacctcccgggttcaagcgattctcctgcctcagcctcctgagtagctgggactacaggcacgcgccaccacgtccagctaatttttgtactacaaccttcttataagcagatttggactgatcttctcctttgggtatgtcagatcatcctaaattttagaagcagttgattcactttggaattcagaatgattcttgtattagaagataatttgtgggtattaatttttgtttaagtttaaaataaaagtaaagattcattttggatatcagttgaaaccccttagtaactcagtttctgttattcttgttctcatttcctttaaatacacttgttcttggcttttgccattttgattctgtgaagtaggcaggagcagggattaatttatacagtattcctgttctgaacaaaaccagaaaagtcactgtataaacttgacttaaaatagtatctttctcttttcatgtattttcatttgggggaaaaaaaatctctttaattgtaacctgaattcaagctgtacccctccatggtcctacactctagagctaatctggttgggcagaaaggcagaaggatggtatattgtcccattgtgcctataatgtattttaaattggtcattccaccttacctaatggaaattcttgcagctttcctagtgctcatcagcggttttaggaattcactaacacccccaaaatttgttttttgttttttgctttttttccttttccttttctctgtgatatcatgagcctgtaaggacaaatggcatatttgggcataactgcttgactctgtaactacttttttaaaatcaaaattgaaaaggtattaattgcttctggctttttaatttttttttttagagacaaagatgaaaccagataggaaatacagtttttatgttttctacttactaaaatattagtttcttctaaatattactttatttgtatttcactaaattccaaagcaaaaatcagatatctgagatgaacaattttgaatgggttaaggtaggagtaataagcattgtgttcactcatacataggtgagggaattttatttatagcgagaaatataaaagtattttgacttactcttttttcaaggagtcgctaggaaagggtagaagaactgagaataagacatctagattccatttctggtttatatgtagctcttttgcctaatttatatataattttgtcataagataagtccagtaactgtcctgtcttagataacgtacagaggctgaagtgaccaaagatccattccttattacttttctaattaaaagaagagttagctagatttctagtagtagtattctagatattgataagacattattcctaatgccaactacaaatattcaactactcagaatgtatttaaaaaattgtttggtacagcattaatgttggtgattcctttctcccatcttatttcccttcccttctattctttcccatgtatttcttttgcctaaaagaatattggtatgattctcatttgctactttgagtatataactccatcagactttccagagttcttcagggatggagctcaaagtttacatttttccatatatgtctttttttttcttgacctttttccaccctgtaatttccccttgacttacccactgccctccccaatctgcaacagtgacagtttgctgcctcaaaacagagcattcaaatgaattcgcttagccaataacttctgtgaagttgccttttctaatggtgttattactcagtgatgcacaaatgtggtatttgccctactggtaggcaaacaaaggtctggttaagaatggtaacctgctgttttctttaaaggagagccaaagacttgtgctttactctgttttggttttgggggaagtagtagccattttgatcatgaaaccttttagtatttgtgagttgattgtactgtgtaagtagatttatctaaagttaactgttaaagttagctagccttataaaatgtaaaagtaatgaaaattcatcagtttctctaagccagtgaatgtcgtcttttgtaatattgtgtataagcatttgtgcccaccccagcttctgctatcactgtggtcaagtcatgggtctgagtaaaagaattcttgagtatgtgactggtgagaaataactaactatagtcagtacatgtacagattgttaaaattcaagacaaaatactttcactaaaaaaaaggattcgtctcagtaaagaagtattcagttgctgtcacttacatacaaatggtggtgggtagcagtctcaccatttttctactctctttttgctcgttttaaataattgagtaaaggttttatttgtaaaatctatctgtaaaaagcacctgtaacgatttatatgtcattgaaaggaatggcccagttactttttaggagagattaataacctacctggaaattaactgcagtgtttacttagattttttccccctaataagagtctaagtgtgttaaatttttaactgatgatatggttacagtgttgcaaggtgatctcttcccctgaaaaatctgcctatccttttaagaaaaattagacctactaaactaaagcaaattttactttcatcattagcacctaaacaagcaagcagtctactactgtcatcattttacctgagtgcccattttgctgatccacattcatacctttctaccttggacagctatgatttttatatttatttgttgcttcagctcaggtttatgaaattttcctgctgaaatgacttattgggagttgtaggttgattatagttactattaaacattttctcaatttagcttttctgagccacttcaagaagaaagctgtttttgtcaaaaggtactattaattgtagcaagtaaatcttaagatttgaatttttaagattttatttctgtgttcactaaagatctttccacaagtaatagattataattgataagtaatactagctatagtgttaataaagagtaagactatcaccaccaggaataagtaacaccttttaataataaatctattcctaataggtatgttttcaatactgcactgaacaaagtgggtaaagagccctttgaaatcttattgtaataaagggacttacctcaccactggaatccttgttttcagagcctctggattttcagccaaacactgaatttctcctaaactttatccctgaaacatccctagagaacgaactttattttcacaagaaaataaggcacaataagggggaagaacttaaacctcaacataatatcgtgtccaaaaatgtgtatttagaaaaataaaatcctgtggagtttgttatcctaatgtttattttatactagataaggtgacttgttttcttgtattgaggtcttactgtttcagatttgtttttgtttctgttctaactctaagcagacagagctcacaagtctttggcatccattttaggttgtacactcagagtcatcttataactggaaactgtcaggtggtcccccaccccagtgagtgtatgaaagagtcaagaaaaagattggaaacaaactattgggtgaataattggttgctctattattattattattattatttgcctttttttaatcaccatttatttgtgtaatctttctccattgattggctgtcattcttataatatctgaactaccccataaaataattctctgacttaaaggcatttagcttttgcttatcgtttttacatcctctattcaactaagacactgtcttgagagttattttttccagatggatcgttggcctaaattttcacacttctcccctgttcatcctttttcctcttccctgcttcctgggaataaaaggaacttttttaaaaaaattaattagtccacaggtctcattatctttctttatgattaatctatgactttttggtacaagaacaatggaaaaagtgaattaaggtaatgaacaaaacctttcacccacttaaacattttccagttttgagattcctcttcgtgtttgtggtgtcttccccttgttaccccttctgccctttttctctgactatggtaatttggtctttaggctcatatcagtctccccgagacattctgcagtcattatcacctttttgggtggattttattttgttttattttgttttttttaaaaaaataactttttaacattggtgcatatttgcttgggatagagcttgtgtaatttaccaatcgtattgattgtaagtgattgtgccctgcagaggtatatttaacaagacaaaaataatcttggttaataaaggagcccatgagatttgagtcaggttgtaagtgaaatcacttacacttttggatagaatttatactcctgctcttataaatcagtggtagacttaccattttttaaagttttcttgcatttttttgtttttttattgccacagctccctattctttcttgcctgcctccacccccctgttcaggaaaaaaaaaaattgagccttaaagtgacagctgattttttaattgctgaattttgtgaaattttactttttccaagtgtttccaactttaaaaagagaagtgaagacaaataggttggaatggtgaagacaaatggattggaatttcacaggctgtgaataattccttaggatctggcaaaccgtgaagtcttatttgaagaccttatctcctgagagttcttttggagtaggaaaaagaaccctatttgaaatagaccgtttttctcttgtttttaatctgtttaatatttctgatttttaagcagctttcaaaacaagtgtggtggaaaaaaagaaatagtagtaggaagatgtttagggcagcagaactctgggtctaaataagtacatgttcccacttgttgccgatttttgagagtactagggccatctttctcaattttgtattatttgtgtgcatgtttatatcaaagatgcccattttgttaaaatgctatttcctttattaccttggaaactgactcagcctcatgttgctcctaattagtgtttaaggctcccatgagttgcagataaaatgatttattttaacaagtagaaggaggtgattcaccttttggattgtaaatatatgaaaatgtctacaaggtctttatctgctttctgtcagcatttatattaaatgataaattaatgaggaa

SEQ ID NO: 247967 - DNA, 3402 bp, Artificial Sequence
  derived and/or modified sequence
atgcccgtgcaggccccccagtggaccgacttcctgagctgccccatctgcacccagaccttcgacgagaccatcagaaagcccatcagcctgggctgcggccacaccgtgtgcaagatgtgcctgaacaagctgcacagaaaggcctgccccttcgaccagaccaccatcaacaccgacatcgagctgctgcccgtgaacagcgccctgctgcagctggtgggcgcccaggtgcccgagcagcagcccatcaccctgtgcagcggcgtggaggacaccaagcactacgaggaggccaagaagtgcgtggaggagctggccctgtacctgaagcccctgagcagcgccagaggcgtgggcctgaacagcaccacccagagcgtgctgagcagacccatgcagagaaagctggtgaccctggtgcactgccagctggtggaggaggagggcagaatcagagccatgagagccgccagaagcctgggcgagagaaccgtgaccgagctgatcctgcagcaccagaacccccagcagctgagcagcaacctgtgggccgccgtgagagccagaggctgccagttcctgggccccgccatgcaggaggaggccctgaagctggtgctgctggccctggaggacggcagcgccctgagcagaaaggtgctggtgctgttcgtggtgcagagactggagcccagattcccccaggccagcaagaccagcatcggccacgtggtgcagctgctgtacagagccagctgcttcaaggtgaccaagagagacgaggacagcagcctgatgcagctgaaggaggagttcagaacctacgaggccctgagaagagagcacgacagccagatcgtgcagatcgccatggaggccggcctgagaatcgcccccgaccagtggagcagcctgctgtacggcgaccagagccacaagagccacatgcagagcatcatcgacaagctgcagacccccgccagcttcgcccagagcgtgcaggagctgaccatcgccctgcagagaaccggcgaccccgccaacctgaacagactgagaccccacctggagctgctggccaacatcgaccccagccccgacgcccccccccccacctgggagcagctggagaacggcctggtggccgtgagaaccgtggtgcacggcctggtggactacatccagaaccacagcaagaagggcgccgaccagcagcagcccccccagcacagcaagtacaagacctacatgtgcagagacatgaagcagagaggcggctgccccagaggcgccagctgcaccttcgcccacagccaggaggagctggagaagttcagaaagatgaacaagagactggtgcccagaagacccctgagcgccagcctgggccagctgaacgaggtgggcctgcccagcgccgccatcctgcccgacgagggcgccgtggacctgcccagcagaaagccccccgccctgcccaacggcatcgtgagcaccggcaacaccgtgacccagctgatccccagaggcaccgaccccagctacgacagcagcctgaagcccggcaagatcgaccacctgagcagcagcgcccccggcagcccccccgacctgctggagagcgtgcccaagagcatcagcgccctgcccgtgaacccccacagcatcccccccagaggccccgccgacctgccccccatgcccgtgaccaagcccctgcagatggtgcccagaggcagccagctgtaccccgcccagcagaccgacgtgtactaccaggaccccagaggcgccgccccccccttcgagcccgccccctaccagcagggcatgtactacaccccccccccccagtgcgtgagcagattcgtgagacccccccccagcgcccccgagcccgcccccccctacctggaccactaccccccctacctgcaggagagagtggtgaacagccagtacggcacccagccccagcagtacccccccatctaccccagccactacgacggcagaagagtgtaccccgcccccagctacaccagagaggagatcttcagagagagccccatccccatcgagatcccccccgccgccgtgcccagctacgtgcccgagagcagagagagataccagcagatcgagagctactaccccgtggccccccaccccacccagatcagacccagctacctgagagagcccccctacagcagactgcccccccccccccagccccaccccagcctggacgagctgcacagaagaagaaaggagatcatggcccagctggaggagagaaaggtgatcagccccccccccttcgcccccagccccaccctgccccccaccttccaccccgaggagttcctggacgaggacctgaaggtggccggcaagtacaagggcaacgactacagccagtacagcccctggagctgcgacaccatcggcagctacatcggcaccaaggacgccaagcccaaggacgtggtggccgccggcagcgtggagatgatgaacgtggagagcaagggcatgagagaccagagactggacctgcagagaagagccgccgagaccagcgacgacgacctgatccccttcggcgacagacccaccgtgagcagattcggcgccatcagcagaaccagcaagaccatctaccagggcgccggccccatgcaggccatggccccccagggcgcccccaccaagagcatcaacatcagcgactacagcccctacggcacccacggcggctggggcgccagcccctacagcccccaccagaacatccccagccagggccacttcagcgagagagagagaatcagcatgagcgaggtggccagccacggcaagcccctgcccagcgccgagagagagcagctgagactggagctgcagcagctgaaccaccagatcagccagcagacccagctgagaggcctggaggccgtgagcaacagactggtgctgcagagagaggccaacaccctggccggccagagccagcccccccccccccccccccccaagtggcccggcatgatcagcagcgagcagctgagcctggagctgcaccaggtggagagagagatcggcaagagaaccagagagctgagcatggagaaccagtgcagcctggacatgaagagcaagctgaacaccagcaagcaggccgagaacggccagcccgagccccagaacaaggtgcccgccgaggacctgaccctgaccttcagcgacgtgcccaacggcagcgccctgacccaggagaacatcagcctgctgagcaacaagaccagcagcctgaacctgagcgaggaccccgagggcggcggcgacaacaacgacagccagagaagcggcgtgacccccagcagcgccccctag

SEQ ID NO: 247968 - protein, 542 aa, Artificial Sequence
  derived and/or modified sequence
MATTVTCTRFTDEYQLYEDIGKGAFSVVRRCVKLCTGHEYAAKIINTKKLSARDHQKLEREARICRLLKHSNIVRLHDSISEEGFHYLVFDLVTGGELFEDIVAREYYSEADASHCIQQILEAVLHCHQMGVVHRDLKPENLLLASKCKGAAVKLADFGLAIEVQGDQQAWFGFAGTPGYLSPEVLRKEAYGKPVDIWACGVILYILLVGYPPFWDEDQHKLYQQIKAGAYDFPSPEWDTVTPEAKNLINQMLTINPAKRITAHEALKHPWVCQRSTVASMMHRQETVECLKKFNARRKLKGAILTTMLATRNFSVGRQTTAPATMSTAASGTTMGLVEQAKSLLNKKADGVKPQTNSTKNSAAATSPKGTLPPAALEPQTTVIHNPVDGIKESSDSANTTIEDEDAKARKQEIIKTTEQLIEAVNNGDFEAYAKICDPGLTSFEPEALGNLVEGMDFHRFYFENLLAKNSKPIHTTILNPHVHVIGEDAACIAYIRLTQYIDGQGRPRTSQSEETRVWHRRDGKWQNVHFHCSGAPVAPLQ

SEQ ID NO: 247969 - protein, 305 aa, Artificial Sequence
  derived and/or modified sequence
MGVVHRDLKPENLLLASKCKGAAVKLADFGLAIEVQGDQQAWFGFAGTPGYLSPEVLRKEAYGKPVDIWACGVILYILLVGYPPFWDEDQHKLYQQIKAGAYDFPSPEWDTVTPEAKNLINQMLTINPAKRITAHEALKHPWVCQRSTVASMMHRQETVECLKKFNARRKLKGAILTTMLATRNFSVGRQTTAPATMSTAASGTTMGLVEQAKSLLNKKADGVKPQTNSTKNSAAATSPKGTLPPAALEPQTTVIHNPVDGIKESSDSANTTIEDEDAKARKQEIIKTTEQLIEAVNNGDFEAYA

SEQ ID NO: 247970 - DNA, 1629 bp, Artificial Sequence
  derived and/or modified sequence
atggctactacagtgacatgtacacgtttcacagacgagtaccagttgtatgaggatattggaaaaggggctttttccgtcgtgcggcgatgtgtgaagttgtgtacaggtcatgagtatgctgccaaaattatcaacacaaaaaagctgtccgccagagaccaccagaagctggagcgcgaagctaggatctgccgcctcctgaagcatagtaacatcgtgcgcctacatgacagcatctctgaagagggctttcattacctcgtattcgatctagtgacaggcggtgagctctttgaggatatagtcgcaagagagtactattcagaagccgatgcttctcattgcatccagcagatccttgaagctgtgcttcattgccaccagatgggtgttgtgcaccgggacctgaagccagagaacttgctgctcgcctccaagtgcaagggagccgcagtaaagctggctgacttcgggttggccattgaagtgcaaggtgaccagcaggcttggttcggcttcgcaggaactcctggctacctctctcccgaggttctgaggaaagaagcatacgggaaaccggtagacatctgggcctgcggagtgatattgtacatactgcttgtgggctatccccccttctgggacgaagaccagcacaaactctaccaacagatcaaagctggagcctacgactttccctcacctgagtgggataccgtaaccccagaagccaagaacctcatcaaccagatgttgactatcaaccccgccaaaagaattaccgcacacgaagctttaaaacatccatgggtgtgccaacgctcaaccgttgccagcatgatgcataggcaggaaactgtggaatgcctcaaaaagttcaacgcgcggcggaagcttaagggagctatcctgaccaccatgctcgccacgcgcaactttagtgtggggcgccaaaccacagctcccgccactatgtctaccgccgcaagtgggaccactatggggctcgttgagcaggccaaatctttgctcaataagaaggccgatggggtgaagccccagaccaactcaacaaagaactctgcggctgccactagcccaaaagggaccctgcctccagctgctcttgagccccagaccacagtgatccacaaccctgtcgatggcatcaaggaaagcagtgactccgccaatactactatcgaagacgaagatgccaaagcccgcaaacaggagatcattaaaactactgaacagctcatcgaggccgtgaataatggtgactttgaggcttacgctaaaatttgcgatcctggcctgacctcgttcgagcccgaagcactcggtaaccttgtggagggcatggacttccatcgtttttacttcgagaatctgctggctaaaaattcaaagcccattcatacgaccatcctgaatccccacgtacacgtgatcggggaagatgccgcctgcatagcctatattcgccttacccagtacatagacgggcaaggaaggccacgcacctcacaatctgaagaaacaagggtttggcaccgccgcgacggcaaatggcagaacgttcattttcactgctccggggcccccgtggcacctctgcagtag

SEQ ID NO: 247971 - DNA, 1629 bp, Artificial Sequence
  derived and/or modified sequence
atggccaccactgtgacgtgcactcgattcacggatgagtaccagctgtacgaggacataggcaaaggcgctttcagcgtggttcgcagatgcgtaaaactgtgcacaggccacgaatacgccgctaaaattattaatactaaaaaactgtccgctcgagatcaccaaaaactggagcgagaagcaagaatctgccggctcttaaaacatagcaatatcgtccgccttcacgatagtatatctgaagaaggattccactacctggtgtttgatctagttaccggaggtgagctgttcgaggacattgtcgcccgagagtactactccgaggcagacgcatcacactgtatccaacaaattctggaagcagtgttacactgccaccagatgggcgtggtccatcgcgatctcaagcccgagaatcttctgcttgcctcgaagtgcaaaggggccgcagttaaattggcagatttcgggctagcaattgaagtgcagggcgaccagcaggcctggtttggctttgccgggacacccggatacttaagtccagaagtcctgagaaaggaagcatacggaaagcctgtggacatctgggcctgcggcgtcatcctttacatcctgttagtcggctacccgccattctgggatgaggaccagcataaactgtaccaacaaataaaagcaggtgcatatgactttccaagcccagagtgggataccgttacaccagaggctaagaacttgatcaatcagatgcttactataaaccccgctaaacggattaccgcccatgaggccttgaaacacccctgggtctgtcaaaggtctacggttgcgtctatgatgcatcggcaggagacggtggaatgcctgaagaagttcaatgcacgccgcaaactaaagggcgcaatcctcacgacgatgctggccacaaggaactttagcgtcgggcgacagactactgctccagctactatgagcaccgccgcatcggggacgaccatgggacttgtagaacaggctaaatctctactgaataaaaaagccgatggcgtcaagcctcagactaactccactaaaaatagcgctgcagctacatccccgaagggcacattacccccagctgctcttgaaccccagactactgtgatccacaaccctgtggatgggataaaggagtctagtgattcggctaataccacgatcgaagatgaagacgcaaaagcccggaagcaggagattatcaagaccacagagcagctaatcgaggccgtcaacaatggcgattttgaggcttatgccaagatttgtgatcctgggctaacatctttcgagccagaggcactgggaaatctggtcgagggaatggacttccatcgcttctactttgaaaatctgctcgcaaaaaattcgaaacccattcatactacgattctgaacccccacgtgcacgtcataggtgaggatgccgcgtgcatcgcctatattaggctcacacagtacatcgacgggcaaggaaggccccgtactagccagtccgaggagacacgagtttggcatcgcagggatggcaaatggcagaatgttcacttccactgtagcggcgcacctgtggcccctctgcagtag

SEQ ID NO: 247972 - DNA, 918 bp, Artificial Sequence
  derived and/or modified sequence
atgggcgtcgtgcacagggacttgaagcccgaaaatctcttgctcgcctccaaatgtaaaggagccgccgtcaaactcgcggattttggtctggccatcgaggtccaaggagatcagcaagcttggttcggcttcgccgggacaccgggttacctctctcccgaagtcctgcgcaaggaggcttacggaaagcctgtggatatctgggcttgtggagttatcctgtatattttactggtcgggtatccacccttctgggatgaggatcagcacaaactttaccagcagattaaggccggcgcttatgactttccgtccccagagtgggataccgttacacctgaagccaagaatctgatcaaccagatgctaaccataaatccagccaaacggatcaccgcacatgaggccctcaaacatccctgggtgtgccagcgttccactgtagcatccatgatgcacaggcaggagacagtggagtgtctgaaaaagtttaatgctagaaggaaactcaaaggcgcgatactgactacaatgctggccaccagaaacttctccgtaggccgacagaccacagccccggccacaatgagcaccgccgcctcaggtaccaccatgggcttggtggaacaagcgaaaagtctgctgaataaaaaggccgacggcgtgaaaccacaaaccaacagcaccaaaaactccgccgccgctacctcacccaaggggacactcccacccgccgctctcgagccccaaactacagtgatccacaaccccgtcgatggaattaaggagagtagcgattccgcaaataccactatcgaggacgaggatgcaaaagcccggaaacaggaaataattaagactactgagcaactgattgaggcggtcaacaacggcgactttgaggcctatgcctag

SEQ ID NO: 247973 - DNA, 1629 bp, Artificial Sequence
  derived and/or modified sequence
atggccaccaccgtgacctgcacccgcttcacagatgagtaccagctgtatgaggacatcggcaagggggccttctctgtggtgagaagatgtgtgaagctgtgcaccggccacgagtatgctgccaagatcatcaacaccaagaagctgagcgcccgggaccaccagaagctggagcgggaggcccgcatctgccgcctgctgaagcacagcaacatcgtgcggctgcatgacagcatcagcgaggagggcttccactacctggtgtttgacctggtgactggaggagagctgtttgaggacatcgtggcccgggagtactacagcgaggctgatgccagccactgcatccagcagatcctggaggccgtgctgcactgccaccagatgggcgtggtgcaccgggacctgaagccagagaacctgctgctggccagcaaatgtaaaggagctgctgtgaagctggccgactttggcctggccatcgaggtgcagggcgaccagcaggcctggtttggatttgctggcaccccaggctacctgagccctgaggtgctgaggaaggaggcctacggcaagcctgtggacatctgggcctgtggggtcatcctgtacatcctgctggtgggctacccacccttctgggatgaggaccagcacaagctgtaccagcagatcaaggccggggcctatgacttccccagccctgagtgggacacagtgaccccagaggccaagaacctgatcaaccagatgctgaccatcaacccagccaagaggatcacagcccacgaggccctgaagcacccctgggtgtgccagaggagcacagtggcctccatgatgcaccggcaggagaccgtggagtgcctgaagaagttcaatgcccggaggaagctgaagggggccatcctgaccaccatgctggccaccaggaacttctctgtgggccggcagaccacagccccagccaccatgagcacagctgccagcggcaccaccatgggcctggtggagcaggccaagagcctgctgaacaagaaggcagatggagtgaagccccagaccaacagcaccaagaacagcgctgctgccaccagccccaagggcaccctgcccccagctgccctggagccccagaccaccgtcatccacaaccctgtggatggcatcaaggagagcagtgacagcgccaacaccaccattgaagatgaagatgccaaggccaggaagcaggagatcatcaagaccacagagcagctgattgaggccgtgaacaatggagactttgaggcctatgccaagatctgtgaccccggcctgaccagctttgagcctgaggccctgggcaacctggtggagggcatggacttccaccgcttctactttgagaacctgctggccaagaacagcaagcccatccacaccaccatcctgaacccccacgtgcacgtgattggagaagatgctgcctgcatcgcctacatccggctgacccagtacattgatggccagggccggcccaggaccagccagagcgaggagaccagggtgtggcacagaagagatggcaagtggcagaatgtgcacttccactgcagcggggcccctgtggcccccctgcagtag

SEQ ID NO: 247974 - DNA, 918 bp, Artificial Sequence
  derived and/or modified sequence
atgggcgtggtgcaccgggacctgaagccagagaacctgctgctggccagcaagtgcaagggagctgctgtgaagctggccgactttggcctggccatcgaggtgcagggcgaccagcaggcctggtttggatttgctggcaccccaggctacctgagccctgaggtgctgaggaaggaggcctacggcaagcctgtggacatctgggcctgtggggtcatcctgtacatcctgctggtgggctacccacccttctgggatgaggaccagcacaagctgtaccagcagatcaaggccggggcctatgacttccccagccctgagtgggacacagtgaccccagaggccaagaacctgatcaaccagatgctgaccatcaacccagccaagaggatcacagcccacgaggccctgaagcacccctgggtgtgccagaggagcacagtggcctccatgatgcaccggcaggagaccgtggagtgcctgaagaagttcaatgcccggaggaagctgaagggggccatcctgaccaccatgctggccaccaggaacttctctgtgggccggcagaccacagccccagccaccatgagcacagctgccagcggcaccaccatgggcctggtggagcaggccaagagcctgctgaacaagaaggcagatggagtgaagccccagaccaacagcaccaagaacagcgctgctgccaccagccccaagggcaccctgcccccagctgccctggagccccagaccaccgtcatccacaaccctgtggatggcatcaaggagagcagtgacagcgccaacaccaccattgaagatgaagatgccaaggccaggaagcaggagatcatcaagaccacagagcagctgattgaagctgtgaacaacggggactttgaggcctatgcctag

SEQ ID NO: 247975 - DNA, 1629 bp, Artificial Sequence
  derived and/or modified sequence
atggccaccaccgtgacctgcacccggttcaccgacgagtaccagctatacgaggatatcggcaaaggagcctttagcgtggtccggcgttgcgttaagctctgcacaggccacgaatatgccgccaagatcatcaacactaaaaagctgagtgcaagggaccatcagaagctggagagggaagcgagaatatgtcgacttttgaaacacagtaatatcgttcgcttacacgatagcatcagcgaagaaggcttccattatcttgtgtttgacctcgtgacgggcggtgaactgttcgaggacatcgtcgcccgagagtactactccgaggcggacgcatcacactgcattcagcagatcttagaggccgtccttcactgtcaccagatgggtgtcgtccacagagacttgaaacccgaaaacctgcttttagctagtaaatgtaaaggggccgcagtgaagttggccgacttcggcctggccattgaggtccagggcgatcaacaagcatggttcggcttcgccggcacccctggctacctcagtcccgaggttctccggaaagaagcctacggcaaaccagtggatatttgggcctgcggcgtgattctttacattctactcgtcggctatccccccttttgggacgaggatcaacataagctctatcaacaaataaaggccggtgcttacgattttccctcccccgaatgggacaccgtgaccccagaggccaagaatttgataaaccagatgctaaccatcaatcctgcaaagagaataactgctcacgaagcactgaagcatccatgggtgtgccagcgatctactgtggcttccatgatgcacaggcaggagacagtagagtgcctgaagaaatttaatgctcgccgaaagctaaagggtgcgatcctcacaaccatgttagctacccgaaatttctctgtgggcagacagacaacagctcctgccaccatgagcacagcagcgtcagggaccaccatgggcctcgtagaacaagctaagagcctattgaataagaaagccgacggggtcaaaccacagacgaactccacgaagaactccgccgccgcgacgtcccctaaaggaaccctcccccctgccgccctggagccacaaacaactgtgatccataatccagtggatgggatcaaggagtcctctgacagcgcaaacactacgatagaagacgaggacgctaaagctaggaagcaggagattatcaaaaccaccgagcaattaatagaggccgttaacaatggtgattttgaggcctatgctaaaatctgcgatcctggactgacttcgtttgagcctgaagcacttggaaaccttgtggaagggatggacttccaccgattctacttcgagaaccttcttgccaagaatagtaagcctatccataccacaattctcaatccacacgtacacgtgatcggggaggacgccgcatgcatcgcttacattcggctgactcagtacatcgacggccaaggaagaccgcgcacctctcagtctgaggagacacgggtgtggcaccgcagggacggcaagtggcagaacgtacacttccattgttccggggctccagtggcgcctctgcagtag

SEQ ID NO: 247976 - DNA, 1629 bp, Artificial Sequence
  derived and/or modified sequence
atggccaccaccgtgacctgcacccggttcaccgacgagtaccagctgtacgaggacatcggcaagggagccttctccgtcgtccgccggtgtgtgaagttatgtacagggcacgaatatgctgccaagattatcaatacaaagaaactgagcgcaagagatcaccagaaacttgaaagagaagctcggatttgtcggctccttaagcactccaatatagtgcggctacacgatagcatctccgaggagggttttcattacttggtttttgacctcgtcactgggggcgaattgttcgaggatatagtggctcgcgaatactactcggaggcagacgcgtctcactgcatccaacagattttggaagctgtgttgcactgtcaccagatgggggtggtccatagagatctcaaaccagaaaacctcctgttagccagcaaatgcaagggagccgctgtcaagttagctgactttggactggctattgaggtgcagggagaccagcaagcctggtttggtttcgcgggtacaccaggatacctgtcccccgaggttctccgaaaagaggcctacggtaaacctgtggacatttgggcatgcggcgtaatcttgtacattctcttggttgggtatcctccgttttgggacgaggatcagcataaactctatcaacaaatcaaggcaggtgcttacgattttcccagccctgagtgggacaccgtgactcccgaggccaagaacctcatcaaccagatgctcactattaacccagccaagagaataactgcgcacgaggcactgaagcacccctgggtgtgtcagagatccacagttgccagtatgatgcaccgccaagagaccgtggagtgcttgaaaaaatttaacgcccgccggaaactgaagggggccattctcacgaccatgctagctactaggaatttttccgtcgggaggcagactaccgcaccagctaccatgtccacagcagcttccgggaccaccatgggtctggtcgagcaggcaaagagtctattaaacaagaaagccgacggcgtcaaaccccaaactaatagtacaaaaaattctgcggccgctaccagtcccaagggaactctccctccagccgcacttgagccccagacgacggttatacataaccctgtggacggaatcaaggagtcaagtgatagcgccaacacaactattgaggatgaggatgccaaggctaggaagcaggagatcattaagacaactgagcagctgatcgaagccgtgaacaatggagacttcgaagcatacgccaaaatctgtgatcccgggttgacctctttcgagcccgaggccctcggaaatttggtggaagggatggatttccacaggttttacttcgaaaacctgctggctaagaactcaaaaccaatccacaccacaatacttaaccctcacgtccatgtgattggcgaagacgcggcatgcatagcatacatccggctcacccaatacattgatggtcagggtaggccccgcactagtcagtccgaggaaactcgagtgtggcaccggagggacggcaagtggcagaatgttcattttcattgcagcggtgctcctgttgcccccctgcagtag

SEQ ID NO: 247977 - DNA, 918 bp, Artificial Sequence
  derived and/or modified sequence
atgggcgtggtgcaccgggacctgaagcccgagaacctgctgctggcgtccaagtgtaagggtgccgctgtgaaacttgcagacttcggactggccatcgaagtgcagggggatcaacaggcctggttcggctttgctggtactccaggataccttagcccggaggttctccgtaaggaagcatacggtaagcctgtggatatctgggcctgcggagtgattctgtatattctgctcgtagggtacccaccattttgggatgaagatcagcacaagctgtatcagcagatcaaagctggcgcatacgattttccttctcctgagtgggacacagtgacacctgaggccaagaacctcattaaccagatgctcacaattaatccagctaaaaggatcacggcacatgaggctctgaaacatccttgggtgtgtcagaggtctactgtggcatccatgatgcacaggcaggagacggtggagtgccttaagaagtttaacgctcgcaggaagcttaaaggagctatcttgaccaccatgctggctactcgtaacttctcagttggacggcagacaacagcgccggccaccatgagcacagctgcctctgggactactatgggcctggtggagcaggcaaaatccctgctaaacaagaaagcggatggagtgaagccacagaccaattccacgaagaatagcgcagcggcaacctcccccaaaggcacgcttccacctgcagctctggaaccccagacgactgttattcacaacccagtagatggaatcaaggaaagcagcgatagcgctaatactacgattgaagacgaggatgccaaggctcggaaacaggagattatcaagaccacagaacagctgatcgaagctgttaacaatggtgacttcgaggcatatgcatag

SEQ ID NO: 247978 - DNA, 1629 bp, Artificial Sequence
  derived and/or modified sequence
atggcgacgaccgtgacctgcacaagattcactgacgagtatcaattgtacgaagatattggaaaaggagctttttcagttgttaggagatgtgtgaagttatgcaccggtcacgagtacgcagccaaaatcatcaatacgaagaagctgagtgcacgcgatcatcagaaactagagcgagaggcaaggatttgcaggctgctaaaacattccaatatcgtacggttgcatgatagcatcagcgaagagggatttcattatcttgtgtttgacttggtgacaggcggtgaactgtttgaggatatcgtggcacgggaatattacagcgaggccgacgcctcccattgtatacaacagatcctcgaagcagtgctccactgccaccagatgggcgtagttcatcgcgatttgaagcctgagaacctgctcctcgcatcgaaatgcaagggcgctgcggtaaagctggccgactttgggctcgctatcgaggtgcaaggggaccagcaggcctggtttggcttcgcagggacacctggctatctgtcaccggaagtcctgaggaaagaggcctacggaaaacctgtggacatatgggcttgtggcgtcattttgtacattctcctggtcggctacccccctttctgggacgaagatcagcacaagctgtatcagcagattaaagccggagcctacgacttcccctctccggaatgggacacagttaccccagaggctaagaatctgataaatcagatgttgaccattaaccctgctaagcgcataacggcccatgaggcattaaaacatccctgggtctgccagaggtccaccgtggctagcatgatgcataggcaggagacggttgagtgtctgaaaaagtttaacgctcgacgcaaactgaagggcgctatcctgaccactatgcttgccacccgcaatttcagcgtcggccgtcaaactacagcacctgccaccatgtccactgccgctagtggaacaacgatggggcttgtggaacaagctaagagcctacttaataagaaagccgacggtgtgaagcctcagactaacagtaccaaaaacagtgccgctgcaaccagccccaaggggaccctgcccccagctgccctggaaccacaaacaactgtgatccataatcccgtagacggaattaaggagtctagcgacagcgctaatacgacaatcgaggacgaagacgctaaggccaggaagcaggagatcattaaaacaacggagcagctgatcgaagctgttaataatggggattttgaggcctacgccaagatctgtgacccaggcctgacctctttcgaacccgaggcactgggtaacctggtcgaagggatggactttcacagattttacttcgaaaacttgctggcaaagaactctaagccaattcatactactattttaaacccccacgttcacgtaatcggggaagacgccgcttgtatcgcttatattcggcttacccagtacattgacggccaagggaggcctagaaccagtcaaagtgaggagacacgggtttggcatcgccgagatggcaagtggcagaacgtccactttcattgctccggcgcaccagtagccccactccagtag

SEQ ID NO: 247979 - DNA, 1629 bp, Artificial Sequence
  derived and/or modified sequence
atggccacaacagtcacatgcacacgctttactgacgagtatcagctctatgaggacatcggcaaaggagccttctccgttgtgaggcggtgtgtgaagctctgtacagggcacgagtacgctgctaagatcataaacactaagaaactcagcgcacgagaccaccagaagctagaacgtgaggccagaatttgtcggctccttaagcatagcaacatcgttagactacacgactccatcagtgaagagggcttccattacctagtgttcgacctggtgaccggcggtgagctcttcgaggacatcgtggctcgagagtattacagtgaggccgacgctagccattgtatccagcagattctagaagcagtgctgcactgccatcaaatgggcgtagtgcatcgggatctgaagcctgaaaatttactgctcgctagcaagtgcaaaggcgctgcagtgaagctcgcggactttgggcttgccattgaagtgcagggggatcagcaggcttggttcggcttcgcagggaccccgggatatctgagccccgaagtgctgagaaaggaggcttacgggaaacccgttgacatctgggcatgtggtgtgattctttatatcctgctggtgggttaccctccattctgggatgaggatcagcataagctgtaccagcagatcaaagctggggcatatgacttcccaagccccgagtgggacacagtaacccccgaagccaaaaacctcattaaccaaatgctgaccatcaatcctgccaaacggattacggctcatgaagcactcaagcatccatgggtctgccagcgaagtacagttgctagcatgatgcataggcaggaaactgtggagtgcctgaagaagttcaatgcgaggagaaagctgaagggggcaattctgaccacaatgctggctaccagaaactttagcgtaggcagacagactactgcaccagccaccatgtctaccgccgcatcagggacaacaatggggcttgtagaacaggccaagagcctcctcaacaaaaaggcggacggtgtcaaaccccaaaccaactcaactaaaaatagtgcggctgctacgtcacccaaaggaactctccctcctgcggcactggagccacagactacagtgattcataatccagtcgacggcattaaggagtcatctgacagcgcaaacaccaccatagaggacgaagatgccaaagcacgcaagcaagaaattattaagactacggagcagttgatcgaggctgtaaacaacggagattttgaggcgtatgctaaaatctgtgaccctggtctcacttcttttgaaccagaggcgttggggaaccttgtggagggcatggatttccataggttttacttcgagaacctcctcgccaaaaactcaaagcctatccacactaccattctgaatccccacgttcacgtcatcggggaggatgcagcatgcattgcatatattagactgacacaatatattgacggacaggggcgtcccagaacttcccagtctgaagagactcgcgtgtggcatcgccgagatggaaagtggcaaaacgtccactttcattgcagcggcgctcccgtggcccctcttcagtag

SEQ ID NO: 247980 - DNA, 918 bp, Artificial Sequence
  derived and/or modified sequence
atgggtgtcgtgcatagggacctgaagcccgaaaacctgctcctcgcatccaaatgcaagggagccgctgtgaaactggcagattttggcttggcgattgaagtgcagggtgaccagcaggcgtggttcggtttcgccggtacacctggttatctctctccagaggtgcttcgcaaggaagcttatggtaagccagtggacatctgggcttgtggagtgattctgtatattctgctcgtgggctatcccccattctgggatgaggatcagcataaactataccagcagatcaaggccggagcttacgattttccctcacccgaatgggacaccgttacccctgaagccaagaatttaatcaatcaaatgttgaccattaacccagccaagcggatcactgcccatgaagccctgaaacacccatgggtatgtcagcgttccactgtcgcctcaatgatgcatcgccaggagacagtggaatgcttgaagaaatttaatgcgaggaggaaactcaaaggagccatcttgacaaccatgctggcaacaaggaatttcagcgtcgggaggcagacaaccgccccagctacaatgagcaccgccgcttcgggcaccacgatgggattggtggagcaagccaaatccctgcttaacaagaaagctgatggcgtcaaaccccagaccaatagcaccaagaacagtgctgccgcaacttcacccaaagggaccttacctcccgctgcactggaaccccaaacaactgtgatccacaatccggtagatggcatcaaggagtcttccgacagcgcgaacactaccattgaggacgaggacgccaaagctcgaaagcaggagattattaagacaacggagcaattgatcgaggctgtgaataacggggatttcgaagcatatgcttag

SEQ ID NO: 247981 - DNA, 2292 bp, Artificial Sequence
  derived and/or modified sequence
gtgcccgcgagcgggagccggagtcgccgccgcccgagcgcagccgagcgcacgccgagcccgtccgccgccgccatggccaccacggtgacctgcacccgcttcaccgacgagtaccagctctacgaggatattggcaagggggctttctctgtggtccgacgctgtgtcaagctctgcaccggccatgagtatgcagccaagatcatcaacaccaagaagctgtcagccagagatcaccagaagctggagagagaggctcggatctgccgccttctgaagcattccaacatcgtgcgtctccacgacagcatctccgaggagggcttccactacctggtcttcgatctggtcactggtggggagctctttgaagacattgtggcgagagagtactacagcgaggctgatgccagtcactgtatccagcagatcctggaggccgttctccattgtcaccaaatgggggtcgtccacagagacctcaagccggagaacctgcttctggccagcaagtgcaaaggggctgcagtgaagctggcagacttcggcctagctatcgaggtgcagggggaccagcaggcatggtttggtttcgctggcacaccaggctacctgtcccctgaggtccttcgcaaagaggcgtatggcaagcctgtggacatctgggcatgtggggtgatcctgtacatcctgctcgtgggctacccacccttctgggacgaggaccagcacaagctgtaccagcagatcaaggctggtgcctatgacttcccgtcccctgagtgggacaccgtcactcctgaagccaaaaacctcatcaaccagatgctgaccatcaaccctgccaagcgcatcacagcccatgaggccctgaagcacccgtgggtctgccaacgctccacggtagcatccatgatgcacagacaggagactgtggagtgtctgaaaaagttcaatgccaggagaaagctcaagggagccatcctcaccaccatgctggccacacggaatttctcagtgggcagacagaccaccgctccggccacaatgtccaccgcggcctccggcaccaccatggggctggtggaacaagccaagagtttactcaacaagaaagcagatggagtcaagccccagacgaatagcaccaaaaacagtgcagccgccaccagccccaaagggacgcttcctcctgccgccctggagcctcaaaccaccgtcatccataacccagtggacgggattaaggagtcttctgacagtgccaataccaccatagaggatgaagacgctaaagcccggaagcaggagatcattaagaccacggagcagctcatcgaggccgtcaacaacggtgactttgaggcctacgcgaaaatctgtgacccagggctgacctcgtttgagcctgaagcactgggcaacctggttgaagggatggacttccacagattctacttcgagaacctgctggccaagaacagcaagccgatccacacgaccatcctgaacccacacgtgcacgtcattggagaggatgccgcctgcatcgcttacatccggctcacgcagtacattgacgggcagggccggccccgcaccagccagtctgaggagacccgcgtgtggcaccgccgcgacggcaagtggcagaacgtgcacttccactgctcgggcgcgcctgtggccccgctgcagtgaagccaagggaggggcacagaatggggaacaggacacaggatcctaaactccaaggggactgtccaccgatgaacactcagagtggacaccatcttccgtccacgctgtgcccaggacagctgtccccatccatgaacacagggtaaacatctgccgggctccgcaccagtggctccctgggccatgggacagcggcagggctcaccacggacagcacgtggcccagcagccggccaccctggcgtcctggggcctcctcccctcctctccctctcaccttgtcacctccacggagctgcctgtctgggataatttggggattttttttctgggggataattcttttgcatgacccctaaagagcaagccacaccggtctgctagctaggtgtccgcggtgtggtggtggcggccgctggccagcgctgcaaggggtcggctgcccacggtgctggctggcctcccctcctctctctttttgctgagtttcattgtcttttctttctgagccttgtaagtgtacaaaaattattcttattttgttctgtctcgggaaactgcaaataaaagaaaaacaggacaaactgc

SEQ ID NO: 247982 - DNA, 2097 bp, Artificial Sequence
  derived and/or modified sequence
gcggcgcccgcgcctccccgcgcgtaggtgtgcggcgcgctcctggcgaggacggagcgagcagatctcgcgtgcgctcgccgcccggcgcagcccagcccggcccccgcctggcgccgcgagccgaggtgtctcccgcgcccgcgcccgtgtcgccgccgtgcccgcgagcgggagccggagtcgccgccgcccgagcgcagccgagcgcacgccgagcccgtccgccgccgccatggccaccacggtgacctgcacccgcttcaccgacgagtaccagctctacgaggatattggcaagggggctttctctgtggtccgacgctgtgtcaagctctgcaccggccatgagtatgcagccaagatcatcaacaccaagaagctgtcagccagagatcaccagaagctggagagagaggctcggatctgccgccttctgaagcattccaacatcgtgcgtctccacgacagcatctccgaggagggcttccactacctggtcttcgatctggtcactggtggggagctctttgaagacattgtggcgagagagtactacagcgaggctgatgccagtcactgtatccagcagatcctggaggccgttctccattgtcaccaaatgggggtcgtccacagagacctcaagccggagaacctgcttctggccagcaagtgcaaaggggctgcagtgaagctggcagacttcggcctagctatcgaggtgcagggggaccagcaggcatggtttggtttcgctggcacaccaggctacctgtcccctgaggtccttcgcaaagaggcgtatggcaagcctgtggacatctgggcatgtggggtgatcctgtacatcctgctcgtgggctacccacccttctgggacgaggaccagcacaagctgtaccagcagatcaaggctggtgcctatgacttcccgtcccctgagtgggacaccgtcactcctgaagccaaaaacctcatcaaccagatgctgaccatcaaccctgccaagcgcatcacagcccatgaggccctgaagcacccgtgggtctgccaacgctccacggtagcatccatgatgcacagacaggagactgtggagtgtctgaaaaagttcaatgccaggagaaagctcaagggagccatcctcaccaccatgctggccacacggaatttctcagtgggcagacagaccaccgctccggccacaatgtccaccgcggcctccggcaccaccatggggctggtggaacaagccaagagtttactcaacaagaaagcagatggagtcaagccccagacgaatagcaccaaaaacagtgcagccgccaccagccccaaagggacgcttcctcctgccgccctggagcctcaaaccaccgtcatccataacccagtggacgggattaaggagtcttctgacagtgccaataccaccatagaggatgaagacgctaaagcccggaagcaggagatcattaagaccacggagcagctcatcgaggccgtcaacaacggtgactttgaggcctacgcgaaaatctgtgacccagggctgacctcgtttgagcctgaagcactgggcaacctggttgaagggatggacttccacagattctacttcgagaacctgctggccaagaacagcaagccgatccacacgaccatcctgaacccacacgtgcacgtcattggagaggatgccgcctgcatcgcttacatccggctcacgcagtacattgacgggcagggccggccccgcaccagccagtctgaggagacccgcgtgtggcaccgccgcgacggcaagtggcagaacgtgcacttccactgctcgggcgcgcctgtggccccgctgcagtgaagagctgcgccctggtttcgccggacagagttggtgtttggagcccgactgccctcgggcacacggcctgcctgtcgcatgtttgtgtctgcctcgttccctcccctggtgcctgtgtctgcagaaaaacaagaccagatgtgatttgttaaaaaaaaacaaaaaaaaaaaaaaaaaaaacaagatgacgacgacaaccacaaaaaaaattgacatcagatgaaatgaaaaaa

SEQ ID NO: 247983 - DNA, 1856 bp, Artificial Sequence
  derived and/or modified sequence
agtcgccgccgcccgagcgcagccgagcgcacgccgagcccgtccgccgccgccatggccaccacggtgacctgcacccgcttcaccgacgagtaccagctctacgaggatattggcaagggggctttctctgtggtccgacgctgtgtcaagctctgcaccggccatgagtatgcagccaagatcatcaacaccaagaagctgtcagccagagatcaccagaagctggagagagaggctcggatctgccgccttctgaagcattccaacatcgtcactgtatccagcagatcctggaggccgttctccattgtcaccaaatgggggtcgtccacagagacctcaagccggagaacctgcttctggccagcaagtgcaaaggggctgcagtgaagctggcagacttcggcctagctatcgaggtgcagggggaccagcaggcatggtttggtttcgctggcacaccaggctacctgtcccctgaggtccttcgcaaagaggcgtatggcaagcctgtggacatctgggcatgtggggtgatcctgtacatcctgctcgtgggctacccacccttctgggacgaggaccagcacaagctgtaccagcagatcaaggctggtgcctatgacttcccgtcccctgagtgggacaccgtcactcctgaagccaaaaacctcatcaaccagatgctgaccatcaaccctgccaagcgcatcacagcccatgaggccctgaagcacccgtgggtctgccaacgctccacggtagcatccatgatgcacagacaggagactgtggagtgtctgaaaaagttcaatgccaggagaaagctcaagggagccatcctcaccaccatgctggccacacggaatttctcagtgggcagacagaccaccgctccggccacaatgtccaccgcggcctccggcaccaccatggggctggtggaacaagccaagagtttactcaacaagaaagcagatggagtcaagccccagacgaatagcaccaaaaacagtgcagccgccaccagccccaaagggacgcttcctcctgccgccctggagcctcaaaccaccgtcatccataacccagtggacgggattaaggagtcttctgacagtgccaataccaccatagaggatgaagacgctaaagcccggaagcaggagatcattaagaccacggagcagctcatcgaggccgtcaacaacggtgactttgaggcctacgcgtgagtccctggggctgggggggggctgtgcaggacaaggatgtgggacccttgggggggcctgctcagagtcaggggtccacggggcccctcctcacttggatttggcccccaggaaaatctgtgacccagggctgacctcgtttgagcctgaagcactgggcaacctggttgaagggatggacttccacagattctacttcgagaacctgctggccaagaacagcaagccgatccacacgaccatcctgaacccacacgtgcacgtcattggagaggatgccgcctgcatcgcttacatccggctcacgcagtacattgacgggcagggccggccccgcaccagccagtctgaggagacccgcgtgtggcaccgccgcgacggcaagtggcagaacgtgcacttccactgctcgggcgcgcctgtggccccgctgcagtgaagccaagggaggggcacagaatggggaacaggacacaggatcctaaactccaaggggactgtccaccgatgaacactcagagtggacaccatcttccgtccacgctgtgcccaggacagctgtccccatccatgaacacagggtaaacatctgccgggctccgcaccagtggctccctg

SEQ ID NO: 247984 - DNA, 1629 bp, Artificial Sequence
  derived and/or modified sequence
atggccaccaccgtgacctgcaccagattcaccgacgagtaccagctgtacgaggacatcggcaagggcgccttcagcgtggtgagaagatgcgtgaagctgtgcaccggccacgagtacgccgccaagatcatcaacaccaagaagctgagcgccagagaccaccagaagctggagagagaggccagaatctgcagactgctgaagcacagcaacatcgtgagactgcacgacagcatcagcgaggagggcttccactacctggtgttcgacctggtgaccggcggcgagctgttcgaggacatcgtggccagagagtactacagcgaggccgacgccagccactgcatccagcagatcctggaggccgtgctgcactgccaccagatgggcgtggtgcacagagacctgaagcccgagaacctgctgctggccagcaagtgcaagggcgccgccgtgaagctggccgacttcggcctggccatcgaggtgcagggcgaccagcaggcctggttcggcttcgccggcacccccggctacctgagccccgaggtgctgagaaaggaggcctacggcaagcccgtggacatctgggcctgcggcgtgatcctgtacatcctgctggtgggctacccccccttctgggacgaggaccagcacaagctgtaccagcagatcaaggccggcgcctacgacttccccagccccgagtgggacaccgtgacccccgaggccaagaacctgatcaaccagatgctgaccatcaaccccgccaagagaatcaccgcccacgaggccctgaagcacccctgggtgtgccagagaagcaccgtggccagcatgatgcacagacaggagaccgtggagtgcctgaagaagttcaacgccagaagaaagctgaagggcgccatcctgaccaccatgctggccaccagaaacttcagcgtgggcagacagaccaccgcccccgccaccatgagcaccgccgccagcggcaccaccatgggcctggtggagcaggccaagagcctgctgaacaagaaggccgacggcgtgaagccccagaccaacagcaccaagaacagcgccgccgccaccagccccaagggcaccctgccccccgccgccctggagccccagaccaccgtgatccacaaccccgtggacggcatcaaggagagcagcgacagcgccaacaccaccatcgaggacgaggacgccaaggccagaaagcaggagatcatcaagaccaccgagcagctgatcgaggccgtgaacaacggcgacttcgaggcctacgccaagatctgcgaccccggcctgaccagcttcgagcccgaggccctgggcaacctggtggagggcatggacttccacagattctacttcgagaacctgctggccaagaacagcaagcccatccacaccaccatcctgaacccccacgtgcacgtgatcggcgaggacgccgcctgcatcgcctacatcagactgacccagtacatcgacggccagggcagacccagaaccagccagagcgaggagaccagagtgtggcacagaagagacggcaagtggcagaacgtgcacttccactgcagcggcgcccccgtggcccccctgcagtag

SEQ ID NO: 247985 - DNA, 918 bp, Artificial Sequence
  derived and/or modified sequence
atgggcgtggtgcacagagacctgaagcccgagaacctgctgctggccagcaagtgcaagggcgccgccgtgaagctggccgacttcggcctggccatcgaggtgcagggcgaccagcaggcctggttcggcttcgccggcacccccggctacctgagccccgaggtgctgagaaaggaggcctacggcaagcccgtggacatctgggcctgcggcgtgatcctgtacatcctgctggtgggctacccccccttctgggacgaggaccagcacaagctgtaccagcagatcaaggccggcgcctacgacttccccagccccgagtgggacaccgtgacccccgaggccaagaacctgatcaaccagatgctgaccatcaaccccgccaagagaatcaccgcccacgaggccctgaagcacccctgggtgtgccagagaagcaccgtggccagcatgatgcacagacaggagaccgtggagtgcctgaagaagttcaacgccagaagaaagctgaagggcgccatcctgaccaccatgctggccaccagaaacttcagcgtgggcagacagaccaccgcccccgccaccatgagcaccgccgccagcggcaccaccatgggcctggtggagcaggccaagagcctgctgaacaagaaggccgacggcgtgaagccccagaccaacagcaccaagaacagcgccgccgccaccagccccaagggcaccctgccccccgccgccctggagccccagaccaccgtgatccacaaccccgtggacggcatcaaggagagcagcgacagcgccaacaccaccatcgaggacgaggacgccaaggccagaaagcaggagatcatcaagaccaccgagcagctgatcgaggccgtgaacaacggcgacttcgaggcctacgcctag

SEQ ID NO: 247986 - protein, 518 aa, Artificial Sequence
  derived and/or modified sequence
MATTVTCTRFTDEYQLYEDIGKGAFSVVRRCVKLCTGHEYAAKIINTKKLSARDHQKLEREARICRLLKHSNIVRLHDSISEEGFHYLVFDLVTGGELFEDIVAREYYSEADASHCIQQILEAVLHCHQMGVVHRDLKPENLLLASKCKGAAVKLADFGLAIEVQGDQQAWFGFAGTPGYLSPEVLRKEAYGKPVDIWACGVILYILLVGYPPFWDEDQHKLYQQIKAGAYDFPSPEWDTVTPEAKNLINQMLTINPAKRITAHEALKHPWVCQRSTVASMMHRQETVECLKKFNARRKLKGAILTTMLATRNFSAAKSLLNKKADGVKPQTNSTKNSAAATSPKGTLPPAALEPQTTVIHNPVDGIKESSDSANTTIEDEDAKARKQEIIKTTEQLIEAVNNGDFEAYAKICDPGLTSFEPEALGNLVEGMDFHRFYFENLLAKNSKPIHTTILNPHVHVIGEDAACIAYIRLTQYIDGQGRPRTSQSEETRVWHRRDGKWQNVHFHCSGAPVAPLQ

SEQ ID NO: 247987 - DNA, 1557 bp, Artificial Sequence
  derived and/or modified sequence
atggcgacgaccgtcacatgcaccaggttcactgacgaataccagttgtatgaagacataggtaagggcgccttttctgtggttagaaggtgcgtgaaactttgtactggtcacgaatacgcagcaaaaataatcaatacgaaaaagttaagtgcccgtgaccatcagaagttagagcgagaggccagaatctgtcgacttctaaagcattccaatatagtacgcctgcatgattcaatctctgaggaaggatttcactacctggtgttcgatttagtcactggaggcgagctgttcgaggatatagtcgcgcgcgagtattacagtgaggccgacgcctcgcattgcattcagcagatccttgaggcagttctgcattgccatcagatgggtgttgtgcacagggatctgaaacccgagaatctcctgctggcctcaaaatgtaagggggctgccgtgaagttggccgactttggactcgctatcgaggtgcagggagatcaacaggcgtggtttggttttgcaggaacgcccgggtatctgtctccagaggtcctgcgcaaggaagcctacggcaaacctgtggatatatgggcctgcggagttatcctgtacattttgctagttgggtacccacctttctgggatgaggaccagcataagctgtatcaacagatcaaggcaggcgcatacgacttcccctcaccagagtgggacacagtcacaccagaagccaaaaacctcatcaaccagatgctcacaatcaaccccgccaagcgcataacagcgcacgaagcccttaagcacccctgggtttgccaaaggtcgacagttgcttcaatgatgcataggcaggagaccgtggaatgtctgaaaaaattcaatgcgcgccggaagttaaagggcgccatcctgactactatgctggctacccgtaactttagcgcggccaagtctctattgaacaagaaggcagacggggtgaaaccacagactaatagcactaagaatagcgcagccgcgacatctcccaaaggcactctgccacctgccgccctggagccgcagactacggtgatacacaatccagtggatggaatcaaggaaagctccgactccgcaaacacgactattgaggatgaagatgctaaagcaagaaagcaggagattattaagactactgaacaactgatagaggccgtcaataatggcgatttcgaagcatatgccaaaatctgcgatcccggactgacatcatttgagcctgaggccctgggaaatctcgtggaggggatggattttcatcgcttctatttcgaaaatctcttggcgaagaacagcaaacccatccatacaacaattttgaacccccacgttcacgtgataggagaagatgcggcctgcatcgcatacattagacttactcaatacatagacggacagggcagacccagaacctcacaatccgaggaaacacgtgtatggcaccggcgcgatggtaaatggcagaatgtgcatttccactgttctggagcaccagtggccccgttgcagtag

SEQ ID NO: 247988 - DNA, 1557 bp, Artificial Sequence
  derived and/or modified sequence
atggctactacagttacctgtacaaggtttacggatgaatatcagctatacgaggatattggtaagggcgcctttagtgttgtgcggaggtgtgtcaagctctgtacaggacacgagtatgccgccaaaatcatcaacaccaagaaactgtcagcccgtgaccaccaaaagctggagagggaggctcgaatctgtagattgctgaaacactcaaacattgtccgtctacacgattcaatctcagaggagggctttcactacctcgtttttgacttggtcaccggcggagagctttttgaagacattgtcgctcgggagtactacagtgaagccgacgccagccattgcattcagcagattctcgaggcagtacttcactgccatcagatgggcgttgtgcacagagacctgaaaccagagaatcttcttctggcgagtaaatgcaaaggggcagcggtgaagctggccgatttcggactggcaattgaggtgcagggcgaccagcaggcatggttcgggtttgctggaacccctggatatttatccccagaggttctgcgaaaggaggcctacggcaaacccgtagatatttgggcctgtggcgttatcctatatatattgctggttggctaccctccattttgggatgaggaccagcacaagttgtatcagcagatcaaagccggcgcctatgacttcccctctcccgaatgggatacagtcactccggaagccaagaatctgatcaaccagatgttaaccatcaatccggctaagcgaattaccgcacatgaagcgttgaagcacccttgggtttgccagcgtagcaccgtcgcatcaatgatgcaccggcaggagacagtggagtgcctgaagaagttcaatgcccgccggaaactgaaaggagccatactcaccaccatgctggcaaccagaaattttagtgcggccaaatccttactgaacaaaaaagcagatggcgtgaaaccgcagaccaatagcacaaagaatagcgcagccgcgacatcgcctaaaggcaccttgccacccgctgccctggaaccacagactacagtcatccacaaccccgtggacgggatcaaggagagcagcgattctgctaatacaaccatcgaggatgaagatgcaaaggcccgaaaacaggaaatcataaaaacaacagaacagctcattgaggccgtcaacaatggcgatttcgaagcatacgcaaagatctgcgatccagggctcacgtcttttgagccagaagctctcggcaacctggtggaaggaatggattttcaccggttttattttgaaaacctcctggcaaaaaattcaaagcctatccacaccaccatcctcaacccccatgtgcacgtcattggtgaagacgccgcctgtatcgcctatatccggctcactcagtacattgacggacaggggagaccaaggacatcccaaagcgaggaaacccgtgtctggcacagacgcgacgggaaatggcaaaacgttcactttcactgctctggcgcaccagtggctccactgcagtag

SEQ ID NO: 247989 - DNA, 1557 bp, Artificial Sequence
  derived and/or modified sequence
atggccaccaccgtgacctgcacccgcttcacagatgagtaccagctgtatgaggacatcggcaagggggccttctctgtggtgagaagatgtgtgaagctgtgcaccggccacgagtatgctgccaagatcatcaacaccaagaagctgagcgcccgggaccaccagaagctggagcgggaggcccgcatctgccgcctgctgaagcacagcaacatcgtgcggctgcatgacagcatcagcgaggagggcttccactacctggtgtttgacctggtgactggaggagagctgtttgaggacatcgtggcccgggagtactacagcgaggctgatgccagccactgcatccagcagatcctggaggccgtgctgcactgccaccagatgggcgtggtgcaccgggacctgaagccagagaacctgctgctggccagcaaatgtaaaggagctgctgtgaagctggccgactttggcctggccatcgaggtgcagggcgaccagcaggcctggtttggatttgctggcaccccaggctacctgagccctgaggtgctgaggaaggaggcctacggcaagcctgtggacatctgggcctgtggggtcatcctgtacatcctgctggtgggctacccacccttctgggatgaggaccagcacaagctgtaccagcagatcaaggccggggcctatgacttccccagccctgagtgggacacagtgaccccagaggccaagaacctgatcaaccagatgctgaccatcaacccagccaagaggatcacagcccacgaggccctgaagcacccctgggtgtgccagaggagcacagtggcctccatgatgcaccggcaggagaccgtggagtgcctgaagaagttcaatgcccggaggaagctgaagggggccatcctgaccaccatgctggccaccaggaacttctctgctgccaagagcctgctgaacaagaaggcagatggagtgaagccccagaccaacagcaccaagaacagcgctgctgccaccagccccaagggcaccctgcccccagctgccctggagccccagaccaccgtcatccacaaccctgtggatggcatcaaggagagcagtgacagcgccaacaccaccattgaagatgaagatgccaaggccaggaagcaggagatcatcaagaccacagagcagctgattgaggccgtgaacaatggagactttgaggcctatgccaagatctgtgaccccggcctgaccagctttgagcctgaggccctgggcaacctggtggagggcatggacttccaccgcttctactttgagaacctgctggccaagaacagcaagcccatccacaccaccatcctgaacccccacgtgcacgtgattggagaagatgctgcctgcatcgcctacatccggctgacccagtacattgatggccagggccggcccaggaccagccagagcgaggagaccagggtgtggcacagaagagatggcaagtggcagaatgtgcacttccactgcagcggggcccctgtggcccccctgcagtag

SEQ ID NO: 247990 - DNA, 1557 bp, Artificial Sequence
  derived and/or modified sequence
atggccaccaccgtgacctgcacccggttcaccgacgagtaccagctctatgaagacatcggaaagggggccttttctgtagtgcgtcggtgtgtgaagctgtgcacagggcatgagtacgcagccaagatcattaacaccaagaagctcagcgcccgcgaccaccagaaactggagagagaggcccgcatatgtcgcttgttaaagcactccaatatcgtgcgactccacgatagtatctcagaggagggattccactacctcgttttcgacttggtaactggtggagagctgttcgaggacatcgttgctcgggaatactatagcgaggcagatgcttcacactgtatccagcagatcttagaggccgtcttacactgccatcagatgggcgtcgtacatcgagatttgaagcctgaaaacttgctgctggccagtaagtgcaagggcgccgccgttaagttggcagactttggattagcgatagaagtgcaaggggatcaacaagcatggttcggattcgctggcacacctggatacctgtcccctgaagtgcttcgaaaagaagcatatggcaaaccggtggatatttgggcttgcggcgtgatcctatatatccttctggtgggatacccacctttctgggatgaggatcagcataagctgtaccagcaaattaaggcgggggcatacgacttcccatctccagaatgggacaccgtgactcccgaggccaagaatctgattaaccagatgctgactatcaacccagctaagaggatcactgcgcacgaagccctcaagcacccctgggtgtgccaacgtagcaccgtagccagcatgatgcatcgccaagagactgtggaatgcttaaagaagttcaacgctaggagaaagctgaagggcgccatcctgacgacaatgctcgccacaaggaatttttccgctgcaaaatcactcctcaataagaaagccgacggtgttaagccacagacaaacagcaccaagaatagcgcggcagccaccagtcccaagggtacactcccacctgcagccctcgaaccccaaaccacagtgattcataatcctgttgatggtattaaggagtcttcagacagcgccaatactacaatcgaggacgaagatgctaaggctaggaaacaagaaatcattaaaacgaccgagcaacttattgaagccgtcaataacggcgactttgaagcctatgccaagatttgtgatccagggctcacaagtttcgagccagaggccttagggaacctggtggaggggatggattttcataggttctacttcgaaaatctgcttgcaaagaacagtaaacccattcatactacaattcttaatcctcacgtccacgtgatcggggaagatgctgcttgtatagcctacattcgcctgacccaatacatcgacggccagggcagaccgcggactagtcagtcggaggagacaagggtatggcacagacgggacgggaagtggcaaaacgtgcatttccactgttctggcgctcccgtcgctcccctacagtag

SEQ ID NO: 247991 - DNA, 1557 bp, Artificial Sequence
  derived and/or modified sequence
atggccaccaccgtgacctgcacccggttcaccgacgagtaccagctttacgaggacattgggaaaggggcattctcagtggtccgcagatgcgtgaagctctgcaccggacacgaatacgccgctaagatcataaacacaaagaaactatccgcacgggaccatcagaagctcgaaagagaggctagaatctgccgtctcctgaagcactctaacattgttagactccatgacagtatcagtgaggagggattccattatctggtgtttgacctagtcacaggcggggaactattcgaggacattgttgccagagagtactatagcgaggcggatgctagtcactgtattcagcaaatacttgaagccgtgctccattgccatcagatgggagtcgtccacagggacctgaaaccggaaaacctccttctggccagcaagtgtaaaggggctgcagtcaaattagccgacttcggcctcgctatagaggtccagggggaccagcaggcctggttcggctttgcaggaactccgggttatttaagcccagaagttctgagaaaggaggcttacggcaagcctgtggatatatgggcatgcggggtgatcctctacatcctcttggttggatatccccctttctgggacgaggaccagcataaactttaccagcagattaaagcaggcgcatacgactttccctctcctgaatgggacaccgtgactcccgaggcaaaaaatctgattaaccagatgctcacgattaatcctgccaagcgtattactgcacatgaggctctgaagcatccgtgggtgtgccagagatcgactgtggcctcaatgatgcaccgtcaggagactgttgagtgtctgaagaaatttaacgcacgtcggaagttgaagggcgcaatactaaccactatgttggcaacccgtaacttcagcgcagcaaagtccctgctcaacaagaaggcggacggtgtaaaaccccagacgaattcaaccaagaattcagccgcagctacaagcccaaaaggaaccttaccaccggctgccctggaaccccagacgacggtaattcataaccccgtggacggcatcaaggaatctagtgactccgccaataccaccatcgaggatgaagacgcaaaagccaggaaacaggaaattattaagactacagagcagttgattgaggccgtgaataatggcgatttcgaggcatatgcgaaaatttgcgaccctggactgacgtcatttgagcctgaagctctcgggaatctcgtggagggaatggattttcaccgtttctacttcgagaacttgctcgcaaagaactcaaagcctatccacaccacaattttgaacccacacgtgcacgtgataggagaggatgcagcctgtattgcttacattcggctgacacaatacattgatggccagggccgtccacgaacctcccaaagtgaagaaaccagagtatggcaccggagggatggtaaatggcagaatgtacattttcactgttctggagcacccgtggccccacttcagtag

SEQ ID NO: 247992 - DNA, 1557 bp, Artificial Sequence
  derived and/or modified sequence
atggcaacgacagttacctgcactcgctttacggacgaataccagttatatgaggacatcggaaagggtgcattcagtgttgtccgaaggtgcgtgaaattatgcacagggcatgaatatgccgctaagattattaacaccaagaaactcagcgctcgcgatcaccagaagctcgagcgagaagcccgtatttgtaggcttcttaaacacagcaatatcgttaggctgcacgactccatttccgaggaagggtttcattacctcgtttttgacttggtgaccggaggcgagctgtttgaggatattgtggccagggaatactacagcgaggctgatgcgtcccactgcatccagcagatcctggaggcggtgttgcattgtcaccagatgggagtggttcacagggacctgaaacctgaaaatctccttctggcgtctaagtgtaagggcgctgccgttaaattggccgattttggtcttgccattgaagtgcaaggtgatcagcaggcctggtttggctttgccggaacccccggttacctgtcccctgaagtcctgcggaaagaggcctacggtaagccggtggacatttgggcttgtggagtcattctgtatattttacttgttggctacccacctttctgggatgaggaccaacataaactgtatcagcaaattaaagccggagcgtatgatttcccctcccctgagtgggatactgtgacccccgaagccaaaaacttaatcaaccagatgttgactatcaatcccgctaagcgaattacggctcatgaggccctgaagcatccatgggtgtgccagcgttcaacagtggctagtatgatgcatagacaagaaactgtggaatgcttaaagaagtttaatgctcgtcgcaaactgaagggcgcaatattgacaaccatgctggcaacacgtaacttcagcgctgctaaatccttactgaataaaaaagccgacggcgtgaaacctcagactaactctacaaaaaatagcgccgcagccacatccccaaagggcaccctgccacctgctgctctggaaccacagactacagtgatacacaatccagttgacggtataaaggaatctagcgattcagcaaatacaacaatcgaggatgaggacgcgaaggctaggaaacaggagatcataaaaaccacagagcaactaatcgaggctgtgaacaacggagacttcgaggcctatgccaagatctgtgatccaggacttacatcttttgagcctgaggccctgggaaacctagtagaagggatggattttcaccggttttacttcgagaacctccttgcaaaaaactcaaaaccaattcacacgaccatattgaatcctcacgtgcacgtgattggtgaggacgcggcttgcatcgcctacattcggctcacccagtatatcgatggacaggggaggcctcggaccagtcagtccgaggagactcgcgtctggcatcgtcgggacggtaaatggcaaaatgtacattttcactgtagcggagccccagttgccccattgcagtag

SEQ ID NO: 247993 - DNA, 1557 bp, Artificial Sequence
  derived and/or modified sequence
atggctactaccgtaacgtgcacccggttcaccgatgagtatcaactttatgaggatattgggaagggtgccttttcagttgtccgaagatgcgtaaaactatgtaccgggcacgagtacgccgctaagatcattaatacaaagaagttgtcagcgagggatcatcagaagcttgagagagaagcgaggatttgtcgactcctaaagcatagcaacatcgtccgcctgcatgacagtatttcagaggaaggtttccactatctagtgttcgatctagtaactgggggagaactcttcgaagatattgtcgctcgcgaatactacagcgaagccgacgccagccattgcattcagcagattttggaggctgtccttcactgccatcagatgggggtcgtgcacagagatcttaagcctgaaaacctccttctcgcatcaaagtgcaagggtgccgctgttaagctggcagacttcggactagctatcgaggtgcagggtgaccagcaggcttggtttggttttgctggcacccccggatacttatcccctgaagtgctgaggaaagaggcatacggaaagccagtggatatttgggcatgcggagttatcctatacattctgttggtcggctatccaccattctgggatgaggatcagcataaactctatcagcaaatcaaagcaggagcctacgatttcccaagcccagagtgggacactgtcacacctgaagctaagaatctcattaatcaaatgctgaccataaatccagccaagaggatcaccgcccacgaggctctgaaacatccttgggtgtgtcagcggtcaactgtcgcgtccatgatgcaccggcaggaaacagtggagtgtttaaagaagttcaatgccaggcgcaagttgaaaggcgctatcttaacaaccatgctcgctacaagaaattttagcgccgcaaagagcctcctcaacaagaaagccgatggggtgaaaccacagacgaacagtactaaaaactctgctgccgctactagtcctaagggaacgcttccacctgccgctttggaacctcagactaccgtgatacataacccagtggatgggattaaagagagctcagactccgctaataccacgatcgaggatgaggacgcaaaagctagaaaacaagagattataaaaacaactgagcaacttatagaggcagtgaacaatggagatttcgaggcttatgctaagatttgcgatcccggtctgacatcctttgaacctgaagcattagggaacctggtagaggggatggattttcacagattttactttgagaatcttttggcaaaaaactccaagccaattcacaccaccatacttaatccccacgtgcacgtgattggagaggacgcagcctgtatagcttatatcagattaacccagtatatcgacggccaagggaggcctcgtacatctcaaagtgaggaaactagggtctggcataggagggacggaaaatggcagaacgtgcacttccactgctcaggcgctccggtggctcctttacagtag

SEQ ID NO: 247994 - DNA, 1557 bp, Artificial Sequence
  derived and/or modified sequence
atggccaccacggtgacctgcacccgcttcaccgacgagtaccagctctacgaggatattggcaagggggctttctctgtggtccgacgctgtgtcaagctctgcaccggccatgagtatgcagccaagatcatcaacaccaagaagctgtcagccagagatcaccagaagctggagagagaggctcggatctgccgccttctgaagcattccaacatcgtgcgtctccacgacagcatctccgaggagggcttccactacctggtcttcgatctggtcactggtggggagctctttgaagacattgtggcgagagagtactacagcgaggctgatgccagtcactgtatccagcagatcctggaggccgttctccattgtcaccaaatgggggtcgtccacagagacctcaagccggagaacctgcttctggccagcaagtgcaaaggggctgcagtgaagctggcagacttcggcctagctatcgaggtgcagggggaccagcaggcatggtttggtttcgctggcacaccaggctacctgtcccctgaggtccttcgcaaagaggcgtatggcaagcctgtggacatctgggcatgtggggtgatcctgtacatcctgctcgtgggctacccacccttctgggacgaggaccagcacaagctgtaccagcagatcaaggctggtgcctatgacttcccgtcccctgagtgggacaccgtcactcctgaagccaaaaacctcatcaaccagatgctgaccatcaaccctgccaagcgcatcacagcccatgaggccctgaagcacccgtgggtctgccaacgctccacggtagcatccatgatgcacagacaggagactgtggagtgtctgaaaaagttcaatgccaggagaaagctcaagggagccatcctcaccaccatgctggccacacggaatttctcagcagccaagagtttactcaacaagaaagcagatggagtcaagccccagacgaatagcaccaaaaacagtgcagccgccaccagccccaaagggacgcttcctcctgccgccctggagcctcaaaccaccgtcatccataacccagtggacgggattaaggagtcttctgacagtgccaataccaccatagaggatgaagacgctaaagcccggaagcaggagatcattaagaccacggagcagctcatcgaggccgtcaacaacggtgactttgaggcctacgcgaaaatctgtgacccagggctgacctcgtttgagcctgaagcactgggcaacctggttgaagggatggacttccacagattctacttcgagaacctgctggccaagaacagcaagccgatccacacgaccatcctgaacccacacgtgcacgtcattggagaggatgccgcctgcatcgcttacatccggctcacgcagtacattgacgggcagggccggccccgcaccagccagtctgaggagacccgcgtgtggcaccgccgcgacggcaagtggcagaacgtgcacttccactgctcgggcgcgcctgtggccccgctgcagtga

SEQ ID NO: 247995 - DNA, 4142 bp, Artificial Sequence
  derived and/or modified sequence
aggtgtgcggcgcgctcctggcgaggacggagcgagcagatctcgcgtgcgctcgccgcccggcgcagcccagcccggcccccgcctggcgccgcgagccgaggtgtctcccgcgcccgcgcccgtgtcgccgccgtgcccgcgagcgggagccggagtcgccgccgcccgagcgcagccgagcgcacgccgagcccgtccgccgccgccatggccaccacggtgacctgcacccgcttcaccgacgagtaccagctctacgaggatattggcaagggggctttctctgtggtccgacgctgtgtcaagctctgcaccggccatgagtatgcagccaagatcatcaacaccaagaagctgtcagccagagatcaccagaagctggagagagaggctcggatctgccgccttctgaagcattccaacatcgtgcgtctccacgacagcatctccgaggagggcttccactacctggtcttcgatctggtcactggtggggagctctttgaagacattgtggcgagagagtactacagcgaggctgatgccagtcactgtatccagcagatcctggaggccgttctccattgtcaccaaatgggggtcgtccacagagacctcaagccggagaacctgcttctggccagcaagtgcaaaggggctgcagtgaagctggcagacttcggcctagctatcgaggtgcagggggaccagcaggcatggtttggtttcgctggcacaccaggctacctgtcccctgaggtccttcgcaaagaggcgtatggcaagcctgtggacatctgggcatgtggggtgatcctgtacatcctgctcgtgggctacccacccttctgggacgaggaccagcacaagctgtaccagcagatcaaggctggtgcctatgacttcccgtcccctgagtgggacaccgtcactcctgaagccaaaaacctcatcaaccagatgctgaccatcaaccctgccaagcgcatcacagcccatgaggccctgaagcacccgtgggtctgccaacgctccacggtagcatccatgatgcacagacaggagactgtggagtgtctgaaaaagttcaatgccaggagaaagctcaagggagccatcctcaccaccatgctggccacacggaatttctcagcagccaagagtttactcaacaagaaagcagatggagtcaagccccagacgaatagcaccaaaaacagtgcagccgccaccagccccaaagggacgcttcctcctgccgccctggagcctcaaaccaccgtcatccataacccagtggacgggattaaggagtcttctgacagtgccaataccaccatagaggatgaagacgctaaagcccggaagcaggagatcattaagaccacggagcagctcatcgaggccgtcaacaacggtgactttgaggcctacgcgaaaatctgtgacccagggctgacctcgtttgagcctgaagcactgggcaacctggttgaagggatggacttccacagattctacttcgagaacctgctggccaagaacagcaagccgatccacacgaccatcctgaacccacacgtgcacgtcattggagaggatgccgcctgcatcgcttacatccggctcacgcagtacattgacgggcagggccggccccgcaccagccagtctgaggagacccgcgtgtggcaccgccgcgacggcaagtggcagaacgtgcacttccactgctcgggcgcgcctgtggccccgctgcagtgaagagctgcgccctggtttcgccggacagagttggtgtttggagcccgactgccctcgggcacacggcctgcctgtcgcatgtttgtgtctgcctcgttccctcccctggtgcctgtgtctgcagaaaaacaagaccagatgtgatttgttaaaaaaaaacaaaaaaaaaaaaaaaaaaaacaagatgacgacgacaaccacaaaaaaaattgacatcagatgaaatgaaaaaaaaaaaaaacaaaaaaaactaaaggaaggaaaaagctgtaaaaatcactggcattcgtggggccactccccacccaagctccacgtgtgtccgtctgtgctcctggcctctgggggaccagctgggacatgaacttgtctgccaggcccccgtcgcgtgctgaacggtgttagtttgtaggtaacgcacacaccccacacctaaggtgtctgcatcctcctgccaacgcatgggctccacgtggtgtgctcgctggctgtcgtgactgtcagctgtctcttgggaggggctgtgggggcccgctgggctgcctcctttcccgctagttgtgcctgagagttgctgttgttcctgctttcccttcccttcctttcatcccctgaagggctaggtgtgggttttccgtgcccggtatccccacacacccagcacggacaacccttcggcagagcccaggccggcccctcaccccctggagtattgaaactggagtcccgtccccaaggccttcagagatgcccctacacacccagggctccagctctggtccttctgggggagtaaagtgcaaagaggggcacagcttagttttgggcctctcgccgagcaagagacagcactgctggctacagctccaacacagccagctgtggcaagaggactctgcctgggctggcccccctcctgtgtgaggtgtctgtcccttctctgctggccagcagcagatgcactggcagctcccaaccctgtttccgcccctcggccctcccccagcctgttcggcttctctgcagcccgcaagggggagcagacttttgacaaaggactgcgggcctcgctcaagtccctgagcccccagctgaagctgggaggggaggccaggctttgtgtctgggcatattcgtctgctgatggggtttggggaagcctggggcttggggtttggtcgggtggtgcagctagtggcagagcgggatcagaggtggtggctgcccagcttctgggctgagacaagggtctgtgcaggggtttactgaagtgggagtgcctttggaatctgggccgggagcagaagggagcaaaagctacagtgggagccagcctagggcacatgggaggcgtgagggcagtgctgcccgtgcagtgtcaggtgtgccagtgccttggcgggctgcagtgcgtgtgagggcaccttctaggtgggccagggatgcagctatggagataaggcgggctggggacagaaacaggtgggcacagggcccaggacaccagcggatggagggcagggtctagccctgtgctcctgagcgtcggctgcctgggttcgaggcggtgggtccccggccccttgtgatggtgtgtaccatgggggagctcggggacagggcaagcccgagcatggtggggctgcagggtgggtctgaagccaggttgggtgggggtggtcacaagccctgactgcagagggtcaggggctcctgccccagtgcctgcccactttcaattcacattgttttcaacaaggattttctttatcttcccctacaaatcaagccaagggaggggcacagaatggggaacaggacacaggatcctaaactccaaggggactgtccaccgatgaacactcagagtggacaccatcttccgtccacgctgtgcccaggacagctgtccccatccatgaacacagggtaaacatctgccgggctccgcaccagtggctccctgggccatgggacagcggcagggctcaccacggacagcacgtggcccagcagccggccaccctggcgtcctggggcctcctcccctcctctccctctcaccttgtcacctccacggagctgcctgtctgggataatttggggattttttttctgggggataattcttttgcatgacccctaaagagcaagccacaccggtctgctagctaggtgtccgcggtgtggtggtggcggccgctggccagcgctgcaaggggtcggctgcccacggtgctggctggcctcccctcctctctctttttgctgagtttcattgtcttttctttctgagccttgtaagtgtacaaaaattattcttattttgttctgtctcgggaaactgcaaataaaagaaaaacaggacaaactgc

SEQ ID NO: 247996 - DNA, 1557 bp, Artificial Sequence
  derived and/or modified sequence
atggccaccaccgtgacctgcaccagattcaccgacgagtaccagctgtacgaggacatcggcaagggcgccttcagcgtggtgagaagatgcgtgaagctgtgcaccggccacgagtacgccgccaagatcatcaacaccaagaagctgagcgccagagaccaccagaagctggagagagaggccagaatctgcagactgctgaagcacagcaacatcgtgagactgcacgacagcatcagcgaggagggcttccactacctggtgttcgacctggtgaccggcggcgagctgttcgaggacatcgtggccagagagtactacagcgaggccgacgccagccactgcatccagcagatcctggaggccgtgctgcactgccaccagatgggcgtggtgcacagagacctgaagcccgagaacctgctgctggccagcaagtgcaagggcgccgccgtgaagctggccgacttcggcctggccatcgaggtgcagggcgaccagcaggcctggttcggcttcgccggcacccccggctacctgagccccgaggtgctgagaaaggaggcctacggcaagcccgtggacatctgggcctgcggcgtgatcctgtacatcctgctggtgggctacccccccttctgggacgaggaccagcacaagctgtaccagcagatcaaggccggcgcctacgacttccccagccccgagtgggacaccgtgacccccgaggccaagaacctgatcaaccagatgctgaccatcaaccccgccaagagaatcaccgcccacgaggccctgaagcacccctgggtgtgccagagaagcaccgtggccagcatgatgcacagacaggagaccgtggagtgcctgaagaagttcaacgccagaagaaagctgaagggcgccatcctgaccaccatgctggccaccagaaacttcagcgccgccaagagcctgctgaacaagaaggccgacggcgtgaagccccagaccaacagcaccaagaacagcgccgccgccaccagccccaagggcaccctgccccccgccgccctggagccccagaccaccgtgatccacaaccccgtggacggcatcaaggagagcagcgacagcgccaacaccaccatcgaggacgaggacgccaaggccagaaagcaggagatcatcaagaccaccgagcagctgatcgaggccgtgaacaacggcgacttcgaggcctacgccaagatctgcgaccccggcctgaccagcttcgagcccgaggccctgggcaacctggtggagggcatggacttccacagattctacttcgagaacctgctggccaagaacagcaagcccatccacaccaccatcctgaacccccacgtgcacgtgatcggcgaggacgccgcctgcatcgcctacatcagactgacccagtacatcgacggccagggcagacccagaaccagccagagcgaggagaccagagtgtggcacagaagagacggcaagtggcagaacgtgcacttccactgcagcggcgcccccgtggcccccctgcagtag

SEQ ID NO: 247997 - protein, 517 aa, Artificial Sequence
  derived and/or modified sequence
MATTVTCTRFTDEYQLYEDIGKGAFSVVRRCVKLCTGHEYAAKIINTKKLSARDHQKLEREARICRLLKHSNIVRLHDSISEEGFHYLVFDLVTGGELFEDIVAREYYSEADASHCIQQILEAVLHCHQMGVVHRDLKPENLLLASKCKGAAVKLADFGLAIEVQGDQQAWFGFAGTPGYLSPEVLRKEAYGKPVDIWACGVILYILLVGYPPFWDEDQHKLYQQIKAGAYDFPSPEWDTVTPEAKNLINQMLTINPAKRITAHEALKHPWVCQRSTVASMMHRQETVECLKKFNARRKLKGAILTTMLATRNFSAKSLLNKKADGVKPQTNSTKNSAAATSPKGTLPPAALEPQTTVIHNPVDGIKESSDSANTTIEDEDAKARKQEIIKTTEQLIEAVNNGDFEAYAKICDPGLTSFEPEALGNLVEGMDFHRFYFENLLAKNSKPIHTTILNPHVHVIGEDAACIAYIRLTQYIDGQGRPRTSQSEETRVWHRRDGKWQNVHFHCSGAPVAPLQ

SEQ ID NO: 247998 - DNA, 1554 bp, Artificial Sequence
  derived and/or modified sequence
atggccacgaccgttacatgcacccgatttaccgacgaataccagctctatgaggatattgggaagggcgcgtttagtgttgtacgcaggtgtgtaaagctctgcacgggccacgaatacgcggcaaagatcataaataccaagaagttgtcggcacgagaccatcagaaattggagcgtgaagcaaggatctgtagactgctgaaacactctaatatcgttcgcctccacgactcaataagcgaggagggctttcactacctggtgttcgatctcgtgacagggggcgagctctttgaggatatcgtggccagggagtactacagtgaggctgacgcgtcccattgcatccaacaaatactggaagcagtgttacactgccaccagatgggagtggtacacagagatctaaagcccgagaatctcctgctcgcatctaagtgtaagggcgccgctgtcaagctcgctgacttcggtctggccatcgaagtccagggagatcagcaagcatggtttggcttcgccggtacccctggctatctttctcctgaggtcctcagaaaagaggcgtacggtaagcctgtggacatctgggcctgtggagtgattctgtacattctgttggtcggatacccaccgttctgggacgaagaccagcacaagctgtatcaacagattaaggctggagcctatgatttcccttctcccgagtgggatacagtgactccggaggctaaaaatctgatcaatcagatgctcacaatcaatcctgcaaaaaggattaccgctcacgaggcactgaaacacccgtgggtgtgtcagaggagcacggtcgcctcgatgatgcatagacaggagaccgtggagtgtctgaagaaatttaacgcaaggcggaagttaaagggcgcaatcctgactaccatgttagctacccgcaatttcagcgcgaaaagcttgcttaacaaaaaggctgacggtgttaaacctcagacaaatagcacaaaaaattccgccgcagcgacctctcccaagggaacgctgcctcccgcagctctagagccacagacgaccgtgatacataacccggtggacggcatcaaagagtcttccgatagtgccaacacgaccatcgaagatgaggacgccaaggcacgaaaacaggagataattaagactaccgagcagctcattgaggcagtgaataatggcgattttgaggcctatgcaaagatctgcgatccaggcctcacaagttttgaaccagaggctctgggcaatctcgtggagggaatggacttccaccgtttttactttgagaacttgctggccaagaactccaaaccgatccataccaccatcctcaatccacacgtacacgtcatcggcgaggatgcagcctgcattgcctatatccgtctcacacagtacattgacggccagggcagaccacggacgtcccagtcggaggagactagagtgtggcaccggagagatgggaagtggcagaacgtccatttccattgttccggcgccccggtggcccctcttcagtag

SEQ ID NO: 247999 - DNA, 1554 bp, Artificial Sequence
  derived and/or modified sequence
atggccaccaccgtgacctgcacccgcttcacagatgagtaccagctgtatgaggacatcggcaagggggccttctctgtggtgagaagatgtgtgaagctgtgcaccggccacgagtatgctgccaagatcatcaacaccaagaagctgagcgcccgggaccaccagaagctggagcgggaggcccgcatctgccgcctgctgaagcacagcaacatcgtgcggctgcatgacagcatcagcgaggagggcttccactacctggtgtttgacctggtgactggaggagagctgtttgaggacatcgtggcccgggagtactacagcgaggctgatgccagccactgcatccagcagatcctggaggccgtgctgcactgccaccagatgggcgtggtgcaccgggacctgaagccagagaacctgctgctggccagcaaatgtaaaggagctgctgtgaagctggccgactttggcctggccatcgaggtgcagggcgaccagcaggcctggtttggatttgctggcaccccaggctacctgagccctgaggtgctgaggaaggaggcctacggcaagcctgtggacatctgggcctgtggggtcatcctgtacatcctgctggtgggctacccacccttctgggatgaggaccagcacaagctgtaccagcagatcaaggccggggcctatgacttccccagccctgagtgggacacagtgaccccagaggccaagaacctgatcaaccagatgctgaccatcaacccagccaagaggatcacagcccacgaggccctgaagcacccctgggtgtgccagaggagcacagtggcctccatgatgcaccggcaggagaccgtggagtgcctgaagaagttcaatgcccggaggaagctgaagggggccatcctgaccaccatgctggccaccaggaacttcagcgccaagagcctgctgaacaagaaggcagatggagtgaagccccagaccaacagcaccaagaacagcgctgctgccaccagccccaagggcaccctgcccccagctgccctggagccccagaccaccgtcatccacaaccctgtggatggcatcaaggagagcagtgacagcgccaacaccaccattgaagatgaagatgccaaggccaggaagcaggagatcatcaagaccacagagcagctgattgaagctgtgaacaacggggactttgaggcctatgccaagatctgtgaccccggcctgaccagctttgagcctgaggccctgggcaacctggtggagggcatggacttccaccgcttctactttgagaacctgctggccaagaacagcaagcccatccacaccaccatcctgaacccccacgtgcacgtgattggagaagatgctgcctgcatcgcctacatccggctgacccagtacattgatggccagggccggcccaggaccagccagagcgaggagaccagggtgtggcacagaagagatggcaagtggcagaatgtgcacttccactgcagcggggcccctgtggcccccctgcagtag

SEQ ID NO: 248000 - DNA, 1554 bp, Artificial Sequence
  derived and/or modified sequence
atggccaccaccgtgacctgcacccggttcaccgacgagtaccagctctacgaagatatcggtaaaggggccttcagtgtcgtcaggcggtgtgtcaaactgtgtactggccacgaatacgcggcaaagatcataaataccaagaaactttccgccagagatcaccagaagttggagcgagaagcgcgtatttgtcggctcctcaaacatagtaacatcgttaggttgcacgactcaatttccgaggaagggtttcactacctcgtgttcgatctggtgacaggtggcgaacttttcgaggacattgtggctcgtgaatattacagtgaagcggatgctagccactgcatccagcagattctggaagctgtgctgcattgtcatcagatgggcgtagttcatcgggatttgaaaccggagaacttactgttggcttctaagtgtaagggagctgctgtaaaactggccgatttcggcctggccatcgaggtccagggagatcaacaggcatggtttggcttcgccgggacacccgggtacctgagccccgaggtgctgagaaaggaggcctacggcaaacctgtggacatttgggcctgtggggttattctgtatatcctgctggtggggtacccacccttctgggatgaggatcaacataagctctaccagcagatcaaagccggggcatatgattttcccagccctgagtgggacacagtgactcctgaagcgaaaaacctcatcaatcagatgctgacaatcaaccccgccaagcgcattaccgcccatgaggccctcaagcacccttgggtgtgtcagaggagcaccgtggcttctatgatgcaccgccaagaaactgtggaatgcctaaaaaaattcaatgcccggcgcaagttaaagggagcaattctcacaaccatgcttgccacgagaaatttctctgccaagagtcttctgaataaaaaggcagatggcgttaagcctcagacaaattctacaaagaacagcgccgctgccacaagtcctaagggtacacttccccctgccgctctggaacctcagacgaccgtaatccataatcctgtcgatggaattaaggagtcttccgacagtgcgaatacaacaatagaggacgaggacgccaaagcacggaagcaagagattattaaaactacagaacagctaatcgaggccgtgaataatggcgatttcgaagcatatgcaaagatttgcgatcccggcttaacttccttcgagccagaggcactaggcaacctggtggaagggatggactttcatcgattttatttcgaaaacctgctggcgaagaactccaaacctatccacactactatattgaacccccacgtgcacgtaatcggtgaagacgccgcatgcattgcctatatccggctgactcagtatatagacggtcagggcagacctcgtaccagtcagtcagaggaaacaagagtgtggcacagaagagatggcaaatggcaaaatgtgcactttcactgttcaggggccccagtggcgcctttacagtag

SEQ ID NO: 248001 - DNA, 1554 bp, Artificial Sequence
  derived and/or modified sequence
atggccacaaccgtgacatgcacgcgattcaccgacgagtatcagctgtacgaagacattggaaaaggggcttttagtgtggtccgcagatgcgtgaagctttgtaccgggcacgagtacgctgccaagattatcaacaccaaaaagctgagtgctcgggatcatcaaaagctagagcgcgaagccagaatttgtcgtttactgaaacacagcaatatcgtgcggttgcacgactccatttctgaagaaggttttcactacttagtgtttgacctggttactgggggagaactgtttgaggacatcgttgccagggagtattactcggaagcagatgcctcacactgcatacagcagattcttgaagctgtcttgcactgccatcagatgggggttgttcatcgggatctgaaacccgaaaacttgctgttggccagtaagtgcaaaggtgccgcagtgaagctagcagattttggactagccattgaggtgcagggcgatcagcaggcttggttcggattcgccggtactcccggatacctgtcccctgaggtcctgcgtaaggaagcatacgggaaaccagttgacatttgggcctgcggagttatcctctatatactgctggtgggatacccccctttttgggatgaagatcagcacaagctgtatcagcagatcaaagccggagcttacgactttccgtcacctgagtgggataccgtgactcctgaggctaagaatctgataaaccagatgctgacaatcaatcccgcaaaaagaataaccgcccatgaagccctcaagcacccttgggtttgtcagagaagcactgtggcatccatgatgcataggcaggaaaccgtagagtgcttgaaaaaattcaacgcaaggagaaagttgaaaggcgctatcttgacaacgatgctggccactcggaacttctccgctaaaagcctgctcaacaagaaggctgacggtgtgaaacctcagactaattccacaaagaactcagcagcagcaacaagccccaaagggactctgccccctgccgctctggaaccacagaccactgtgatccacaacccagtagatggcattaaagagagtagtgactctgcaaacacaacgatagaagatgaagacgcaaaggccagaaagcaggagattatcaagacgacagaacagctgattgaagccgtgaataacggggactttgaggcctacgccaagatatgcgaccccggactgacatccttcgaacccgaggcccttgggaatctggtggagggaatggactttcacaggttctacttcgaaaacctcctagccaaaaattcaaagcctatccatactaccatcttgaatccacacgtacacgttatcggagaggatgctgcatgcatcgcttatatccgattaactcagtacatcgatgggcagggaaggcctcgcacaagccagtctgaagagaccagggtgtggcaccggagagatgggaaatggcagaatgtccacttccactgctccggcgcaccagtcgctccgctccagtag

SEQ ID NO: 248002 - DNA, 1652 bp, Artificial Sequence
  derived and/or modified sequence
gccatggccaccacggtgacctgcacccgcttcaccgacgagtaccagctctacgaggatattggcaagggggctttctctgtggtccgacgctgtgtcaagctctgcaccggccatgagtatgcagccaagatcatcaacaccaagaagctgtcagccagagatcaccagaagctggagagagaggctcggatctgccgccttctgaagcattccaacatcgtgcgtctccacgacagcatctccgaggagggcttccactacctggtcttcgatctggtcactggtggggagctctttgaagacattgtggcgagagagtactacagcgaggctgatgccagtcactgtatccagcagatcctggaggccgttctccattgtcaccaaatgggggtcgtccacagagacctcaagccggagaacctgcttctggccagcaagtgcaaaggggctgcagtgaagctggcagacttcggcctagctatcgaggtgcagggggaccagcaggcatggtttggtttcgctggcacaccaggctacctgtcccctgaggtccttcgcaaagaggcgtatggcaagcctgtggacatctgggcatgtggggtgatcctgtacatcctgctcgtgggctacccacccttctgggacgaggaccagcacaagctgtaccagcagatcaaggctggtgcctatgacttcccgtcccctgagtgggacaccgtcactcctgaagccaaaaacctcatcaaccagatgctgaccatcaaccctgccaagcgcatcacagcccatgaggccctgaagcacccgtgggtctgccaacgctccacggtagcatccatgatgcacagacaggagactgtggagtgtctgaaaaagttcaatgccaggagaaagctcaagggagccatcctcaccaccatgctggccacacggaatttctcagccaagagtttactcaacaagaaagcagatggagtcaagccccagacgaatagcaccaaaaacagtgcagccgccaccagccccaaagggacgcttcctcctgccgccctggagcctcaaaccaccgtcatccataacccagtggacgggattaaggagtcttctgacagtgccaataccaccatagaggatgaagacgctaaagcccggaagcaggagatcattaagaccacggagcagctcatcgaggccgtcaacaacggtgactttgaggcctacgcgaaaatctgtgacccagggctgacctcgtttgagcctgaagcactgggcaacctggttgaagggatggacttccacagattctacttcgagaacctgctggccaagaacagcaagccgatccacacgaccatcctgaacccacacgtgcacgtcattggagaggatgccgcctgcatcgcttacatccggctcacgcagtacattgacgggcagggccggccccgcaccagccagtctgaggagacccgcgtgtggcaccgccgcgacggcaagtggcagaacgtgcacttccactgctcgggcgcgcctgtggccccgctgcagtgaagagctgcgccctggtttcgccggacagagttggtgtttggagcccgactgccctcgggcacacggcctgcctgtcgcatgtttgtgtctgcctc

SEQ ID NO: 248003 - DNA, 1554 bp, Artificial Sequence
  derived and/or modified sequence
atggccaccaccgtgacctgcaccagattcaccgacgagtaccagctgtacgaggacatcggcaagggcgccttcagcgtggtgagaagatgcgtgaagctgtgcaccggccacgagtacgccgccaagatcatcaacaccaagaagctgagcgccagagaccaccagaagctggagagagaggccagaatctgcagactgctgaagcacagcaacatcgtgagactgcacgacagcatcagcgaggagggcttccactacctggtgttcgacctggtgaccggcggcgagctgttcgaggacatcgtggccagagagtactacagcgaggccgacgccagccactgcatccagcagatcctggaggccgtgctgcactgccaccagatgggcgtggtgcacagagacctgaagcccgagaacctgctgctggccagcaagtgcaagggcgccgccgtgaagctggccgacttcggcctggccatcgaggtgcagggcgaccagcaggcctggttcggcttcgccggcacccccggctacctgagccccgaggtgctgagaaaggaggcctacggcaagcccgtggacatctgggcctgcggcgtgatcctgtacatcctgctggtgggctacccccccttctgggacgaggaccagcacaagctgtaccagcagatcaaggccggcgcctacgacttccccagccccgagtgggacaccgtgacccccgaggccaagaacctgatcaaccagatgctgaccatcaaccccgccaagagaatcaccgcccacgaggccctgaagcacccctgggtgtgccagagaagcaccgtggccagcatgatgcacagacaggagaccgtggagtgcctgaagaagttcaacgccagaagaaagctgaagggcgccatcctgaccaccatgctggccaccagaaacttcagcgccaagagcctgctgaacaagaaggccgacggcgtgaagccccagaccaacagcaccaagaacagcgccgccgccaccagccccaagggcaccctgccccccgccgccctggagccccagaccaccgtgatccacaaccccgtggacggcatcaaggagagcagcgacagcgccaacaccaccatcgaggacgaggacgccaaggccagaaagcaggagatcatcaagaccaccgagcagctgatcgaggccgtgaacaacggcgacttcgaggcctacgccaagatctgcgaccccggcctgaccagcttcgagcccgaggccctgggcaacctggtggagggcatggacttccacagattctacttcgagaacctgctggccaagaacagcaagcccatccacaccaccatcctgaacccccacgtgcacgtgatcggcgaggacgccgcctgcatcgcctacatcagactgacccagtacatcgacggccagggcagacccagaaccagccagagcgaggagaccagagtgtggcacagaagagacggcaagtggcagaacgtgcacttccactgcagcggcgcccccgtggcccccctgcagtag

SEQ ID NO: 248004 - protein, 503 aa, Artificial Sequence
  derived and/or modified sequence
MATTVTCTRFTDEYQLYEDIGKGAFSVVRRCVKLCTGHEYAAKIINTKKLSARDHQKLEREARICRLLKHSNIVRLHDSISEEGFHYLVFDLVTGGELFEDIVAREYYSEADASHCIQQILEAVLHCHQMGVVHRDLKPENLLLASKCKGAAVKLADFGLAIEVQGDQQAWFGFAGTPGYLSPEVLRKEAYGKPVDIWACGVILYILLVGYPPFWDEDQHKLYQQIKAGAYDFPSPEWDTVTPEAKNLINQMLTINPAKRITAHEALKHPWVCQRSTVASMMHRQETVECLKKFNARRKLKGAILTTMLATRNFSAAKSLLNKKADGVKPQTNSTKNSAAATSPKGTLPPAALESSDSANTTIEDEDAKARKQEIIKTTEQLIEAVNNGDFEAYAKICDPGLTSFEPEALGNLVEGMDFHRFYFENLLAKNSKPIHTTILNPHVHVIGEDAACIAYIRLTQYIDGQGRPRTSQSEETRVWHRRDGKWQNVHFHCSGAPVAPLQ

SEQ ID NO: 248005 - DNA, 1512 bp, Artificial Sequence
  derived and/or modified sequence
atggccacaactgtcacttgtactcgattcactgatgaatatcaactgtatgaagacattggcaaaggtgctttctccgtggtgcgaagatgcgtgaaattgtgcactggacacgaatatgctgctaaaattattaacacaaaaaagctcagcgcccgagatcaccagaaactggagagagaagcacgcatctgccggttgctgaagcattctaacatagtgaggctgcacgacagcatctccgaagaagggttccactatttggtattcgacttggtcaccggaggagagctgtttgaagatatcgtcgctagggagtactactctgaagcagacgcatcccattgtatccagcaaattttagaggccgtgctgcattgccaccaaatgggagtcgtgcacagagacctgaagccagagaacctgctgctggcttctaaatgtaaaggggctgccgtgaagctagcagacttcgggttggccattgaggttcagggcgaccaacaggcttggttcggctttgctggaacccccggatatctatcccccgaagttctgcggaaggaggcatatggcaaaccagtagatatctgggcttgtggggtaatactgtatatcctgctggtaggctaccccccattctgggacgaggaccagcacaaactctaccaacaaataaaggccggtgcgtatgatttcccaagccctgaatgggatactgtgacccctgaggcgaagaatcttataaatcagatgttgactatcaaccctgctaaaagaataaccgcccacgaggccctcaaacatccctgggtctgtcagaggtcaacagtggcttctatgatgcaccggcaggagaccgttgaatgcctgaaaaagtttaacgccagaagaaaacttaaaggtgcaatactcactacaatgctggccactcggaatttctctgctgcgaaatctttacttaataaaaaggcggatggagtcaaaccacagacaaattctactaaaaatagcgccgcggcgacctcacccaaaggcaccttgccacctgcggcacttgagagtagcgactcagccaatacaactatagaggacgaagacgctaaagcacgaaaacaggagattattaagactacagagcagctgatcgaagccgtgaacaacggcgactttgaggcttatgccaagatctgcgatccgggtctgacctcatttgagcctgaggcgcttggtaacctcgtggaagggatggatttccatagattctacttcgagaaccttctggccaagaattctaaacccattcatactactattctcaaccctcacgtacacgtgataggagaggatgccgcctgtatcgcttacattcgactaacacagtacatcgacgggcaggggcgcccaaggaccagccagagcgaagagacccgcgtatggcaccgccgcgatgggaagtggcagaatgtgcacttccattgttctggcgctcctgtagcaccgctccagtag

SEQ ID NO: 248006 - DNA, 1512 bp, Artificial Sequence
  derived and/or modified sequence
atggccaccaccgtgacctgcacccgcttcacagatgagtaccagctgtatgaggacatcggcaagggggccttctctgtggtgagaagatgtgtgaagctgtgcaccggccacgagtatgctgccaagatcatcaacaccaagaagctgagcgcccgggaccaccagaagctggagcgggaggcccgcatctgccgcctgctgaagcacagcaacatcgtgcggctgcatgacagcatcagcgaggagggcttccactacctggtgtttgacctggtgactggaggagagctgtttgaggacatcgtggcccgggagtactacagcgaggctgatgccagccactgcatccagcagatcctggaggccgtgctgcactgccaccagatgggcgtggtgcaccgggacctgaagccagagaacctgctgctggccagcaaatgtaaaggagctgctgtgaagctggccgactttggcctggccatcgaggtgcagggcgaccagcaggcctggtttggatttgctggcaccccaggctacctgagccctgaggtgctgaggaaggaggcctacggcaagcctgtggacatctgggcctgtggggtcatcctgtacatcctgctggtgggctacccacccttctgggatgaggaccagcacaagctgtaccagcagatcaaggccggggcctatgacttccccagccctgagtgggacacagtgaccccagaggccaagaacctgatcaaccagatgctgaccatcaacccagccaagaggatcacagcccacgaggccctgaagcacccctgggtgtgccagaggagcacagtggcctccatgatgcaccggcaggagaccgtggagtgcctgaagaagttcaatgcccggaggaagctgaagggggccatcctgaccaccatgctggccaccaggaacttctctgctgccaagagcctgctgaacaagaaggcagatggagtgaagccccagaccaacagcaccaagaacagcgctgctgccaccagccccaagggcaccctgcccccagctgccctggagagcagtgacagcgccaacaccaccattgaagatgaagatgccaaggccaggaagcaggagatcatcaagaccacagagcagctgattgaagctgtgaacaacggggactttgaggcctatgccaagatctgtgaccccggcctgaccagctttgagcctgaggccctgggcaacctggtggagggcatggacttccaccgcttctactttgagaacctgctggccaagaacagcaagcccatccacaccaccatcctgaacccccacgtgcacgtgattggagaagatgctgcctgcatcgcctacatccggctgacccagtacattgatggccagggccggcccaggaccagccagagcgaggagaccagggtgtggcacagaagagatggcaagtggcagaatgtgcacttccactgcagcggggcccctgtggcccccctgcagtag

SEQ ID NO: 248007 - DNA, 1512 bp, Artificial Sequence
  derived and/or modified sequence
atggccaccaccgtgacctgcacccggttcaccgacgagtaccagctctacgaggatatcggcaagggtgcgttcagtgttgtcaggcgttgcgtgaagctttgtaccggccatgaatacgctgctaagatcattaacacgaagaagctgtctgctagggatcatcaaaagctcgaacgggaagccaggatttgccgtttactcaagcactcgaatattgtgcgattgcacgacagcatttctgaagaagggttccattacctggtgtttgatttggtgaccggtggggaactattcgaggatatcgtcgcgcgcgaatactattccgaagccgacgcctcccactgcatccaacagatactggaagcagttctacattgtcaccagatgggggtggtgcacagggatctcaagcccgaaaatctattactggcctctaagtgtaagggagcagctgtgaagctggcagacttcggtctggccatcgaggtccagggggatcagcaagcctggttcggattcgccggaaccccagggtacctctcgcctgaagtcctgagaaaagaggcttatggtaaacccgtggacatctgggcatgcggcgtaatcctatatatactactggtaggctatcctccattctgggacgaagatcaacacaaactgtaccagcagattaaagccggagcctatgatttcccgagccctgagtgggatacagttacaccagaggccaagaatctgattaatcagatgttaaccataaatccagcgaaaaggataaccgcccacgaggccctgaagcatccatgggtgtgccagcgatctaccgtggcttctatgatgcaccggcaggaaacggtggaatgtctgaagaaattcaacgctcggcgaaagctcaaaggcgctatcctgaccactatgttggccacgcgcaacttctctgccgccaagtccctcctgaataaaaaagctgacggagtgaagccacagacaaatagtactaagaattctgcggccgccaccagccctaagggcaccctgccacccgcagcattagagagttcagattctgccaacaccactatcgaggacgaggacgccaaggcccgcaagcaagaaattataaagaccacagagcagttgattgaagccgtaaacaatggcgattttgaggcatacgccaaaatctgcgaccctggactgacaagctttgagccagaggccctgggcaacttagtggagggcatggatttccatcggttttatttcgaaaatctattggcgaaaaactccaagcccatccatacaaccattctgaatccacacgtccacgtgattggtgaggacgctgcctgcatcgcttacatccgcctaacccagtacatagatggccaaggtcggccaagaacctctcaatctgaagagacaagggtgtggcatcgtcgagacggtaagtggcaaaatgtccattttcactgttccggcgcacccgtggcccccctgcaatag

SEQ ID NO: 248008 - DNA, 1512 bp, Artificial Sequence
  derived and/or modified sequence
atggctactacagttacctgcacaaggttcacagatgaatatcagctgtatgaggatatcggtaagggcgcattctcagtagtgcgaagatgtgttaagttatgcacaggccacgagtatgcagctaagattatcaataccaagaaactgagtgcgagggatcaccagaaattggagagggaagccagaatctgccgactgctgaaacacagtaacatcgtccgcttgcatgactctatttcagaagaggggttccactacctggtattcgacctggtgacaggcggtgaactgtttgaagacatagtagcccgagaatactactcagaggcggatgcctctcattgtattcagcagatacttgaagctgtgctccactgccatcagatgggagttgtgcatagagacttgaagcccgaaaatttgctcctggcctccaagtgtaagggtgctgcagtgaaactggctgacttcggcctggcgatcgaggtgcaaggtgaccagcaggcctggtttggatttgcaggcactcctggttatctctctccggaagtgctacgtaaagaagcctatggcaaaccggtcgatatttgggcatgcggggtgatcctgtatatccttctcgtgggttacccccctttttgggacgaggaccaacacaagctgtatcagcagatcaaagccggagcatacgacttcccctcccccgagtgggacaccgtcacgcctgaggccaagaacttgatcaaccagatgcttactattaaccctgctaaacgaattaccgcgcacgaggcactgaagcatccttgggtgtgtcagaggtcaactgttgcttctatgatgcatcggcaagaaacggtggaatgcctcaagaagtttaacgccaggagaaagctaaagggtgccatactgactactatgctggctaccagaaacttctccgctgccaaatcacttcttaataaaaaagccgatggggtaaagccccaaactaattctaccaagaacagtgcggctgctacttcacctaagggcaccctcccacccgctgcacttgaatcttctgattccgctaatacgacaatcgaggacgaagacgcaaaagccaggaagcaggagattatcaaaacaactgagcaactcattgaagccgtgaacaatggcgatttcgaggcctatgccaagatttgtgaccccggactgactagctttgagccggaagccctgggtaacttagtggaagggatggacttccacaggttttactttgagaacctgctcgccaagaacagcaaacctattcacacaacaattttgaacccacacgtacatgtgataggggaagacgccgcttgcatagcttacattcggttgacacaatacatcgatggccaaggccgtccgcgaaccagccagtctgaggagaccagggtctggcaccgtcgggatggtaagtggcaaaatgttcactttcattgttccggcgctcccgtggctcctctgcagtag

SEQ ID NO: 248009 - DNA, 1895 bp, Artificial Sequence
  derived and/or modified sequence
gcggcgcgctcctggcgaggacggagcgagcagatctcgcgtgcgctcgccgcccggcgcagcccagcccggcccccgcctggcgccgcgagccgaggtgtctcccgcgcccgcgcccgtgtcgccgccgtgcccgcgagcgggagccggagtcgccgccgcccgagcgcagccgagcgcacgccgagcccgtccgccgccgccatggccaccacggtgacctgcacccgcttcaccgacgagtaccagctctacgaggatattggcaagggggctttctctgtggtccgacgctgtgtcaagctctgcaccggccatgagtatgcagccaagatcatcaacaccaagaagctgtcagccagagatcaccagaagctggagagagaggctcggatctgccgccttctgaagcattccaacatcgtgcgtctccacgacagcatctccgaggagggcttccactacctggtcttcgatctggtcactggtggggagctctttgaagacattgtggcgagagagtactacagcgaggctgatgccagtcactgtatccagcagatcctggaggccgttctccattgtcaccaaatgggggtcgtccacagagacctcaagccggagaacctgcttctggccagcaagtgcaaaggggctgcagtgaagctggcagacttcggcctagctatcgaggtgcagggggaccagcaggcatggtttggtttcgctggcacaccaggctacctgtcccctgaggtccttcgcaaagaggcgtatggcaagcctgtggacatctgggcatgtggggtgatcctgtacatcctgctcgtgggctacccacccttctgggacgaggaccagcacaagctgtaccagcagatcaaggctggtgcctatgacttcccgtcccctgagtgggacaccgtcactcctgaagccaaaaacctcatcaaccagatgctgaccatcaaccctgccaagcgcatcacagcccatgaggccctgaagcacccgtgggtctgccaacgctccacggtagcatccatgatgcacagacaggagactgtggagtgtctgaaaaagttcaatgccaggagaaagctcaagggagccatcctcaccaccatgctggccacacggaatttctcagcagccaagagtttactcaacaagaaagcagatggagtcaagccccagacgaatagcaccaaaaacagtgcagccgccaccagccccaaagggacgcttcctcctgccgccctggagtcttctgacagtgccaataccaccatagaggatgaagacgctaaagcccggaagcaggagatcattaagaccacggagcagctcatcgaggccgtcaacaacggtgactttgaggcctacgcgaaaatctgtgacccagggctgacctcgtttgagcctgaagcactgggcaacctggttgaagggatggacttccacagattctacttcgagaacctgctggccaagaacagcaagccgatccacacgaccatcctgaacccacacgtgcacgtcattggagaggatgccgcctgcatcgcttacatccggctcacgcagtacattgacgggcagggccggccccgcaccagccagtctgaggagacccgcgtgtggcaccgccgcgacggcaagtggcagaacgtgcacttccactgctcgggcgcgcctgtggccccgctgcagtgaagagctgcgccctggtttcgccggacagagttggtgtttggagcccgactgccctcgggcacacggcctgcctgtcgcatgtttgtgtctgcctcgttccctcccctggtgcctgtgtctgcagaaaaacaagaccagatgtgatttgttaaaaaaaaacaaaaaaaaaaaaaaaaaaa

SEQ ID NO: 248010 - DNA, 1512 bp, Artificial Sequence
  derived and/or modified sequence
atggccaccaccgtgacctgcaccagattcaccgacgagtaccagctgtacgaggacatcggcaagggcgccttcagcgtggtgagaagatgcgtgaagctgtgcaccggccacgagtacgccgccaagatcatcaacaccaagaagctgagcgccagagaccaccagaagctggagagagaggccagaatctgcagactgctgaagcacagcaacatcgtgagactgcacgacagcatcagcgaggagggcttccactacctggtgttcgacctggtgaccggcggcgagctgttcgaggacatcgtggccagagagtactacagcgaggccgacgccagccactgcatccagcagatcctggaggccgtgctgcactgccaccagatgggcgtggtgcacagagacctgaagcccgagaacctgctgctggccagcaagtgcaagggcgccgccgtgaagctggccgacttcggcctggccatcgaggtgcagggcgaccagcaggcctggttcggcttcgccggcacccccggctacctgagccccgaggtgctgagaaaggaggcctacggcaagcccgtggacatctgggcctgcggcgtgatcctgtacatcctgctggtgggctacccccccttctgggacgaggaccagcacaagctgtaccagcagatcaaggccggcgcctacgacttccccagccccgagtgggacaccgtgacccccgaggccaagaacctgatcaaccagatgctgaccatcaaccccgccaagagaatcaccgcccacgaggccctgaagcacccctgggtgtgccagagaagcaccgtggccagcatgatgcacagacaggagaccgtggagtgcctgaagaagttcaacgccagaagaaagctgaagggcgccatcctgaccaccatgctggccaccagaaacttcagcgccgccaagagcctgctgaacaagaaggccgacggcgtgaagccccagaccaacagcaccaagaacagcgccgccgccaccagccccaagggcaccctgccccccgccgccctggagagcagcgacagcgccaacaccaccatcgaggacgaggacgccaaggccagaaagcaggagatcatcaagaccaccgagcagctgatcgaggccgtgaacaacggcgacttcgaggcctacgccaagatctgcgaccccggcctgaccagcttcgagcccgaggccctgggcaacctggtggagggcatggacttccacagattctacttcgagaacctgctggccaagaacagcaagcccatccacaccaccatcctgaacccccacgtgcacgtgatcggcgaggacgccgcctgcatcgcctacatcagactgacccagtacatcgacggccagggcagacccagaaccagccagagcgaggagaccagagtgtggcacagaagagacggcaagtggcagaacgtgcacttccactgcagcggcgcccccgtggcccccctgcagtag

SEQ ID NO: 248011 - protein, 492 aa, Artificial Sequence
  derived and/or modified sequence
MATTVTCTRFTDEYQLYEDIGKGAFSVVRRCVKLCTGHEYAAKIINTKKLSARDHQKLEREARICRLLKHSNIVRLHDSISEEGFHYLVFDLVTGGELFEDIVAREYYSEADASHCIQQILEAVLHCHQMGVVHRDLKPENLLLASKCKGAAVKLADFGLAIEVQGDQQAWFGFAGTPGYLSPEVLRKEAYGKPVDIWACGVILYILLVGYPPFWDEDQHKLYQQIKAGAYDFPSPEWDTVTPEAKNLINQMLTINPAKRITAHEALKHPWVCQRSTVASMMHRQETVECLKKFNARRKLKGAILTTMLATRNFSVGRQTTAPATMSTAASGTTMGLVEQAKSLLNKKADGVKEPQTTVIHNPVDGIKESSDSANTTIEDEDAKARKQEIIKTTEQLIEAVNNGDFEAYAFYFENLLAKNSKPIHTTILNPHVHVIGEDAACIAYIRLTQYIDGQGRPRTSQSEETRVWHRRDGKWQNVHFHCSGAPVAPLQ

SEQ ID NO: 248012 - DNA, 1479 bp, Artificial Sequence
  derived and/or modified sequence
atggccaccactgtgacctgcacccggtttacggatgagtaccaactctatgaggatatcggcaaaggggcgttcagtgttgtccgacgttgtgtcaagctctgtaccggccacgaatacgccgctaaaattattaataccaagaagttatctgcgagagaccatcagaagctcgagagagaggcgagaatatgtagacttctgaaacattccaatatcgtacgactgcatgattccatttctgaggagggttttcactacctggttttcgacctggtaaccggcggggagcttttcgaggatatcgttgccagagaatactactccgaggccgatgcctctcattgtattcagcagatcctggaggccgtgctgcattgccatcagatgggggttgtgcaccgggacttaaagcctgaaaacctgctgctggccagtaaatgcaaaggggcagccgtgaaacttgcggattttgggctcgccatcgaggtgcaaggtgatcagcaagcatggttcggctttgccggaactcccggctacctctctccagaagtgctgaggaaggaggcttacggcaaacccgtcgacatttgggcctgtggagtgatcctctatattctgctggtaggttatccacctttttgggacgaggaccagcacaaattataccaacaaataaaggccggggcctacgacttcccctcccctgaatgggataccgtgacgcctgaggctaaaaacttaatcaaccaaatgctgacaatcaaccctgccaagaggattacagcccacgaggccttaaaacacccctgggtgtgtcagaggtctacagtggccagcatgatgcaccggcaggagacagtcgagtgcctgaaaaaatttaacgcccgccgaaagcttaagggtgccatccttactaccatgttagccacccgcaactttagcgtcgggagacagactactgctccggccacaatgtctaccgcagcatctggaaccactatgggcttagtggaacaggctaagtctctgctcaataagaaagctgatggcgtcaaagagccccagaccaccgtcatccataacccagttgatggtatcaaagaatcatccgattcggccaatacaacaattgaggacgaagacgccaaagcacggaagcaagagatcatcaagaccacagaacagctgatagaggccgtcaacaacggcgattttgaagcatatgcattctactttgagaacctgttggccaaaaattctaaaccaattcatacgacaatcctcaacccccatgtgcacgtcattggggaggacgcagcatgtatcgcctatattcgactgacccagtacatagatggccagggccgcccccgcacctcacagagtgaagagacacgggtctggcaccgcagagacgggaagtggcagaatgttcactttcattgcagcggtgcacccgtcgctccacttcagtag

SEQ ID NO: 248013 - DNA, 1479 bp, Artificial Sequence
  derived and/or modified sequence
atggccaccaccgtgacctgcacccgcttcacagatgagtaccagctgtatgaggacatcggcaagggggccttctctgtggtgagaagatgtgtgaagctgtgcaccggccacgagtatgctgccaagatcatcaacaccaagaagctgagcgcccgggaccaccagaagctggagcgggaggcccgcatctgccgcctgctgaagcacagcaacatcgtgcggctgcatgacagcatcagcgaggagggcttccactacctggtgtttgacctggtgactggaggagagctgtttgaggacatcgtggcccgggagtactacagcgaggctgatgccagccactgcatccagcagatcctggaggccgtgctgcactgccaccagatgggcgtggtgcaccgggacctgaagccagagaacctgctgctggccagcaaatgtaaaggagctgctgtgaagctggccgactttggcctggccatcgaggtgcagggcgaccagcaggcctggtttggatttgctggcaccccaggctacctgagccctgaggtgctgaggaaggaggcctacggcaagcctgtggacatctgggcctgtggggtcatcctgtacatcctgctggtgggctacccacccttctgggatgaggaccagcacaagctgtaccagcagatcaaggccggggcctatgacttccccagccctgagtgggacacagtgaccccagaggccaagaacctgatcaaccagatgctgaccatcaacccagccaagaggatcacagcccacgaggccctgaagcacccctgggtgtgccagaggagcacagtggcctccatgatgcaccggcaggagaccgtggagtgcctgaagaagttcaatgcccggaggaagctgaagggggccatcctgaccaccatgctggccaccaggaacttctctgtgggccggcagaccacagccccagccaccatgagcacagctgccagcggcaccaccatgggcctggtggagcaggccaagagcctgctgaacaagaaggcagatggagtgaaggagccccagaccaccgtcatccacaaccctgtggatggcatcaaggagagcagtgacagcgccaacaccaccattgaagatgaagatgccaaggccaggaagcaggagatcatcaagaccacagagcagctgattgaggccgtgaacaatggagactttgaggcctatgccttctactttgagaacctgctggccaagaacagcaagcccatccacaccaccatcctgaacccccacgtgcacgtgattggagaagatgctgcctgcatcgcctacatccggctgacccagtacattgatggccagggccggcccaggaccagccagagcgaggagaccagggtgtggcacagaagagatggcaagtggcagaatgtgcacttccactgcagcggggcccctgtggcccccctgcagtag

SEQ ID NO: 248014 - DNA, 1479 bp, Artificial Sequence
  derived and/or modified sequence
atggccaccaccgtgacctgcacccggttcaccgacgagtaccagttgtatgaggatattgggaagggggctttctctgtggtccgcagatgtgttaagctatgtactggccacgagtatgccgcaaagataattaacactaaaaagctgtccgctcgggaccatcagaagttggaaagagaggctaggatttgccggctgcttaagcatagcaatatcgtgcgcctgcatgatagcatttccgaggaaggctttcattacctggtgttcgacttagtgactggcggtgagctgttcgaagacattgtcgctcgcgaatactatagcgaggctgacgcctcccattgcatacagcagattctggaggcagttctgcactgccatcagatgggggtggtgcacagggacctaaagcctgaaaatctgctactggcaagcaagtgtaagggcgcggcggtgaagctagcagatttcgggttagccatcgaggttcagggcgaccagcaagcgtggtttgggtttgcggggactcctggctatctcagccccgaagttctgcgcaaggaggcctacggcaagcccgtcgatatttgggcctgtggggtgattttgtacatcctgctcgtgggataccccccattttgggacgaagatcaacacaaactctaccagcagatcaaggcaggcgcttacgattttccctctcctgaatgggatacagtaaccccagaagctaagaatctgattaaccagatgttgaccatcaatcccgcgaagcgcattaccgcacatgaggctctgaaacacccgtgggtctgtcagcgctcaaccgtagcctccatgatgcacaggcaggagacagtggagtgcctgaagaaattcaacgcccggagaaaattgaaaggcgctatcctcacgacaatgttggccacccgtaatttctcagtcggccggcaaaccactgcgccagcgactatgagcaccgcagcttcaggaacaacgatgggactagtggagcaggcaaagtccttattgaacaagaaggctgatggcgtgaaagaaccacagaccactgtgattcacaacccggttgacgggataaaggagtccagtgatagtgccaacaccacaatcgaagatgaggatgcaaaagccaggaagcaggaaattataaagacgactgagcaacttattgaggcagtgaacaacggggacttcgaagcctacgcattttatttcgagaacctccttgcgaaaaatagtaagcccatccatacgacaatcctgaaccctcacgtccatgtaataggggaagacgctgcatgtatcgcctatatacggcttacccagtatatcgatgggcagggacgaccccggacatctcagtctgaggaaacgagagtgtggcatagacgtgacgggaaatggcagaacgtacactttcactgctcaggcgcccccgtcgcccctcttcaatag

SEQ ID NO: 248015 - DNA, 1479 bp, Artificial Sequence
  derived and/or modified sequence
atggcaaccactgttacatgcacaaggttcacagacgagtaccagctgtatgaggacattggaaaaggagcatttagtgtggtacgacggtgtgtgaagctttgtactggccacgagtatgccgcaaagataatcaatactaaaaagctgagtgcccgagatcaccagaaactcgaacgagaagccagaatttgcagactgctgaaacatagcaatatcgtgcgtctgcatgattccatttcagaggagggctttcattatctggtcttcgacttggtgaccgggggtgaactgttcgaagacatcgtagcccgagagtactactcagaagccgatgctagtcattgcattcaacagatacttgaggccgtgctgcattgtcatcaaatgggcgtggttcacagggacttaaagcccgaaaacttattgctggcctcaaaatgcaagggagcagctgtgaagctagccgactttggcctcgctatcgaggtacagggtgaccagcaggcatggtttggctttgccggaacacccggttatctatctcctgaggtgttgcgaaaagaggcctacggcaagcccgtggatatttgggcatgtggagtaattctctacatcctccttgtgggctatcctcccttttgggacgaggatcagcacaaactgtaccagcagattaaggccggagcttatgattttccatcccctgagtgggacactgtgacccctgaggcaaaaaaccttattaaccagatgctaaccatcaatcctgctaagcgaatcactgctcatgaggctctgaagcacccctgggtttgccagagatctaccgtcgcttctatgatgcacagacaggagacagttgagtgcctaaaaaaatttaacgccaggagaaagctgaaaggcgcaatcttgacgacgatgctggcaacacgcaatttctccgttgggcgtcaaaccacggcccctgccacaatgagtactgcagcgtcaggaaccacaatgggtcttgtcgaacaagccaagagtttactgaacaaaaaagcggacggagtcaaggagcctcagactacagttatccacaatcctgttgacggcatcaaggaaagctctgattccgccaataccaccattgaggacgaagacgccaaagcaagaaagcaggaaatcatcaaaacaactgaacagctcatcgaggccgtgaataacggagattttgaggcatacgctttctactttgagaatttgctggcgaagaacagcaagcccatccacacaacaatcctaaacccacacgtgcatgtgatcggagaggacgccgcttgtatcgcatacattcgtctgactcagtacatcgacggacagggtaggccaagaactagccagtccgaggaaaccagagtctggcacaggagagatggcaagtggcagaacgtgcattttcactgctcaggggctcctgtcgcccctctacagtag

SEQ ID NO: 248016 - DNA, 1577 bp, Artificial Sequence
  derived and/or modified sequence
gccatggccaccacggtgacctgcacccgcttcaccgacgagtaccagctctacgaggatattggcaagggggctttctctgtggtccgacgctgtgtcaagctctgcaccggccatgagtatgcagccaagatcatcaacaccaagaagctgtcagccagagatcaccagaagctggagagagaggctcggatctgccgccttctgaagcattccaacatcgtgcgtctccacgacagcatctccgaggagggcttccactacctggtcttcgatctggtcactggtggggagctctttgaagacattgtggcgagagagtactacagcgaggctgatgccagtcactgtatccagcagatcctggaggccgttctccattgtcaccaaatgggggtcgtccacagagacctcaagccggagaacctgcttctggccagcaagtgcaaaggggctgcagtgaagctggcagacttcggcctagctatcgaggtgcagggggaccagcaggcatggtttggtttcgctggcacaccaggctacctgtcccctgaggtccttcgcaaagaggcgtatggcaagcctgtggacatctgggcatgtggggtgatcctgtacatcctgctcgtgggctacccacccttctgggacgaggaccagcacaagctgtaccagcagatcaaggctggtgcctatgacttcccgtcccctgagtgggacaccgtcactcctgaagccaaaaacctcatcaaccagatgctgaccatcaaccctgccaagcgcatcacagcccatgaggccctgaagcacccgtgggtctgccaacgctccacggtagcatccatgatgcacagacaggagactgtggagtgtctgaaaaagttcaatgccaggagaaagctcaagggagccatcctcaccaccatgctggccacacggaatttctcagtgggcagacagaccaccgctccggccacaatgtccaccgcggcctccggcaccaccatggggctggtggaacaagccaagagtttactcaacaagaaagcagatggagtcaaggagcctcaaaccaccgtcatccataacccagtggacgggattaaggagtcttctgacagtgccaataccaccatagaggatgaagacgctaaagcccggaagcaggagatcattaagaccacggagcagctcatcgaggccgtcaacaacggtgactttgaggcctacgcattctacttcgagaacctgctggccaagaacagcaagccgatccacacgaccatcctgaacccacacgtgcacgtcattggagaggatgccgcctgcatcgcttacatccggctcacgcagtacattgacgggcagggccggccccgcaccagccagtctgaggagacccgcgtgtggcaccgccgcgacggcaagtggcagaacgtgcacttccactgctcgggcgcgcctgtggccccgctgcagtgaagagctgcgccctggtttcgccggacagagttggtgtttggagcccgactgccctcgggcacacggcctgcctgtcgcatgtttgtgtctgcctc

SEQ ID NO: 248017 - DNA, 1479 bp, Artificial Sequence
  derived and/or modified sequence
atggccaccaccgtgacctgcaccagattcaccgacgagtaccagctgtacgaggacatcggcaagggcgccttcagcgtggtgagaagatgcgtgaagctgtgcaccggccacgagtacgccgccaagatcatcaacaccaagaagctgagcgccagagaccaccagaagctggagagagaggccagaatctgcagactgctgaagcacagcaacatcgtgagactgcacgacagcatcagcgaggagggcttccactacctggtgttcgacctggtgaccggcggcgagctgttcgaggacatcgtggccagagagtactacagcgaggccgacgccagccactgcatccagcagatcctggaggccgtgctgcactgccaccagatgggcgtggtgcacagagacctgaagcccgagaacctgctgctggccagcaagtgcaagggcgccgccgtgaagctggccgacttcggcctggccatcgaggtgcagggcgaccagcaggcctggttcggcttcgccggcacccccggctacctgagccccgaggtgctgagaaaggaggcctacggcaagcccgtggacatctgggcctgcggcgtgatcctgtacatcctgctggtgggctacccccccttctgggacgaggaccagcacaagctgtaccagcagatcaaggccggcgcctacgacttccccagccccgagtgggacaccgtgacccccgaggccaagaacctgatcaaccagatgctgaccatcaaccccgccaagagaatcaccgcccacgaggccctgaagcacccctgggtgtgccagagaagcaccgtggccagcatgatgcacagacaggagaccgtggagtgcctgaagaagttcaacgccagaagaaagctgaagggcgccatcctgaccaccatgctggccaccagaaacttcagcgtgggcagacagaccaccgcccccgccaccatgagcaccgccgccagcggcaccaccatgggcctggtggagcaggccaagagcctgctgaacaagaaggccgacggcgtgaaggagccccagaccaccgtgatccacaaccccgtggacggcatcaaggagagcagcgacagcgccaacaccaccatcgaggacgaggacgccaaggccagaaagcaggagatcatcaagaccaccgagcagctgatcgaggccgtgaacaacggcgacttcgaggcctacgccttctacttcgagaacctgctggccaagaacagcaagcccatccacaccaccatcctgaacccccacgtgcacgtgatcggcgaggacgccgcctgcatcgcctacatcagactgacccagtacatcgacggccagggcagacccagaaccagccagagcgaggagaccagagtgtggcacagaagagacggcaagtggcagaacgtgcacttccactgcagcggcgcccccgtggcccccctgcagtag

SEQ ID NO: 248018 - protein, 479 aa, Artificial Sequence
  derived and/or modified sequence
MATTVTCTRFTDEYQLYEDIGKGAFSVVRRCVKLCTGHEYAAKIINTKKLSARDHQKLEREARICRLLKHSNIVRLHDSISEEGFHYLVFDLVTGGELFEDIVAREYYSEADASHCIQQILEAVLHCHQMGVVHRDLKPENLLLASKCKGAAVKLADFGLAIEVQGDQQAWFGFAGTPGYLSPEVLRKEAYGKPVDIWACGVILYILLVGYPPFWDEDQHKLYQQIKAGAYDFPSPEWDTVTPEAKNLINQMLTINPAKRITAHEALKHPWVCQRSTVASMMHRQETVECLKKFNARRKLKGAILTTMLATRNFSAAKSLLNKKADGVKESSDSANTTIEDEDAKARKQEIIKTTEQLIEAVNNGDFEAYAKICDPGLTSFEPEALGNLVEGMDFHRFYFENLLAKNSKPIHTTILNPHVHVIGEDAACIAYIRLTQYIDGQGRPRTSQSEETRVWHRRDGKWQNVHFHCSGAPVAPLQ

SEQ ID NO: 248019 - DNA, 1440 bp, Artificial Sequence
  derived and/or modified sequence
atggcgactactgtaacctgcacgcgcttcacagatgagtaccagctgtatgaagatatcgggaaaggggcattctctgttgtacgccggtgcgtcaagctctgcacaggacatgagtacgctgcgaagattataaacacaaaaaagctatcagcccgcgaccaccaaaaacttgagagagaggcccgcatttgtaggcttctgaaacactccaatattgtccggctccacgattccatctctgaggaagggtttcactatctcgtgtttgacctcgtgacaggcggcgagctattcgaggacatcgtggcgagggagtactactcggaggccgacgcaagccattgcatccagcagatccttgaggccgtacttcattgtcatcagatgggggtggtgcatcgggatttgaaacctgagaatctcctgctggcatctaagtgcaagggcgctgcggtcaagcttgccgactttggtctggcgattgaggtccagggcgatcagcaggcatggttcggcttcgccggtacccctggatacctttccccagaggtgcttagaaaggaggcttacggcaaacctgtggacatttgggcttgtggagttattctttatatcctacttgtaggatatccacctttttgggacgaagatcagcataagctatatcaacagatcaaggccggtgcttacgattttccctctccagagtgggacaccgtgacaccagaggcaaaaaacctgattaatcagatgctcacgattaatcctgcaaagcgaattaccgcccacgaggccctcaagcatccgtgggtgtgccagcggtctactgttgcttctatgatgcaccgccaggaaacagtggaatgtttaaagaaattcaacgcgagaagaaaactgaagggagccattctgacaaccatgctcgccacgcgaaacttcagtgctgcaaaatcccttctgaacaaaaaggccgacggcgttaaagagagctcagattccgcgaacacaacaatcgaggatgaggacgccaaagctaggaaacaggagattataaaaacaaccgagcagctgatcgaagctgtcaacaacggtgatttcgaggcgtatgcaaagatctgcgatcctggtctgacaagctttgagcccgaggccctcggcaatttggtagaaggcatggactttcacagattctacttcgaaaacctgctggcaaaaaattccaaaccgattcacacaacaatcctcaatcctcatgtgcacgtgataggcgaagacgccgcttgcattgcctatataaggctgacacagtacatcgatgggcaaggccggccaaggacctcgcagtcagaggaaaccagggtttggcacaggagagacggaaaatggcaaaacgtacatttccactgtagcggggctcctgttgcccctctccaatag

SEQ ID NO: 248020 - DNA, 1440 bp, Artificial Sequence
  derived and/or modified sequence
atggccaccaccgtgacctgcacccgcttcacagatgagtaccagctgtatgaggacatcggcaagggggccttctctgtggtgagaagatgtgtgaagctgtgcaccggccacgagtatgctgccaagatcatcaacaccaagaagctgagcgcccgggaccaccagaagctggagcgggaggcccgcatctgccgcctgctgaagcacagcaacatcgtgcggctgcatgacagcatcagcgaggagggcttccactacctggtgtttgacctggtgactggaggagagctgtttgaggacatcgtggcccgggagtactacagcgaggctgatgccagccactgcatccagcagatcctggaggccgtgctgcactgccaccagatgggcgtggtgcaccgggacctgaagccagagaacctgctgctggccagcaaatgtaaaggagctgctgtgaagctggccgactttggcctggccatcgaggtgcagggcgaccagcaggcctggtttggatttgctggcaccccaggctacctgagccctgaggtgctgaggaaggaggcctacggcaagcctgtggacatctgggcctgtggggtcatcctgtacatcctgctggtgggctacccacccttctgggatgaggaccagcacaagctgtaccagcagatcaaggccggggcctatgacttccccagccctgagtgggacacagtgaccccagaggccaagaacctgatcaaccagatgctgaccatcaacccagccaagaggatcacagcccacgaggccctgaagcacccctgggtgtgccagaggagcacagtggcctccatgatgcaccggcaggagaccgtggagtgcctgaagaagttcaatgcccggaggaagctgaagggggccatcctgaccaccatgctggccaccaggaacttctctgctgccaagagcctgctgaacaagaaggcagatggagtgaaggagagcagtgacagcgccaacaccaccattgaagatgaagatgccaaggccaggaagcaggagatcatcaagaccacagagcagctgattgaagctgtgaacaacggggactttgaggcctatgccaagatctgtgaccccggcctgaccagctttgagcctgaggccctgggcaacctggtggagggcatggacttccaccgcttctactttgagaacctgctggccaagaacagcaagcccatccacaccaccatcctgaacccccacgtgcacgtgattggagaagatgctgcctgcatcgcctacatccggctgacccagtacattgatggccagggccggcccaggaccagccagagcgaggagaccagggtgtggcacagaagagatggcaagtggcagaatgtgcacttccactgcagcggggcccctgtggcccccctgcagtag

SEQ ID NO: 248021 - DNA, 1440 bp, Artificial Sequence
  derived and/or modified sequence
atggccaccaccgtgacctgcacccggttcaccgacgagtaccagctctatgaggatatcggaaaaggagccttctcagttgtgcggagatgtgttaaattgtgcacaggacacgagtacgccgcaaaaattatcaatacgaagaaattgtccgcccgcgatcaccaaaagctggagagggaggccagaatctgccgtctgctgaaacattcaaatattgtgaggctgcatgactccatctccgaagagggattccattacctggtgttcgacctcgtcaccggaggcgaactatttgaggacatagtggctcgagaatattatagcgaagccgacgctagtcattgcatccaacagattctggaagctgtcctgcattgtcaccagatgggcgtggtccatagggacctgaaaccagagaacctcctgttggcaagcaaatgcaagggtgctgccgtgaagttagctgattttgggcttgctatcgaggtccaaggcgaccagcaggcctggttcgggttcgcaggtacccccggatacttgtcgccagaagtgttgcggaaggaggcttatgggaagcctgtggacatctgggcctgtggggtgatattgtacatcctgctcgtggggtatccacccttttgggacgaagaccagcacaaactgtaccagcagattaaagcgggtgcttacgactttccatcaccagagtgggacacggttacgccagaagcaaagaacctcattaatcaaatgttaaccatcaatcctgctaagcggattaccgctcatgaagctctgaagcacccgtgggtctgtcaacggagcacagttgcttccatgatgcaccgtcaggagaccgtggaatgcctgaaaaagtttaatgccaggcggaagttaaagggcgctattcttacgacaatgctggctactcgcaacttcagcgccgccaagtcccttctcaataagaaggcggacggagtcaaggagagttctgatagtgctaacactacaatagaggatgaagatgccaaggctcgaaaacaggaaattatcaaaacaacagagcaactgatcgaagctgtgaacaacggtgactttgaggcttatgcaaagatctgtgacccaggcctgactagttttgagcccgaagcccttgggaacctcgtggagggtatggattttcaccgtttctacttcgaaaacctgctggccaagaactctaaacccatacataccaccattcttaatccgcatgtgcatgtgataggcgaggatgctgcttgtattgcgtatattagacttacacagtatatcgatggacaggggcgcccccgcacatctcaatctgaggaaactagagtgtggcatcgcagggatgggaagtggcaaaatgttcattttcactgttccggcgcacctgttgcaccccttcagtag

SEQ ID NO: 248022 - DNA, 1440 bp, Artificial Sequence
  derived and/or modified sequence
atggctaccacagtgacttgtacgcggtttaccgacgagtatcagttgtatgaggacatcggcaagggggcatttagtgtggtacgaaggtgcgtgaagttgtgcaccggccacgaatacgccgcaaagatcattaacactaagaagctcagtgctagggaccatcaaaagctcgagagggaagctcgaatttgcagactgttgaaacactcaaatatcgttaggctccacgacagcattagtgaggagggttttcattacctggttttcgatcttgtgactggcggagaactgttcgaggacatcgtagctagggaatactacagcgaagcggatgcatctcattgtattcagcagattctagaggccgtattgcattgccaccagatgggagtcgtccaccgagatctcaagccggaaaacttacttctggcatccaagtgcaagggtgctgctgtgaagctggccgacttcgggttagccatcgaagtgcagggcgatcaacaggcctggttcggcttcgctggcacacctggatatctgtccccagaggtgctgaggaaggaagcctacggtaagccagtagatatctgggcatgcggagtcatcttgtatatcttgctggtagggtacccccctttttgggatgaagaccagcacaagctatatcaacaaatcaaagcaggggcttacgactttccatctccagaatgggataccgtgactcctgaggccaaaaacctgattaaccagatgctgacaattaatcccgcaaagcggattacagcacatgaagcccttaaacatccatgggtgtgccagcgctccacagtggccagcatgatgcatcgccaagaaacagtggaatgtctgaagaagtttaacgccagacgtaaactgaagggagccatcctgacaaccatgctcgccacccggaactttagcgcggcaaaatctttactgaataaaaaagccgacggcgtcaaggaatcttcagattctgcgaatactaccatcgaggacgaagacgccaaggcgaggaagcaggagatcatcaagacaaccgagcaactgatagaagcggttaataatggtgactttgaggcatacgcaaaaatttgtgaccccggactgacaagctttgagccagaagcactgggaaatcttgtggaaggaatggactttcatagattctattttgaaaatctgctcgctaagaacagcaagcctattcacacaacaattctcaaccctcacgtccacgtaatcggggaagacgcagcctgtatcgcctacattcgcctgactcagtacattgacggtcaaggccgaccacggacctcccagtctgaagaaacacgggtgtggcacagaagagatgggaaatggcagaatgtgcactttcactgctccggtgcgccagtagcacctctgcagtag

SEQ ID NO: 248023 - DNA, 1624 bp, Artificial Sequence
  derived and/or modified sequence
cgccgccgccatggccaccacggtgacctgcacccgcttcaccgacgagtaccagctctacgaggatattggcaagggggctttctctgtggtccgacgctgtgtcaagctctgcaccggccatgagtatgcagccaagatcatcaacaccaagaagctgtcagccagagatcaccagaagctggagagagaggctcggatctgccgccttctgaagcattccaacatcgtgcgtctccacgacagcatctccgaggagggcttccactacctggtcttcgatctggtcactggtggggagctctttgaagacattgtggcgagagagtactacagcgaggctgatgccagtcactgtatccagcagatcctggaggccgttctccattgtcaccaaatgggggtcgtccacagagacctcaagccggagaacctgcttctggccagcaagtgcaaaggggctgcagtgaagctggcagacttcggcctagctatcgaggtgcagggggaccagcaggcatggtttggtttcgctggcacaccaggctacctgtcccctgaggtccttcgcaaagaggcgtatggcaagcctgtggacatctgggcatgtggggtgatcctgtacatcctgctcgtgggctacccacccttctgggacgaggaccagcacaagctgtaccagcagatcaaggctggtgcctatgacttcccgtcccctgagtgggacaccgtcactcctgaagccaaaaacctcatcaaccagatgctgaccatcaaccctgccaagcgcatcacagcccatgaggccctgaagcacccgtgggtctgccaacgctccacggtagcatccatgatgcacagacaggagactgtggagtgtctgaaaaagttcaatgccaggagaaagctcaagggagccatcctcaccaccatgctggccacacggaatttctcagcagccaagagtttactcaacaagaaagcagatggagtcaaggagtcttctgacagtgccaataccaccatagaggatgaagacgctaaagcccggaagcaggagatcattaagaccacggagcagctcatcgaggccgtcaacaacggtgactttgaggcctacgcgaaaatctgtgacccagggctgacctcgtttgagcctgaagcactgggcaacctggttgaagggatggacttccacagattctacttcgagaacctgctggccaagaacagcaagccgatccacacgaccatcctgaacccacacgtgcacgtcattggagaggatgccgcctgcatcgcttacatccggctcacgcagtacattgacgggcagggccggccccgcaccagccagtctgaggagacccgcgtgtggcaccgccgcgacggcaagtggcagaacgtgcacttccactgctcgggcgcgcctgtggccccgctgcagtgaagagctgcgccctggtttcgccggacagagttggtgtttggagcccgactgccctcgggcacacggcctgcctgtcgcatgtttgtgtctgcctcgttccctcccctggtgcctgtgtctgcagaaaaacaagaccagatgtgatttgttaaaaaaaaacaaaaaaaaaaaaaa

SEQ ID NO: 248024 - DNA, 1440 bp, Artificial Sequence
  derived and/or modified sequence
atggccaccaccgtgacctgcaccagattcaccgacgagtaccagctgtacgaggacatcggcaagggcgccttcagcgtggtgagaagatgcgtgaagctgtgcaccggccacgagtacgccgccaagatcatcaacaccaagaagctgagcgccagagaccaccagaagctggagagagaggccagaatctgcagactgctgaagcacagcaacatcgtgagactgcacgacagcatcagcgaggagggcttccactacctggtgttcgacctggtgaccggcggcgagctgttcgaggacatcgtggccagagagtactacagcgaggccgacgccagccactgcatccagcagatcctggaggccgtgctgcactgccaccagatgggcgtggtgcacagagacctgaagcccgagaacctgctgctggccagcaagtgcaagggcgccgccgtgaagctggccgacttcggcctggccatcgaggtgcagggcgaccagcaggcctggttcggcttcgccggcacccccggctacctgagccccgaggtgctgagaaaggaggcctacggcaagcccgtggacatctgggcctgcggcgtgatcctgtacatcctgctggtgggctacccccccttctgggacgaggaccagcacaagctgtaccagcagatcaaggccggcgcctacgacttccccagccccgagtgggacaccgtgacccccgaggccaagaacctgatcaaccagatgctgaccatcaaccccgccaagagaatcaccgcccacgaggccctgaagcacccctgggtgtgccagagaagcaccgtggccagcatgatgcacagacaggagaccgtggagtgcctgaagaagttcaacgccagaagaaagctgaagggcgccatcctgaccaccatgctggccaccagaaacttcagcgccgccaagagcctgctgaacaagaaggccgacggcgtgaaggagagcagcgacagcgccaacaccaccatcgaggacgaggacgccaaggccagaaagcaggagatcatcaagaccaccgagcagctgatcgaggccgtgaacaacggcgacttcgaggcctacgccaagatctgcgaccccggcctgaccagcttcgagcccgaggccctgggcaacctggtggagggcatggacttccacagattctacttcgagaacctgctggccaagaacagcaagcccatccacaccaccatcctgaacccccacgtgcacgtgatcggcgaggacgccgcctgcatcgcctacatcagactgacccagtacatcgacggccagggcagacccagaaccagccagagcgaggagaccagagtgtggcacagaagagacggcaagtggcagaacgtgcacttccactgcagcggcgcccccgtggcccccctgcagtag

SEQ ID NO: 248025 - protein, 449 aa, Artificial Sequence
  derived and/or modified sequence
MATTVTCTRFTDEYQLYEDIGKGAFSVVRRCVKLCTGHEYAAKIINTKKLSARDHQKLEREARICRLLKHSNIVRLHDSISEEGFHYLVFDLVTGGELFEDIVAREYYSEADASHCIQQILEAVLHCHQMGVVHRDLKPENLLLASKCKGAAVKLADFGLAIEVQGDQQAWFGFAGTPGYLSPEVLRKEAYGKPVDIWACGVILYILLVGYPPFWDEDQHKLYQQIKAGAYDFPSPEWDTVTPEAKNLINQMLTINPAKRITAHEALKHPWVCQRSTVASMMHRQETVECLKKFNARRKLKGAILTTMLATRNFSARKQEIIKTTEQLIEAVNNGDFEAYAKICDPGLTSFEPEALGNLVEGMDFHRFYFENLLAKNSKPIHTTILNPHVHVIGEDAACIAYIRLTQYIDGQGRPRTSQSEETRVWHRRDGKWQNVHFHCSGAPVAPLQ

SEQ ID NO: 248026 - DNA, 1350 bp, Artificial Sequence
  derived and/or modified sequence
atggctaccacagtgacgtgtactcgtttcacagatgagtaccagctctacgaagacattggaaaaggagcattctccgtcgttcggagatgcgtgaagctgtgtacagggcacgagtacgccgctaagatcattaacaccaagaaactgagcgcgcgggatcatcagaaactagagcgcgaggcccggatttgtagattgcttaagcattcaaatatcgttaggctccacgactctatttcagaggagggttttcattatctggtttttgacctagtcacaggcggcgagctctttgaggacatcgtggctcgcgaatactactccgaagccgacgcgtctcactgcatccaacaaatactggaggctgtactccactgccaccaaatgggagtggtgcatcgcgacttgaagcctgagaacctcctgctcgcgtcgaaatgtaaaggcgccgctgtgaagctggccgatttcggcctggcaattgaagtccagggagaccaacaggcctggtttggctttgcagggacacctggctatctgtctccagaggtcttgaggaaagaggcctatggcaagccagtcgatatatgggcctgtggtgtgatcttgtacatattgttggttgggtacccccctttctgggatgaagatcagcataaactgtatcagcagatcaaggcaggggcttatgacttcccctcacccgagtgggatactgttacgccggaggccaaaaaccttatcaaccagatgctcaccattaacccagctaaaagaataactgcacacgaagctttgaaacacccatgggtgtgccagagatctaccgtggcatcaatgatgcaccgacaggagacagtcgagtgtctcaagaagttcaatgcacgccggaaactgaagggcgctatacttactaccatgctcgccacgcggaacttcagcgctcgcaagcaggagattattaaaacgactgagcagctcattgaagcagtgaataatggggactttgaagcctacgccaagatctgcgatccagggctgacgtctttcgagcccgaagctctcggtaatctggtggaggggatggactttcacaggttctatttcgaaaatcttctggcaaaaaacagcaagcctatccacaccacgatcctaaacccccacgtgcatgtgataggagaagacgccgcttgtatcgcatatatccgtctgactcagtacattgatggtcagggacgtcctaggaccagccagtccgaagaaacgagggtttggcacaggagagatggtaagtggcaaaatgttcatttccactgctccggggccccagtggcgccgttacagtag

SEQ ID NO: 248027 - DNA, 1350 bp, Artificial Sequence
  derived and/or modified sequence
atggccaccaccgtgacctgcacccgcttcacagatgagtaccagctgtatgaggacatcggcaagggggccttctctgtggtgagaagatgtgtgaagctgtgcaccggccacgagtatgctgccaagatcatcaacaccaagaagctgagcgcccgggaccaccagaagctggagcgggaggcccgcatctgccgcctgctgaagcacagcaacatcgtgcggctgcatgacagcatcagcgaggagggcttccactacctggtgtttgacctggtgactggaggagagctgtttgaggacatcgtggcccgggagtactacagcgaggctgatgccagccactgcatccagcagatcctggaggccgtgctgcactgccaccagatgggcgtggtgcaccgggacctgaagccagagaacctgctgctggccagcaaatgtaaaggagctgctgtgaagctggccgactttggcctggccatcgaggtgcagggcgaccagcaggcctggtttggatttgctggcaccccaggctacctgagccctgaggtgctgaggaaggaggcctacggcaagcctgtggacatctgggcctgtggggtcatcctgtacatcctgctggtgggctacccacccttctgggatgaggaccagcacaagctgtaccagcagatcaaggccggggcctatgacttccccagccctgagtgggacacagtgaccccagaggccaagaacctgatcaaccagatgctgaccatcaacccagccaagaggatcacagcccacgaggccctgaagcacccctgggtgtgccagaggagcacagtggcctccatgatgcaccggcaggagaccgtggagtgcctgaagaagttcaatgcccggaggaagctgaagggggccatcctgaccaccatgctggccaccaggaacttcagcgccaggaagcaggagatcatcaagaccacagagcagctgattgaagctgtgaacaacggggactttgaggcctatgccaagatctgtgaccccggcctgaccagctttgagcctgaggccctgggcaacctggtggagggcatggacttccaccgcttctactttgagaacctgctggccaagaacagcaagcccatccacaccaccatcctgaacccccacgtgcacgtgattggagaagatgctgcctgcatcgcctacatccggctgacccagtacattgatggccagggccggcccaggaccagccagagcgaggagaccagggtgtggcacagaagagatggcaagtggcagaatgtgcacttccactgcagcggggcccctgtggcccccctgcagtag

SEQ ID NO: 248028 - DNA, 1350 bp, Artificial Sequence
  derived and/or modified sequence
atggccaccaccgtgacctgcacccggttcaccgacgagtaccagctctatgaggatataggaaaaggagcctttagcgtcgtgagacgctgcgtcaaactttgcaccggtcacgagtacgccgcaaaaataatcaatactaaaaagttgtctgcaagggatcatcagaaattggagcgggaagctcggatttgcaggctgctgaagcacagtaacattgtaaggctccatgacagcatctcggaagaagggttccattatctcgtgtttgacctggttactggcggcgagctctttgaagacattgtcgcccgcgaatattactccgaagccgacgcttcccattgtattcaacagattctcgaggctgtgctgcactgccaccagatgggagtcgtccaccgggatttaaagccggagaatctcctactggcttcaaaatgtaagggcgctgcagtgaagctagcggattttggactcgccattgaggtgcaaggtgaccagcaggcctggttcgggtttgctgggactccgggttatcttagcccagaagttttaaggaaggaggcctacggcaagcccgttgacatctgggcctgtggcgtgatactatacatcctgctggtcggttatccacctttttgggacgaagatcaacacaagttgtatcagcagattaaagctggagcctacgactttccgagccccgagtgggacactgtgactcctgaggcaaagaatctcattaaccagatgctaaccatcaatccagccaagcgaatcaccgcacacgaggccctgaaacacccttgggtgtgccagaggtctacagtggcaagtatgatgcatcgccaggagaccgtcgagtgccttaagaagtttaatgctagaaggaagctcaaaggcgcgattttgaccacgatgctggctacaagaaacttcagtgctagaaagcaggagataattaaaacgaccgagcaattgatagaagccgtcaacaatggagattttgaggcatacgcaaagatttgtgatccaggattgacatcgtttgagcctgaagcgctgggaaatttggtagaaggcatggattttcatcgcttttatttcgaaaacttactggctaagaattccaagcctatccatacgactatcctgaaccctcatgtccatgtcatcggcgaggatgctgcgtgtatcgcctacattcgcctgacccagtacatcgatggccaggggcgtcctcgcacaagccagtccgaagagacacgggtgtggcatagaagagatggaaaatggcagaatgttcacttccattgctctggggcccccgtggcaccactgcagtag

SEQ ID NO: 248029 - DNA, 1350 bp, Artificial Sequence
  derived and/or modified sequence
atggccaccacagttacatgcactagattcaccgatgagtaccaattgtacgaggatatcggcaagggcgcattctctgtcgtacgtaggtgcgtgaagctgtgcaccggacacgaatatgcggcaaaaatcataaataccaagaagctgtccgcccgagatcatcagaaactcgagcgcgaggcacggatttgcagactgcttaaacatagcaatattgtaagactgcacgactccatttccgaggagggatttcactatctggtcttcgaccttgtcactggtggagagctctttgaagacattgtggctagagaatactactccgaagctgatgcatcccactgtattcagcagatcctcgaagccgttctgcattgccatcaaatgggcgtggtgcacagagacctgaagcccgaaaatttgttattagcctccaaatgcaaaggtgccgctgtgaaactagcggattttggcctggcaattgaggttcaaggggaccagcaggcgtggtttggttttgcaggtactccaggatacttgtcacccgaagtcctgcgcaaagaggcctatggcaagccagtggatatatgggcatgtggagtcattctgtatatcttgctcgtgggctaccctcctttctgggacgaagaccagcacaagctgtaccaacagatcaaagctggcgcatacgactttccctctcctgaatgggacactgttaccccagaggccaagaatctcataaatcagatgctgacaattaacccagctaaacggatcaccgcccacgaagcactaaagcacccttgggtttgtcaacgctcaactgttgcgagtatgatgcaccgtcaagagaccgtcgagtgcctaaaaaaattcaatgcccgtaggaagctcaagggggctatccttacaaccatgttggctactagaaatttcagcgccagaaaacaagaaatcattaagacaactgagcagttgatagaggcagtaaataacggtgactttgaagcgtacgcgaagatttgcgaccctggtcttacctcctttgaaccagaggcactaggaaaccttgtcgaggggatggatttccacagattttatttcgagaatctgttggccaagaatagcaaaccgatacacaccacaatcttaaaccctcacgtgcatgtcattggggaggacgcagcctgcatcgcatacatccggctgacacagtacattgatggtcagggcaggccaagaacttcccaaagtgaggaaactcgggtttggcatagaagagatgggaaatggcagaacgtgcacttccattgctccggcgcacctgtcgccccacttcagtag

SEQ ID NO: 248030 - DNA, 1448 bp, Artificial Sequence
  derived and/or modified sequence
gccatggccaccacggtgacctgcacccgcttcaccgacgagtaccagctctacgaggatattggcaagggggctttctctgtggtccgacgctgtgtcaagctctgcaccggccatgagtatgcagccaagatcatcaacaccaagaagctgtcagccagagatcaccagaagctggagagagaggctcggatctgccgccttctgaagcattccaacatcgtgcgtctccacgacagcatctccgaggagggcttccactacctggtcttcgatctggtcactggtggggagctctttgaagacattgtggcgagagagtactacagcgaggctgatgccagtcactgtatccagcagatcctggaggccgttctccattgtcaccaaatgggggtcgtccacagagacctcaagccggagaacctgcttctggccagcaagtgcaaaggggctgcagtgaagctggcagacttcggcctagctatcgaggtgcagggggaccagcaggcatggtttggtttcgctggcacaccaggctacctgtcccctgaggtccttcgcaaagaggcgtatggcaagcctgtggacatctgggcatgtggggtgatcctgtacatcctgctcgtgggctacccacccttctgggacgaggaccagcacaagctgtaccagcagatcaaggctggtgcctatgacttcccgtcccctgagtgggacaccgtcactcctgaagccaaaaacctcatcaaccagatgctgaccatcaaccctgccaagcgcatcacagcccatgaggccctgaagcacccgtgggtctgccaacgctccacggtagcatccatgatgcacagacaggagactgtggagtgtctgaaaaagttcaatgccaggagaaagctcaagggagccatcctcaccaccatgctggccacacggaatttctcagcccggaagcaggagatcattaagaccacggagcagctcatcgaggccgtcaacaacggtgactttgaggcctacgcgaaaatctgtgacccagggctgacctcgtttgagcctgaagcactgggcaacctggttgaagggatggacttccacagattctacttcgagaacctgctggccaagaacagcaagccgatccacacgaccatcctgaacccacacgtgcacgtcattggagaggatgccgcctgcatcgcttacatccggctcacgcagtacattgacgggcagggccggccccgcaccagccagtctgaggagacccgcgtgtggcaccgccgcgacggcaagtggcagaacgtgcacttccactgctcgggcgcgcctgtggccccgctgcagtgaagagctgcgccctggtttcgccggacagagttggtgtttggagcccgactgccctcgggcacacggcctgcctgtcgcatgtttgtgtctgcctc

SEQ ID NO: 248031 - DNA, 1350 bp, Artificial Sequence
  derived and/or modified sequence
atggccaccaccgtgacctgcaccagattcaccgacgagtaccagctgtacgaggacatcggcaagggcgccttcagcgtggtgagaagatgcgtgaagctgtgcaccggccacgagtacgccgccaagatcatcaacaccaagaagctgagcgccagagaccaccagaagctggagagagaggccagaatctgcagactgctgaagcacagcaacatcgtgagactgcacgacagcatcagcgaggagggcttccactacctggtgttcgacctggtgaccggcggcgagctgttcgaggacatcgtggccagagagtactacagcgaggccgacgccagccactgcatccagcagatcctggaggccgtgctgcactgccaccagatgggcgtggtgcacagagacctgaagcccgagaacctgctgctggccagcaagtgcaagggcgccgccgtgaagctggccgacttcggcctggccatcgaggtgcagggcgaccagcaggcctggttcggcttcgccggcacccccggctacctgagccccgaggtgctgagaaaggaggcctacggcaagcccgtggacatctgggcctgcggcgtgatcctgtacatcctgctggtgggctacccccccttctgggacgaggaccagcacaagctgtaccagcagatcaaggccggcgcctacgacttccccagccccgagtgggacaccgtgacccccgaggccaagaacctgatcaaccagatgctgaccatcaaccccgccaagagaatcaccgcccacgaggccctgaagcacccctgggtgtgccagagaagcaccgtggccagcatgatgcacagacaggagaccgtggagtgcctgaagaagttcaacgccagaagaaagctgaagggcgccatcctgaccaccatgctggccaccagaaacttcagcgccagaaagcaggagatcatcaagaccaccgagcagctgatcgaggccgtgaacaacggcgacttcgaggcctacgccaagatctgcgaccccggcctgaccagcttcgagcccgaggccctgggcaacctggtggagggcatggacttccacagattctacttcgagaacctgctggccaagaacagcaagcccatccacaccaccatcctgaacccccacgtgcacgtgatcggcgaggacgccgcctgcatcgcctacatcagactgacccagtacatcgacggccagggcagacccagaaccagccagagcgaggagaccagagtgtggcacagaagagacggcaagtggcagaacgtgcacttccactgcagcggcgcccccgtggcccccctgcagtag

SEQ ID NO: 248032 - protein, 234 aa, Artificial Sequence
  derived and/or modified sequence
MPASSPFLLAPKGPPGNMGGPVREPALSVALWLSWGAALGAVACAMALLTQQTELQSLRREVSRLQGTGGPSQNGEGYPWQSLPEQSSDALEAWENGERSRKRRAVLTQKQKNDSDVTEVMWQPALRRGRGLQAQGYGVRIQDAGVYLLYSQVLFQDVTFTMGQVVSREGQGRQETLFRCIRSMPSHPDRAYNSCYSAGVFHLHQGDILSVIIPRARAKLNLSPHGTFLGFVKL

SEQ ID NO: 248033 - DNA, 705 bp, Artificial Sequence
  derived and/or modified sequence
atgcccgcatcctcacccttcttactagcacccaagggcccaccaggaaatatggggggtccagttcgtgagcccgcactcagcgtcgccttatggctgtcctggggtgcggcattgggcgcagtcgcgtgcgcgatggccttgctcacccagcagaccgagctccagagcctccgtagggaggtctcgcgcctgcaggggacagggggtccttcacagaacggggaaggttatccttggcagagcctccccgaacagagcagcgacgctcttgaggcttgggaaaatggtgaacgaagccgtaaaaggagggcggtccttactcagaagcagaaaaatgactctgatgtcacggaagttatgtggcagccagccttgcgcagaggcaggggcctgcaagcccagggctacggtgtgcgcatccaggacgctggggtatatctcctgtactcgcaggtactattccaagacgtgacattcacaatgggccaggtagtgtctagggaaggtcagggcagacaggaaaccctgttcagatgtattagatccatgccctctcatcctgatcgcgcatacaattcctgttactccgccggtgtcttccatttgcaccagggtgacatcctttctgtaatcatccctcgggcacgagcaaagcttaatctatctcctcacgggacattcctggggtttgtgaaactgtag

SEQ ID NO: 248034 - DNA, 705 bp, Artificial Sequence
  derived and/or modified sequence
atgcctgctagctcaccatttctactcgcacccaaggggccacccggtaatatggggggacctgtgagggaacccgccctcagcgtcgccctgtggctctcttggggggctgcattaggagcagtggcttgtgctatggccctgttaacacagcagaccgaactgcaatccctcaggcgagaagtctctagactacaaggaaccggcggacctagccaaaacggcgaaggctacccctggcaatccctgcccgaacagtcgagcgatgccttagaggcatgggagaacggcgaacggagtaggaagaggagggcagttttgactcaaaagcagaaaaatgactccgacgtaaccgaagtgatgtggcagcccgctctcagaagaggtcggggcctgcaagcccaaggatacggcgtgcgaatccaggacgcgggggtttatttgctgtattctcaggtgctctttcaggatgtaacattcacgatggggcaggttgtcagccgggaaggtcagggcaggcaagagactctctttcggtgtatcagatctatgccctctcatccagatcgagcatataactcctgttacagtgcaggcgtgttccacctgcaccaaggcgatatcctatctgtgattatcccccgcgcacgcgcaaagctgaatttgagcccacatggtacattcctcgggtttgtaaaactttag

SEQ ID NO: 248035 - DNA, 705 bp, Artificial Sequence
  derived and/or modified sequence
atgccagcctcctcaccctttctgctggccccaaagggcccccctggtaatatgggaggaccagtgagagaacctgcattatccgtcgccctctggctgtcatggggagccgcactaggcgccgtggcctgcgcaatggccctcttgactcagcagactgaactgcaaagcttgagacgagaagtttccagactgcaggggacaggcggtcctagtcagaatggggagggttacccctggcagtcactgcccgaacagtctagtgacgccttggaagcgtgggagaacggagaaagatctcggaagcgccgagcagtcttgacccagaaacagaagaatgatagcgatgtgacagaagtgatgtggcagccagccctacgccgcggccggggtctgcaagcacaggggtatggggttagaattcaggacgcgggtgtttacttgctgtactctcaggtgctttttcaggacgttactttcacaatgggccaagttgtgtctcgcgagggccaaggaagacaagagactctcttccgctgcattcgctctatgccctctcatcccgatagagcctacaactcttgctacagcgctggggttttccatctccaccagggcgacattctttccgtgataattccacgcgcacgcgccaaactcaatctctccccacatggcacctttctgggattcgtcaagctgtag

SEQ ID NO: 248036 - DNA, 705 bp, Artificial Sequence
  derived and/or modified sequence
atgcccgccagcagccccttcctgctggcccccaagggcccccccggcaacatgggcggccccgtgagagagcccgccctgagcgtggccctgtggctgagctggggcgccgccctgggcgccgtggcctgcgccatggccctgctgacccagcagaccgagctgcagagcctgagaagagaggtgagcagactgcagggcaccggcggccccagccagaacggcgagggctacccctggcagagcctgcccgagcagagcagcgacgccctggaggcctgggagaacggcgagagaagcagaaagagaagagccgtgctgacccagaagcagaagaacgacagcgacgtgaccgaggtgatgtggcagcccgccctgagaagaggcagaggcctgcaggcccagggctacggcgtgagaatccaggacgccggcgtgtacctgctgtacagccaggtgctgttccaggacgtgaccttcaccatgggccaggtggtgagcagagagggccagggcagacaggagaccctgttcagatgcatcagaagcatgcccagccaccccgacagagcctacaacagctgctacagcgccggcgtgttccacctgcaccagggcgacatcctgagcgtgatcatccccagagccagagccaagctgaacctgagcccccacggcaccttcctgggcttcgtgaagctgtag

SEQ ID NO: 248037 - DNA, 705 bp, Artificial Sequence
  derived and/or modified sequence
atgcctgccagttcgccattcctactggcgccaaaaggccccccgggaaacatgggtggcccggttagagaaccagccctaagcgtggccctgtggctgtcctggggagccgctctgggggccgtggcctgtgctatggccctgttgacccaacaaaccgagctgcagagccttaggagagaggtgagtaggttgcaaggaaccggcggcccttctcaaaacggagagggatacccctggcaatcacttccagagcagtcttctgatgctttggaggcctgggaaaatggggagcgttcacggaaaagaagagccgtcctaacacaaaagcaaaaaaacgattccgacgttaccgaggtgatgtggcagcctgctttgcggagaggacgagggctccaggcgcaagggtatggcgtacgaatccaggatgcgggggtgtacctgctttactcccaggtcctgttccaggatgttacattcacaatgggccaggtggtaagcagagagggacagggcagacaggaaactctgtttcgctgcattagaagcatgcccagtcatcctgaccgtgcttacaactcctgttactccgcgggggtgtttcatctgcatcagggtgatatcctgtcagtgataatcccccgggcccgagctaagcttaatctcagcccccacggtactttccttggcttcgtgaaactgtag

SEQ ID NO: 248038 - DNA, 2036 bp, Artificial Sequence
  derived and/or modified sequence
agaactcagccagtttcttgcttccgtgcccctggttctcctccccatcgagcccacccctcctttcccaccttcagtcacccctagtgaactgccccagcgatctctgctgtgcttgaccccgagggtcttccaccctcgccctgaccctggacactgcccagcttggccccccatcctgctcctggcacaatgccctctagccagccaaccttccctcccccaaccctggggccgccccagggttcctgcgcactgcctgttcctcctgggtgtcactggcagccctgtccttcctagagggactggaacctaattctcctgaggctgagggagggtggagggtctcaaggcaacgctggccccacgacggagtgccaggagcactaacagtacccttagcttgctttcctcctccctcctttttattttcaagttcctttttatttctccttgcgtaacaaccttcttcccttctgcaccactgcccgtacccttacccgccccgccacctccttgctaccccactcttgaaaccacagctgttggcagggtccccagctcatgccagcctcatctcctttcttgctagcccccaaagggcctccaggcaacatggggggcccagtcagagagccggcactctcagttgccctctggttgagttggggggcagctctgggggccgtggcttgtgccatggctctgctgacccaacaaacagagctgcagagcctcaggagagaggtgagccggctgcaggggacaggaggcccctcccagaatggggaagggtatccctggcagagtctcccggagcagagttccgatgccctggaagcctgggagaatggggagagatcccggaaaaggagagcagtgctcacccaaaaacagaagaatgactccgatgtgacagaggtgatgtggcaaccagctcttaggcgtgggagaggcctacaggcccaaggatatggtgtccgaatccaggatgctggagtttatctgctgtatagccaggtcctgtttcaagacgtgactttcaccatgggtcaggtggtgtctcgagaaggccaaggaaggcaggagactctattccgatgtataagaagtatgccctcccacccggaccgggcctacaacagctgctatagcgcaggtgtcttccatttacaccaaggggatattctgagtgtcataattccccgggcaagggcgaaacttaacctctctccacatggaaccttcctggggtttgtgaaactgtgattgtgttataaaaagtggctcccagcttggaagaccagggtgggtacatactggagacagccaagagctgagtatataaaggagagggaatgtgcaggaacagaggcgtcttcctgggtttggctccccgttcctcacttttcccttttcattcccaccccctagactttgattttacggatatcttgcttctgttccccatggagctccgaattcttgcgtgtgtgtagatgaggggcgggggacgggcgccaggcattgtccagacctggtcggggcccactggaagcatccagaacagcaccaccatctagcggccgctcgagggaagcacccgccggttggccgaagtccacgaagccgccctctgctagggaaaacccctggttctccatgccacacctctctccaggtgccctctgcctcttcaccccacaagaagccttatcctacgtccttctctccatctatcggaccccagtttccatcactatctccagagatgtagctattatgcgcccgtctacagggggtgcccgacgatgacggtgccttcgcagtcaaattactcttcgggtcccaaggtttggctttcacgcgctccattgccccggcgtggcaggccattccaagcccttccgggctggaactggtgtcggaggagcctcgggtgtatcgtacgccctggtgttggtgttgcctcactcctctgagctcttctttctgatcaagccctgcttaaagttaaataaaatagaatgaatgat

SEQ ID NO: 248039 - DNA, 705 bp, Artificial Sequence
  derived and/or modified sequence
atgcctgccagcagccccttcctgctggcccccaagggccccccaggcaacatgggcggccctgtgcgggagcccgccctgtctgtggccctgtggctgtcctggggcgccgccctgggcgctgtggcctgtgccatggccctgctgacccagcagacagagctgcagagcctgcggcgggaggtgtcccggctgcagggcaccggcggccccagccagaatggagagggctacccctggcagagcctgcctgagcagagcagtgatgccctggaggcctgggagaatggagagaggagcaggaagagaagagctgtgctgacccagaagcagaagaatgacagtgatgtgacagaggtgatgtggcagcctgccctgcggcggggccggggcctgcaggcccagggctatggagtgcgcatccaggatgctggggtgtacctgctgtacagccaggtgctcttccaggatgtgaccttcaccatgggccaggtggtgtcccgggagggccagggccggcaggagaccctcttccgctgcatccgctccatgcccagccacccagaccgggcctacaacagctgctacagcgctggggtcttccacctgcaccagggcgacatcctgagcgtcatcatcccccgggcccgggccaagctgaacctgagcccccacggcaccttcctgggctttgtgaagctgtag

SEQ ID NO: 248040 - DNA, 705 bp, Artificial Sequence
  derived and/or modified sequence
atgcccgccagcagccccttcctgctggcccccaagggcccccccggcaatatgggtggacccgtcagggagccagcacttagcgtcgctctgtggcttagctggggcgccgctctcggggccgtggcttgtgccatggccctgctgacccagcagactgagttgcagagcctgagacgggaagtatccagactgcaaggcacggggggccctagtcagaatggggagggatatccgtggcaaagcctgccggagcagagttcagacgccctagaggcctgggagaatggagaaagatcacggaagcggcgggccgtgcttacccagaaacagaagaacgactctgacgtcacagaggttatgtggcagcctgctcttaggcgggggcggggcctgcaggcccagggttatggggtgagaattcaggatgcaggggtttaccttctatattcgcaggttctcttccaagacgtgacctttacaatgggccaggtggtttctcgggagggacagggtcgacaggaaaccctgtttcgctgcatacgctccatgccttcgcatcccgaccgcgcctataattcctgctattctgctggggtttttcacctgcaccagggcgatattctcagcgtaatcattccccgcgctagagctaaactgaacctcagcccacatggtaccttcctaggctttgtaaagctgtag

SEQ ID NO: 248041 - RNA, 705 nt, Artificial Sequence
  derived and/or modified sequence
augccugcuagcucaccauuucuacucgcacccaaggggccacccgguaauauggggggaccugugagggaacccgcccucagcgucgcccuguggcucucuuggggggcugcauuaggagcaguggcuugugcuauggcccuguuaacacagcagaccgaacugcaaucccucaggcgagaagucucuagacuacaaggaaccggcggaccuagccaaaacggcgaaggcuaccccuggcaaucccugcccgaacagucgagcgaugccuuagaggcaugggagaacggcgaacggaguaggaagaggagggcaguuuugacucaaaagcagaaaaaugacuccgacguaaccgaagugauguggcagcccgcucucagaagaggucggggccugcaagcccaaggauacggcgugcgaauccaggacgcggggguuuauuugcuguauucucaggugcucuuucaggauguaacauucacgauggggcagguugucagccgggaaggucagggcaggcaagagacucucuuucgguguaucagaucuaugcccucucauccagaucgagcauauaacuccuguuacagugcaggcguguuccaccugcaccaaggcgauauccuaucugugauuaucccccgcgcacgcgcaaagcugaauuugagcccacaugguacauuccucggguuuguaaaacuuuag

SEQ ID NO: 248042 - RNA, 705 nt, Artificial Sequence
  derived and/or modified sequence
augccagccuccucacccuuucugcuggccccaaagggccccccugguaauaugggaggaccagugagagaaccugcauuauccgucgcccucuggcugucauggggagccgcacuaggcgccguggccugcgcaauggcccucuugacucagcagacugaacugcaaagcuugagacgagaaguuuccagacugcaggggacaggcgguccuagucagaauggggaggguuaccccuggcagucacugcccgaacagucuagugacgccuuggaagcgugggagaacggagaaagaucucggaagcgccgagcagucuugacccagaaacagaagaaugauagcgaugugacagaagugauguggcagccagcccuacgccgcggccggggucugcaagcacagggguaugggguuagaauucaggacgcggguguuuacuugcuguacucucaggugcuuuuucaggacguuacuuucacaaugggccaaguugugucucgcgagggccaaggaagacaagagacucucuuccgcugcauucgcucuaugcccucucaucccgauagagccuacaacucuugcuacagcgcugggguuuuccaucuccaccagggcgacauucuuuccgugauaauuccacgcgcacgcgccaaacucaaucucuccccacauggcaccuuucugggauucgucaagcuguag

SEQ ID NO: 248043 - protein, 247 aa, Artificial Sequence
  derived and/or modified sequence
MPASSPFLLAPKGPPGNMGGPVREPALSVALWLSWGAALGAVACAMALLTQQTELQSLRREVSRLQGTGGPSQNGEGYPWQSLPEQSSDALEAWENGERSRKRRAVLTQKQKKQHSVLHLVPINATSKDDSDVTEVMWQPALRRGRGLQAQGYGVRIQDAGVYLLYSQVLFQDVTFTMGQVVSREGQGRQETLFRCIRSMPSHPDRAYNSCYSAGVFHLHQGDILSVIIPRARAKLNLSPHGTFLGL

SEQ ID NO: 248044 - DNA, 1593 bp, Artificial Sequence
  derived and/or modified sequence
cctaattctcctgaggctgagggagggtggagggtctcaaggcaacgctggccccacgacggagtgccaggagcactaacagtacccttagcttgctttcctcctccctcctttttattttcaagttcctttttatttctccttgcgtaacaaccttcttcccttctgcaccactgcccgtacccttacccgccccgccacctccttgctaccccactcttgaaaccacagctgttggcagggtccccagctcatgccagcctcatctcctttcttgctagcccccaaagggcctccaggcaacatggggggcccagtcagagagccggcactctcagttgccctctggttgagttggggggcagctctgggggccgtggcttgtgccatggctctgctgacccaacaaacagagctgcagagcctcaggagagaggtgagccggctgcaggggacaggaggcccctcccagaatggggaagggtatccctggcagagtctcccggagcagagttccgatgccctggaagcctgggagaatggggagagatcccggaaaaggagagcagtgctcacccaaaaacagaagaagcagcactctgtcctgcacctggttcccattaacgccacctccaaggatgactccgatgtgacagaggtgatgtggcaaccagctcttaggcgtgggagaggcctacaggcccaaggatatggtgtccgaatccaggatgctggagtttatctgctgtatagccaggtcctgtttcaagacgtgactttcaccatgggtcaggtggtgtctcgagaaggccaaggaaggcaggagactctattccgatgtataagaagtatgccctcccacccggaccgggcctacaacagctgctatagcgcaggtgtcttccatttacaccaaggggatattctgagtgtcataattccccgggcaagggcgaaacttaacctctctccacatggaaccttcctgggactttgattttacggatatcttgcttctgttccccatggagctccgaattcttgcgtgtgtgtagatgaggggcgggggacgggcgccaggcattgtccagacctggtcggggcccactggaagcatccagaacagcaccaccatctagcggccgctcgagggaagcacccgccggttggccgaagtccacgaagccgccctctgctagggaaaacccctggttctccatgccacacctctctccaggtgccctctgcctcttcaccccacaagaagccttatcctacgtccttctctccatctatcggaccccagtttccatcactatctccagagatgtagctattatgcgcccgtctacagggggtgcccgacgatgacggtgccttcgcagtcaaattactcttcgggtcccaaggtttggctttcacgcgctccattgccccggcgtggcaggccattccaagcccttccgggctggaactggtgtcggaggagcctcgggtgtatcgtacgccctggtgttggtgttgcctcactcctctgagctcttctttctgatcaagccctgcttaaagttaaataaaatagaatgaatgata

SEQ ID NO: 248045 - DNA, 744 bp, Artificial Sequence
  derived and/or modified sequence
atgcccgcatctagcccatttctcctcgctcctaaagggcctcctggaaatatggggggtcctgttagggaaccagctctgagtgtcgccctgtggttaagctggggcgctgcgctcggcgcagtcgcctgcgctatggccctactgacccaacagacggaattacaatcactgcgccgagaggtgagcaggctgcagggcacgggaggtccttctcaaaacggcgaaggatatccctggcagtccctgcccgaacagtcgtcagatgcactcgaagcttgggagaacggcgaacgcagcaggaagcgaagagccgtcttaacccagaaacagaaaaaacagcactccgttcttcacttggtgcctattaacgcaaccagcaaggatgacagtgacgtcacggaggtgatgtggcagccagcgctcagaagggggcgtgggctgcaagctcagggctatggcgttagaatccaggacgccggtgtgtacctcctgtatagccaggtgctgttccaggacgtaacctttaccatgggccaggtcgtgagccgagagggccagggacggcaagagaccctgtttaggtgcatacgcagcatgccctcacacccagacagagcctataactcgtgctatagtgccggagtgttccatcttcaccagggcgacatattgagcgtgattatccctagagcccgagcaaagctgaatctgtcaccccacgggacatttctgggcctttag

SEQ ID NO: 248046 - DNA, 744 bp, Artificial Sequence
  derived and/or modified sequence
atgcctgcctctagcccattcctacttgctccaaaaggacctcccgggaacatgggtgggccagtgcgcgaacctgcattgagtgtagcgctttggctttcctggggagccgccttgggggccgtggcatgcgcaatggccttactaactcaacaaacagagctccagagtctgcgaagagaggtgagtcggctacagggaactggcgggccctcacagaacggagagggctatccctggcaatccttacccgagcagagcagcgacgctctcgaagcctgggagaacggtgaaagatctcgcaaacgtcgtgctgtcctgacccaaaagcagaagaaacaacactccgtccttcaccttgtgcccatcaatgcgacctccaaagacgatagcgacgtcaccgaagtgatgtggcagcccgcactccgacgcggtagggggctgcaggcccagggttatggagttcggatccaggatgctggagtttatctgttatattcacaggtgttgtttcaagacgtgactttcacgatgggacaagttgtttccagagaaggccaaggacggcaggaaacgctgttccgctgtattcgaagcatgccatcacatcccgatcgcgcctataactcctgttactcagcaggagtgtttcatttacaccaaggagacattctatcagtgattatcccgcgggccagagcaaagttaaatctgtctccacacgggactttcctgggcctgtag

SEQ ID NO: 248047 - DNA, 744 bp, Artificial Sequence
  derived and/or modified sequence
atgcctgcctctagcccattcctacttgctccaaaaggacctcccgggaacatgggtgggccagtgcgcgaacctgcattgagtgtagcgctttggctttcctggggagccgccttgggggccgtggcatgcgcaatggccttactaactcaacaaacagagctccagagtctgcgaagagaggtgagtcggctacagggaactggcgggccctcacagaacggagagggctatccctggcaatccttacccgagcagagcagcgacgctctcgaagcctgggagaacggtgaaagatctcggaaaagacgggctgtgttaacacagaaacagaagaaacagcattcagttctgcacctcgtaccaattaacgccaccagtaaggatgacagtgacgtaaccgaagtgatgtggcaacccgcgctgagaagaggtagaggattacaggcccagggatatggcgtaagaattcaggacgctggagtgtaccttttatactctcaagtcctatttcaggacgtgaccttcacaatgggacaggttgtctcaagggagggtcagggtagacaggagacacttttcagatgtatccggagcatgccatcacacccagaccgggcttacaactcatgttacagcgcaggcgtctttcacctacaccaaggagatattctatccgtcatcatcccacgcgcaagggcaaaattgaacttgtccccgcacggaaccttcttagggctctag

SEQ ID NO: 248048 - DNA, 744 bp, Artificial Sequence
  derived and/or modified sequence
atgcccgccagcagccccttcctgctggcccccaagggcccccccggcaacatgggcggccccgtgagagagcccgccctgagcgtggccctgtggctgagctggggcgccgccctgggcgccgtggcctgcgccatggccctgctgacccagcagaccgagctgcagagcctgagaagagaggtgagcagactgcagggcaccggcggccccagccagaacggcgagggctacccctggcagagcctgcccgagcagagcagcgacgccctggaggcctgggagaacggcgagagaagcagaaagagaagagccgtgctgacccagaagcagaagaagcagcacagcgtgctgcacctggtgcccatcaacgccaccagcaaggacgacagcgacgtgaccgaggtgatgtggcagcccgccctgagaagaggcagaggcctgcaggcccagggctacggcgtgagaatccaggacgccggcgtgtacctgctgtacagccaggtgctgttccaggacgtgaccttcaccatgggccaggtggtgagcagagagggccagggcagacaggagaccctgttcagatgcatcagaagcatgcccagccaccccgacagagcctacaacagctgctacagcgccggcgtgttccacctgcaccagggcgacatcctgagcgtgatcatccccagagccagagccaagctgaacctgagcccccacggcaccttcctgggcctgtag

SEQ ID NO: 248049 - DNA, 744 bp, Artificial Sequence
  derived and/or modified sequence
atgccagctagctccccgtttctgctcgctcccaagggaccaccagggaacatgggggggccagtcagggaacctgcactctccgttgctctctggctgagctggggcgcagctttgggcgctgtcgcctgcgcgatggcactgttgacccagcagaccgaactgcagtcattgagacgggaggtatctcgtcttcagggcaccggggggccctcccagaatggggagggctatccctggcagtctctgcctgaacaaagtagcgatgccctggaggcatgggagaacggggaaaggtctcgcaagcggagggctgtactgactcagaagcagaagaagcaacactccgtactacatctggtgcccatcaacgccacttcgaaagatgactccgatgtaacagaagttatgtggcagccagcactgaggcgcggaagagggctccaggcacagggatacggagtacgcatacaagatgcaggagtgtacctgctgtattctcaagtcctgttccaggacgtgacctttacaatgggacaggtggttagtcgcgaagggcaggggcgacaagagaccctgttcaggtgcatccgctccatgccgtcccacccagatagggcttataattcatgttattccgcaggcgtattccacctgcaccagggcgatattctgtcggtcattattccaagagccagggccaaactaaacctgtccccccacggaacattcctgggattgtag

SEQ ID NO: 248050 - DNA, 744 bp, Artificial Sequence
  derived and/or modified sequence
atgcctgccagcagccccttcctgctggcccccaagggccccccaggcaacatgggcggccctgtgcgggagcccgccctgtctgtggccctgtggctgtcctggggcgccgccctgggcgctgtggcctgtgccatggccctgctgacccagcagacagagctgcagagcctgcggcgggaggtgtcccggctgcagggcaccggcggccccagccagaatggagagggctacccctggcagagcctgcctgagcagagcagtgatgccctggaggcctgggagaatggagagaggagcaggaagagaagagctgtgctgacccagaagcagaagaagcagcacagcgtgctgcacctggtgcccatcaatgccaccagcaaggatgacagtgatgtgacagaggtgatgtggcagcctgccctgcggcggggccggggcctgcaggcccagggctatggagtgcgcatccaggatgctggggtgtacctgctgtacagccaggtgctcttccaggatgtgaccttcaccatgggccaggtggtgtcccgggagggccagggccggcaggagaccctcttccgctgcatccgctccatgcccagccacccagaccgggcctacaacagctgctacagcgctggggtcttccacctgcaccagggcgacatcctgagcgtcatcatcccccgggcccgggccaagctgaacctgagcccccacggcaccttcctgggcctgtag

SEQ ID NO: 248051 - DNA, 744 bp, Artificial Sequence
  derived and/or modified sequence
atgcccgccagcagccccttcctgctggcccccaagggcccccccggcaatatgggtggccctgtccgggaaccagctttgagtgtggccctctggctgtcttggggcgccgcccttggagcggttgcatgtgccatggctctgctgacgcagcagactgaactgcagtccctaagaagagaggtttcaaggttgcaaggcaccggtggccccagtcagaacggtgagggctatccatggcagtcgttaccagaacagtcgagtgatgcccttgaagcatgggagaacggggagcggagcagaaaacgccgagccgtcctgactcagaagcagaaaaaacagcacagtgtcctgcacctggtgcctatcaacgccacatcaaaggacgactctgatgttaccgaagtaatgtggcagcctgccttgagaagaggtcggggcctgcaggcacaaggctacggcgttagaatccaggatgccggtgtgtatctcctgtacagtcaggtcctttttcaggatgtcaccttcacgatgggccaagtcgtctcaagagaaggtcaggggaggcaggagactctgttccgctgcatccgaagcatgcctagccacccagatcgggcctacaattcgtgctacagcgccggcgttttccatctacaccagggcgacatcctatccgtgataatacccagggcaagagctaagctgaatctgtcccctcacggcacttttctcgggctgtag

SEQ ID NO: 248052 - RNA, 744 nt, Artificial Sequence
  derived and/or modified sequence
augccugccucuagcccauuccuacuugcuccaaaaggaccucccgggaacaugggugggccagugcgcgaaccugcauugaguguagcgcuuuggcuuuccuggggagccgccuugggggccguggcaugcgcaauggccuuacuaacucaacaaacagagcuccagagucugcgaagagaggugagucggcuacagggaacuggcgggcccucacagaacggagagggcuaucccuggcaauccuuacccgagcagagcagcgacgcucucgaagccugggagaacggugaaagaucucgcaaacgucgugcuguccugacccaaaagcagaagaaacaacacuccguccuucaccuugugcccaucaaugcgaccuccaaagacgauagcgacgucaccgaagugauguggcagcccgcacuccgacgcgguagggggcugcaggcccaggguuauggaguucggauccaggaugcuggaguuuaucuguuauauucacagguguuguuucaagacgugacuuucacgaugggacaaguuguuuccagagaaggccaaggacggcaggaaacgcuguuccgcuguauucgaagcaugccaucacaucccgaucgcgccuauaacuccuguuacucagcaggaguguuucauuuacaccaaggagacauucuaucagugauuaucccgcgggccagagcaaaguuaaaucugucuccacacgggacuuuccugggccuguag

SEQ ID NO: 248053 - RNA, 744 nt, Artificial Sequence
  derived and/or modified sequence
augccugccucuagcccauuccuacuugcuccaaaaggaccucccgggaacaugggugggccagugcgcgaaccugcauugaguguagcgcuuuggcuuuccuggggagccgccuugggggccguggcaugcgcaauggccuuacuaacucaacaaacagagcuccagagucugcgaagagaggugagucggcuacagggaacuggcgggcccucacagaacggagagggcuaucccuggcaauccuuacccgagcagagcagcgacgcucucgaagccugggagaacggugaaagaucucggaaaagacgggcuguguuaacacagaaacagaagaaacagcauucaguucugcaccucguaccaauuaacgccaccaguaaggaugacagugacguaaccgaagugauguggcaacccgcgcugagaagagguagaggauuacaggcccagggauauggcguaagaauucaggacgcuggaguguaccuuuuauacucucaaguccuauuucaggacgugaccuucacaaugggacagguugucucaagggagggucaggguagacaggagacacuuuucagauguauccggagcaugccaucacacccagaccgggcuuacaacucauguuacagcgcaggcgucuuucaccuacaccaaggagauauucuauccgucaucaucccacgcgcaagggcaaaauugaacuuguccccgcacggaaccuucuuagggcucuag

SEQ ID NO: 248054 - protein, 330 aa, Artificial Sequence
  derived and/or modified sequence
MAARRSQRRRGRRGEPGTALLVPLALGLGLALACLGLLLAVVSLGSRASLSAQEPAQEELVAEEDQDPSELNPQTEESQDPAPFLNRLVRPRRSAPKGRKTRARRAIAAHYEVHPRPGQDGAQAGVDGTVSGWEEARINSSSPLRYNRQIGEFIVTRAGLYYLYCQSSDALEAWENGERSRKRRAVLTQKQKKQHSVLHLVPINATSKDDSDVTEVMWQPALRRGRGLQAQGYGVRIQDAGVYLLYSQVLFQDVTFTMGQVVSREGQGRQETLFRCIRSMPSHPDRAYNSCYSAGVFHLHQGDILSVIIPRARAKLNLSPHGTFLGFVKL

SEQ ID NO: 248055 - DNA, 993 bp, Artificial Sequence
  derived and/or modified sequence
atggctgctcggaggtctcagcgcagacgcggtcgtcgcggagagccagggacagcactgttggtcccccttgctctcggactcggactagctctggcctgcctcggattgttgctggctgtcgtctctcttggttccagggcatccctctcagcgcaggagcctgcacaggaggagttagtggctgaagaggaccaggacccctctgaacttaatcctcagaccgaggagtcacaggatccggcacccttcttgaatagactggtgcgccctagacggtccgccccaaagggccgaaaaacccgggctaggagagctattgcagcccactatgaggtccacccccgtcctggacaagatggagcacaagctggagtcgacgggacagtgtccggttgggaagaggctagaataaattcatcatcacctctgcggtataacagacagataggagaattcatcgttacccgagccggattgtactatctatactgtcagtctagtgatgccttagaggcctgggagaacggcgagaggtcccgaaagcggagagccgttttaacgcagaagcagaaaaagcagcattctgtactgcatcttgtgcctatcaatgcgacctcgaaggacgacagcgacgttaccgaagtcatgtggcagccagcccttagaaggggtagaggtctgcaagcccagggctacggcgtgcgtattcaggacgcaggcgtgtacctcttgtactcccaagtactcttccaggatgtgaccttcactatggggcaggtggttagcagggaaggtcagggccgacaggaaaccctgtttcgttgtatacgctccatgccaagccaccccgatagggcctacaattcttgctatagcgctggggtctttcacctacatcagggcgacatcctcagtgtcattattccacgggctcgggctaaattgaacttgtccccccacggaacattcctggggttcgtgaaattgtag

SEQ ID NO: 248056 - DNA, 993 bp, Artificial Sequence
  derived and/or modified sequence
atggctgcccgcagaagccagaggagaaggggccgacggggtgagccgggaaccgccctgctcgtgcctctcgctttgggccttgggctggccctcgcttgcctggggctcctgctggccgttgtttcactgggctctagagcctcactgtctgctcaagagccagcccaagaagagcttgttgccgaggaggaccaggacccgtcagaactgaacccgcaaacagaagaaagtcaggatccagccccttttctgaatagactggtacgtccccgaagatctgctcccaaagggagaaaaactcgcgctcggagagcaatagccgcccattacgaagtccacccacgacctggtcaggatggtgctcaagcaggagtcgatggcaccgtgagcggttgggaagaagcacgaattaactcaagcagccctctacggtacaataggcagatcggtgaatttattgtgaccagagcaggactgtattacctttactgccagtcttcagacgctctagaggcctgggaaaacggcgagcgaagtaggaaaagaagagccgtcctgacccagaagcagaagaagcagcatagtgttcttcaccttgtccctattaacgccacaagcaaagacgactccgacgttacagaggtaatgtggcagccagccctccgtcgcggaagaggactgcaggctcagggctacggtgtgcggatccaggatgcaggtgtctatttgctttatagccaagtcctattccaggacgtgacattcacaatgggtcaggtagtgtcccgagagggccagggcagacaggagacgctcttccgctgcattagaagtatgcccagccaccctgaccgcgcgtacaacagctgttattcagccggggtgttccacctccaccaaggagatattctctcggtaatcatcccccgggcccgggccaaactcaacctgagccctcatgggacgttcctaggattcgtgaaactttag

SEQ ID NO: 248057 - DNA, 993 bp, Artificial Sequence
  derived and/or modified sequence
atggccgccaggcgttcccagcgcaggagaggcagacgcggcgagccgggcactgccctgctagtccccttagcgcttggccttggtcttgctctcgcgtgtttgggcctcctgctggcagtggtaagcctcgggtcacgtgccagcttgtcagctcaggaacctgcccaagaggaactggtggctgaagaggaccaagacccatcagagcttaaccctcagactgaggagtctcaggaccctgcgccctttttgaatagacttgtcagacccaggagaagtgcacccaaaggacggaaaactcgcgctcggagagcaatagccgcccattacgaagtccacccacgacctggtcaggatggtgctcaagcaggagtcgatggcaccgtgagcggttgggaagaagcacgaattaactcaagcagccctctacggtacaataggcagatcggtgaatttattgtgaccagagcaggactgtattacctttactgccagtcttcagacgctctagaggcctgggaaaacggcgagcgaagtaggaaaagaagagccgtcctgacccagaagcagaagaagcagcatagtgttcttcaccttgtccccattaacgctacgagtaaagacgatagtgacgtgaccgaagtgatgtggcagccagcattgcgacgtgggagaggattacaagcacaggggtacggagtccggatacaggacgctggcgtatacctgctctactcacaggtcttatttcaagacgtaacattcacaatgggccaggtagtgtcgagggagggacagggccggcaagagaccctgtttcggtgcataagatcaatgccctcccacccagaccgcgcctataattcttgttattctgccggggtgttccatcttcaccagggcgatattttaagcgtcatcatcccacgagcgcgggccaaactgaatcttagccctcacggaacttttctaggctttgttaaactgtag

SEQ ID NO: 248058 - DNA, 1816 bp, Artificial Sequence
  derived and/or modified sequence
atccctcgggtcccgggatgggggggcggtgaggcaggcacagccccccgcccccatggccgcccgtcggagccagaggcggagggggcgccggggggagccgggcaccgccctgctggtcccgctcgcgctgggcctgggcctggcgctggcctgcctcggcctcctgctggccgtggtcagtttggggagccgggcatcgctgtccgcccaggagcctgcccaggaggagctggtggcagaggaggaccaggacccgtcggaactgaatccccagacagaagaaagccaggatcctgcgcctttcctgaaccgactagttcggcctcgcagaagtgcacctaaaggccggaaaacacgggctcgaagagcgatcgcagcccattatgaagttcatccacgacctggacaggacggagcgcaggcaggtgtggacgggacagtgagtggctgggaggaagccagaatcaacagctccagccctctgcgctacaaccgccagatcggggagtttatagtcacccgggctgggctctactacctgtactgtcagagttccgatgccctggaagcctgggagaatggggagagatcccggaaaaggagagcagtgctcacccaaaaacagaagaagcagcactctgtcctgcacctggttcccattaacgccacctccaaggatgactccgatgtgacagaggtgatgtggcaaccagctcttaggcgtgggagaggcctacaggcccaaggatatggtgtccgaatccaggatgctggagtttatctgctgtatagccaggtcctgtttcaagacgtgactttcaccatgggtcaggtggtgtctcgagaaggccaaggaaggcaggagactctattccgatgtataagaagtatgccctcccacccggaccgggcctacaacagctgctatagcgcaggtgtcttccatttacaccaaggggatattctgagtgtcataattccccgggcaagggcgaaacttaacctctctccacatggaaccttcctggggtttgtgaaactgtgattgtgttataaaaagtggctcccagcttggaagaccagggtgggtacatactggagacagccaagagctgagtatataaaggagagggaatgtgcaggaacagaggcgtcttcctgggtttggctccccgttcctcacttttcccttttcattcccaccccctagactttgattttacggatatcttgcttctgttccccatggagctccgaattcttgcgtgtgtgtagatgaggggcgggggacgggcgccaggcattgtccagacctggtcggggcccactggaagcatccagaacagcaccaccatctagcggccgctcgagggaagcacccgccggttggccgaagtccacgaagccgccctctgctagggaaaacccctggttctccatgccacacctctctccaggtgccctctgcctcttcaccccacaagaagccttatcctacgtccttctctccatctatcggaccccagtttccatcactatctccagagatgtagctattatgcgcccgtctacagggggtgcccgacgatgacggtgccttcgcagtcaaattactcttcgggtcccaaggtttggctttcacgcgctccattgccccggcgtggcaggccattccaagcccttccgggctggaactggtgtcggaggagcctcgggtgtatcgtacgccctggtgttggtgttgcctcactcctctgagctcttctttctgatcaagccctgcttaaagttaaataaaatagaatgaatgata

SEQ ID NO: 248059 - DNA, 993 bp, Artificial Sequence
  derived and/or modified sequence
atggccgccagaagaagccagagaagaagaggcagaagaggcgagcccggcaccgccctgctggtgcccctggccctgggcctgggcctggccctggcctgcctgggcctgctgctggccgtggtgagcctgggcagcagagccagcctgagcgcccaggagcccgcccaggaggagctggtggccgaggaggaccaggaccccagcgagctgaacccccagaccgaggagagccaggaccccgcccccttcctgaacagactggtgagacccagaagaagcgcccccaagggcagaaagaccagagccagaagagccatcgccgcccactacgaggtgcaccccagacccggccaggacggcgcccaggccggcgtggacggcaccgtgagcggctgggaggaggccagaatcaacagcagcagccccctgagatacaacagacagatcggcgagttcatcgtgaccagagccggcctgtactacctgtactgccagagcagcgacgccctggaggcctgggagaacggcgagagaagcagaaagagaagagccgtgctgacccagaagcagaagaagcagcacagcgtgctgcacctggtgcccatcaacgccaccagcaaggacgacagcgacgtgaccgaggtgatgtggcagcccgccctgagaagaggcagaggcctgcaggcccagggctacggcgtgagaatccaggacgccggcgtgtacctgctgtacagccaggtgctgttccaggacgtgaccttcaccatgggccaggtggtgagcagagagggccagggcagacaggagaccctgttcagatgcatcagaagcatgcccagccaccccgacagagcctacaacagctgctacagcgccggcgtgttccacctgcaccagggcgacatcctgagcgtgatcatccccagagccagagccaagctgaacctgagcccccacggcaccttcctgggcttcgtgaagctgtag

SEQ ID NO: 248060 - DNA, 993 bp, Artificial Sequence
  derived and/or modified sequence
atggctgccagaaggtcccagaggaggagaggcaggagaggggaacccggaaccgccctgctggtgcctctggctctaggactgggcctggccttggcatgcttgggattacttttggcggttgtttcgctggggagccgggctagtcttagcgcccaggagccagcccaggaagaacttgtggccgaggaagaccaagatccgagtgaattgaaccctcagactgaggagtcacaggatcctgcaccattcctgaaccgccttgtccggccaagaaggagcgccccaaaaggccgtaagactagagcacgccgagccatcgcagcgcattacgaggttcaccccaggccgggccaggacggagctcaggccggtgtggatgggaccgtgtccggttgggaggaagcccgcatcaatagctcatctccactcaggtacaaccggcagatcggtgagttcatcgtcacacgggctggactctattacctgtattgccagtccagcgatgctcttgaggcgtgggaaaatggggagcgctctcggaagcgacgcgcagtgttgactcaaaaacaaaaaaagcagcactcagttctgcatctggtgcctatcaatgccactagcaaagacgactccgacgtgacggaggtaatgtggcagccggctcttcggagaggtcgtggccttcaagcccaggggtatggtgtgcgcatccaggacgccggcgtttatctattatattcccaagtgctttttcaggacgtcacgttcacgatgggccaagtagtctcaagagagggacagggacgccaggagactttgtttcgttgcattagaagtatgccctctcatccggacagggcatacaattcctgctactccgcgggagtgttccatcttcatcagggcgatatcctgagtgtcattattccccgtgcccgggccaagctgaacctttcaccacacggcacctttctggggtttgtcaaactgtag

SEQ ID NO: 248061 - DNA, 993 bp, Artificial Sequence
  derived and/or modified sequence
atggccgcccggcgcagccagaggagaagaggccggcggggggagcccggcacagccctgctggtgcccctggccctgggcctgggcctggccctggcctgcctgggcctgctgctggccgtggtgtccctgggcagccgggccagcctgagcgcccaggagcccgcccaggaggagctggtggccgaggaggaccaggaccccagcgagctgaacccccagacagaggagagccaggaccctgcccccttcctgaaccggctggtgcggccccggcgcagcgcccccaagggcaggaagacccgggcccggcgggccatcgccgcccactatgaggtgcaccccaggcctggccaggatggagcccaggccggcgtggatggcaccgtgtctggctgggaggaggcccgcatcaacagcagcagccccctgcgctacaaccggcagatcggggagttcatcgtgacccgggccggcctgtactacctgtactgccagagcagtgatgccctggaggcctgggagaatggagagaggagcaggaagagaagagctgtgctgacccagaagcagaagaagcagcacagcgtgctgcacctggtgcccatcaatgccaccagcaaggatgacagtgatgtgacagaggtgatgtggcagcctgccctgcggcggggccggggcctgcaggcccagggctatggagtgcgcatccaggatgctggggtgtacctgctgtacagccaggtgctcttccaggatgtgaccttcaccatgggccaggtggtgtcccgggagggccagggccggcaggagaccctcttccgctgcatccgctccatgcccagccacccagaccgggcctacaacagctgctacagcgctggggtcttccacctgcaccagggcgacatcctgagcgtcatcatcccccgggcccgggccaagctgaacctgagcccccacggcaccttcctgggctttgtgaagctgtag

SEQ ID NO: 248062 - DNA, 993 bp, Artificial Sequence
  derived and/or modified sequence
atggccgcccggcggagccagcggcggcggggccggcggggcgagcctggtacggcacttcttgtccctcttgccttaggactggggttagcactcgcgtgtctcggactgctgctggccgtggtgtctctgggatcccgagcttcgctttctgcccaggaacccgctcaggaagagttggtcgctgaagaggaccaggacccatctgaattgaatcctcagactgaagagtctcaggaccctgcaccatttcttaaccgactggttcgcccgagacgctccgcccccaaaggacggaaaacgcgcgcacgcagagccattgctgcccactacgaagtgcacccacgccccggccaggacggcgcccaggcaggtgtggacggaacagtgtcaggctgggaggaagcacgcattaacagcagtagcccgttgcgatacaatcgacagattggtgagttcattgtaacacgagcagggctctattacctctattgccagtcctcagatgccctggaagcctgggagaacggcgaaagaagccggaagcgtcgagcagtgctcactcagaagcagaagaagcagcacagtgtcctgcatctggtcccaatcaatgctaccagtaaagacgactctgacgtgacagaggttatgtggcagccagccctacggcggggccgtggacttcaagctcagggctatggtgtcaggatccaagacgctggcgtgtacctactgtattcacaagtgctgttccaggacgtcacctttacaatgggtcaggtagtgtcaagagagggccagggccgccaggagactttgtttaggtgtatcagatcaatgccgagtcacccagatcgggcctataattcttgctattcggccggagtgttccaccttcaccagggtgatatcctgtctgtcatcatacctagggcgcgggccaagctgaatctcagtccccacggcacctttctgggatttgtgaagttatag

SEQ ID NO: 248063 - DNA, 993 bp, Artificial Sequence
  derived and/or modified sequence
atggcagcccgccggtcacagcggcggcggggcaggcggggtgaaccgggcaccgctctgctggtgccgcttgctttagggctgggactggcactggcgtgcctcggcctactgctcgccgtggtttccttaggctctcgcgcttcgctgagcgcacaggagcccgcacaagaggagctggttgctgaggaggaccaggatccctcggaattgaatcctcagactgaagagtctcaggatccggccccctttctcaatcgcctggttcgacctcgacgttcagcgcccaaaggccggaaaacaagggctcgtagagcgatcgcggcccactacgaggtgcaccctagacccggacaggacggtgcacaggcaggcgttgatgggaccgtttccgggtgggaggaggcgaggatcaactcctcgagcccactgcggtataaccgccagataggggagttcatagtaacacgggcaggcctctactacttgtattgtcaatccagcgatgcactggaggcctgggaaaatggagaacgaagtcggaaaaggcgcgctgtgctcactcagaaacagaagaagcagcattccgtactgcacttggtgcccatcaacgcaacctctaaagacgatagtgatgtgactgaggtgatgtggcagccagccctacgccggggaagaggcttgcaggctcaggggtatggagttcgaatccaggacgctggagtgtatctcctctactctcaggtgctcttccaggatgtgacatttactatgggtcaagtagtttccagagaaggacaagggcggcaagaaactctgtttagatgtataaggtctatgccctctcacccggacagggcctataattcttgttacagtgcgggcgtttttcacctgcaccagggagatatcctgtccgtcatcatacctcgcgcccgtgcaaaattgaatctgtcacctcacggaacatttctgggatttgttaaattatag

SEQ ID NO: 248064 - DNA, 993 bp, Artificial Sequence
  derived and/or modified sequence
atggccgcccggcggagccagcggcggcggggccggcggggcgagccggggactgctcttctcgtgcccctggcgctgggtctgggtctggccctcgcttgtttggggctgctgctggccgtggtttccctgggcagtcgtgcaagtctaagtgctcaggaacctgcacaagaggaactggtggccgaggaggatcaggatcctagtgagctcaacccgcagaccgaagaatctcaagatccggcacccttcttaaaccgtctcgtccgcccaaggcgttctgctcccaagggacgcaaaacaagggccaggagagccatcgctgcacactatgaggtccatcctcggccgggacaagatggagcgcaggctggggtggatgggacagtgagtggctgggaggaggcaaggatcaacagttcgagtccacttcgttacaaccgccaaattggggaattcattgtcacccgcgcagggctgtactacctgtactgccaatcgtccgatgctctagaggcctgggaaaacggggaacggtcacgcaagagaagagcagttctgactcagaaacaaaaaaagcagcacagcgtcttacaccttgttcccatcaatgccacaagcaaagatgattcagatgtcacggaagtcatgtggcagcccgccctccgcagggggcgcgggctacaggctcagggatacggggttcgcattcaggatgccggcgtctaccttttgtacagccaggtcctattccaagacgttacatttaccatgggacaagtagtctcaagagaaggacaggggcgccaggaaactctgttccgatgcataaggtctatgccaagtcaccccgatagagcttataactcctgttactccgccggagtgttccatctgcaccagggagatatcctgtcagttatcatcccaagggcacgggccaagctgaatctaagtccccatgggactttcctgggcttcgttaagctgtag

SEQ ID NO: 248065 - DNA, 993 bp, Artificial Sequence
  derived and/or modified sequence
atggctgcacgccgaagccaaaggcggagggggagaaggggggaaccgggtacagccctgctggtgcctctggccttgggcctgggtttggcattggcatgcctcggactcctgctggctgtggtcagtctgggcagcagggcaagcctgtcggcacaggagccggctcaagaggaactcgttgcggaggaagaccaggacccctccgagcttaacccacaaaccgaggaatcccaggatcccgctcctttcctgaaccgcttggtgcggcctcggagaagcgccccaaaggggagaaaaacaagggccagacgcgcaatcgccgcacattacgaagttcaccctcgccctggacaggacggagcgcaggccggagtggacggtaccgtttcaggttgggaagaggctagaatcaacagttctagtccactgcgttacaatagacagattggagagttcatcgtcacacgtgcagggttatactacctgtactgtcagagctccgatgcactggaggcttgggagaacggtgaaaggtctcggaaaaggagagccgtattaacccaaaagcagaaaaaacagcacagtgtgctgcatctcgttccaatcaacgctacgtctaaagatgacagcgacgtgaccgaggtaatgtggcagccggcactccggagagggagggggctgcaggctcaggggtacggagtgcgaatccaggacgctggggtgtacctactgtactcccaagtcctttttcaggacgtgacatttaccatgggccaggtcgtgtctagagagggccaaggtagacaagagacactgtttaggtgcatccgatcgatgccttcccacccagatcgggcatacaattcgtgctactccgcaggtgtttttcatctgcatcaaggggatatcctttctgtgattatccctcgtgctagggccaaacttaatcttagccctcatggcacgtttttgggctttgtgaaactgtag

SEQ ID NO: 248066 - DNA, 1768 bp, Artificial Sequence
  derived and/or modified sequence
atggccgcccgtcggagccagaggcggagggggcgccggggggagccgggcaccgccctgctggtcccgctcgcgctgggcctgggcctggcgctggcctgcctcggcctcctgctggccgtggtcagtttggggagccgggcatcgctgtccgcccaggagcctgcccaggaggagctggtggcagaggaggaccaggacccgtcggaactgaatccccagacagaagaaagccaggatcctgcgcctttcctgaaccgactagttcggcctcgcagaagtgcacctaaaggccggaaaacacgggctcgaagagcgatcgcagcccattatgaagttcatccacgacctggacaggacggagcgcaggcaggtgtggacgggacagtgagtggctgggaggaagccagaatcaacagctccagccctctgcgctacaaccgccagatcggggagtttatagtcacccgggctgggctctactacctgtactgtcagagttccgatgccctggaagcctgggagaatggggagagatcccggaaaaggagagcagtgctcacccaaaaacagaagaagcagcactctgtcctgcacctggttcccattaacgccacctccaaggatgactccgatgtgacagaggtgatgtggcaaccagctcttaggcgtgggagaggcctacaggcccaaggatatggtgtccgaatccaggatgctggagtttatctgctgtatagccaggtcctgtttcaagacgtgactttcaccatgggtcaggtggtgtctcgagaaggccaaggaaggcaggagactctattccgatgtataagaagtatgccctcccacccggaccgggcctacaacagctgctatagcgcaggtgtcttccatttacaccaaggggatattctgagtgtcataattccccgggcaagggcgaaacttaacctctctccacatggaaccttcctggggtttgtgaaactgtgattgtgttataaaaagtggctcccagcttggaagaccagggtgggtacatactggagacagccaagagctgagtatataaaggagagggaatgtgcaggaacagaggcgtcttcctgggtttggctccccgttcctcacttttcccttttcattcccaccccctagactttgattttacggatatcttgcttctgttccccatggagctccgaattcttgcgtgtgtgtagatgaggggcgggggacgggcgccaggcattgtccagacctggtcggggcccactggaagcatccagaacagcaccaccatctagcggccgctcgagggaagcacccgccggttggccgaagtccacgaagccgccctctgctagggaaaacccctggttctccatgccacacctctctccaggtgccctctgcctcttcaccccacaagaagccttatcctacgtccttctctccatctatcggaccccagtttccatcactatctccagagatgtagctattatgcgcccgtctacagggggtgcccgacgatgacggtgccttcgcagtcaaattactcttcgggtcccaaggtttggctttcacgcgctccattgccccggcgtggcaggccattccaagcccttccgggctggaactggtgtcggaggagcctcgggtgtatcgtacgccctggtgttggtgttgcctcactcctctgagctcttctttctgatcaagccctgcttaaagttaaataaaatagaatgaatgataccccggc

SEQ ID NO: 248067 - RNA, 993 nt, Artificial Sequence
  derived and/or modified sequence
auggcugcccgcagaagccagaggagaaggggccgacggggugagccgggaaccgcccugcucgugccucucgcuuugggccuugggcuggcccucgcuugccuggggcuccugcuggccguuguuucacugggcucuagagccucacugucugcucaagagccagcccaagaagagcuuguugccgaggaggaccaggacccgucagaacugaacccgcaaacagaagaaagucaggauccagccccuuuucugaauagacugguacguccccgaagaucugcucccaaagggagaaaaacucgcgcucggagagcaauagccgcccauuacgaaguccacccacgaccuggucaggauggugcucaagcaggagucgauggcaccgugagcgguugggaagaagcacgaauuaacucaagcagcccucuacgguacaauaggcagaucggugaauuuauugugaccagagcaggacuguauuaccuuuacugccagucuucagacgcucuagaggccugggaaaacggcgagcgaaguaggaaaagaagagccguccugacccagaagcagaagaagcagcauaguguucuucaccuugucccuauuaacgccacaagcaaagacgacuccgacguuacagagguaauguggcagccagcccuccgucgcggaagaggacugcaggcucagggcuacggugugcggauccaggaugcaggugucuauuugcuuuauagccaaguccuauuccaggacgugacauucacaaugggucagguagugucccgagagggccagggcagacaggagacgcucuuccgcugcauuagaaguaugcccagccacccugaccgcgcguacaacagcuguuauucagccgggguguuccaccuccaccaaggagauauucucucgguaaucaucccccgggcccgggccaaacucaaccugagcccucaugggacguuccuaggauucgugaaacuuuag

SEQ ID NO: 248068 - RNA, 993 nt, Artificial Sequence
  derived and/or modified sequence
auggccgccaggcguucccagcgcaggagaggcagacgcggcgagccgggcacugcccugcuaguccccuuagcgcuuggccuuggucuugcucucgcguguuugggccuccugcuggcagugguaagccucgggucacgugccagcuugucagcucaggaaccugcccaagaggaacugguggcugaagaggaccaagacccaucagagcuuaacccucagacugaggagucucaggacccugcgcccuuuuugaauagacuugucagacccaggagaagugcacccaaaggacggaaaacucgcgcucggagagcaauagccgcccauuacgaaguccacccacgaccuggucaggauggugcucaagcaggagucgauggcaccgugagcgguugggaagaagcacgaauuaacucaagcagcccucuacgguacaauaggcagaucggugaauuuauugugaccagagcaggacuguauuaccuuuacugccagucuucagacgcucuagaggccugggaaaacggcgagcgaaguaggaaaagaagagccguccugacccagaagcagaagaagcagcauaguguucuucaccuuguccccauuaacgcuacgaguaaagacgauagugacgugaccgaagugauguggcagccagcauugcgacgugggagaggauuacaagcacagggguacggaguccggauacaggacgcuggcguauaccugcucuacucacaggucuuauuucaagacguaacauucacaaugggccagguagugucgagggagggacagggccggcaagagacccuguuucggugcauaagaucaaugcccucccacccagaccgcgccuauaauucuuguuauucugccgggguguuccaucuucaccagggcgauauuuuaagcgucaucaucccacgagcgcgggccaaacugaaucuuagcccucacggaacuuuucuaggcuuuguuaaacuguag

SEQ ID NO: 248069 - protein, 530 aa, Artificial Sequence
  derived and/or modified sequence
MAAYQQEEQMQLPRADAIRSRLIDTFSLIEHLQGLSQAVPRHTIRELLDPSRQKKLVLGDQHQLVRFSIKPQRIEQISHAQRLLSRLHVRCSQRPPLSLWAGWVLECPLFKNFIIFLVFLNTIILMVEIELLESTNTKLWPLKLTLEVAAWFILLIFILEILLKWLSNFSVFWKSAWNVFDFVVTMLSLLPEVVVLVGVTGQSVWLQLLRICRVLRSLKLLAQFRQIQIIILVLVRALKSMTFLLMLLLIFFYIFAVTGVYVFSEYTRSPRQDLEYHVFFSDLPNSLVTVFILFTLDHWYALLQDVWKVPEVSRIFSSIYFILWLLLGSIIFRSIIVAMMVTNFQNIRKELNEEMARREVQLKADMFKRQIIQRRKNMSHEALTSSHSKIEDSSRGASQQRESLDLSEVSEVESNYGATEEDLITSASKTEETLSKKREYQSSSCVSSTSSSYSSSSESRFSESIGRLDWETLVHENLPGLMEMDQDDRVWPRDSLFRYFELLEKLQYNLEERKKLQEFAVQALMNLEDK

SEQ ID NO: 248070 - protein, 414 aa, Artificial Sequence
  derived and/or modified sequence
MAAYQQEEQMQLPRADAIRSRLIDTFSLIEHLQGLSQAVPRHTIRELLDPSRQKKLVLGDQHQLVRFSIKPQRIEQISHAQRLLSRLHVRCSQRPPLSLWAGWVLECPLFKNFIIFLVFLNTIILMVEIELLESTNTKLWPLKLTLEVAAWFILLIFILEILLKWLSNFSVFWKSAWNVFDFVVTMLSLLPEVVVLVGVTGQSVWLQLLRICRVLRSLKLLAQFRQIQIIILVLVRALKSMTFLLMLLLIFFYIFAVTGVYVFSEYTRSPRQDLEYHVFFSDLPNSLVTVFILFTLDHWYALLQDVWKVPEVSRIFSSIYFILWLLLGSIIFRSIIVAMMVTNFQNIRKELNEEMARREVQLKADMFKRQIIQRRKNMSHEALTSSHSKIEDRSFGLGDSCARKSARANGNGSG

SEQ ID NO: 248071 - protein, 64 aa, Artificial Sequence
  derived and/or modified sequence
MAAYQQEEQMQLPRADAIRSRLIDTFSLIEHLQGLSQAVPRHTIRELLDPSRQKKLVLGDQHQL

SEQ ID NO: 248072 - protein, 48 aa, Artificial Sequence
  derived and/or modified sequence
MAAYQQEEQMQLPRADAIRSRLIDTFSLIEHLQGLSQAVPRHTIRELL

SEQ ID NO: 248073 - DNA, 1593 bp, Artificial Sequence
  derived and/or modified sequence
atggccgcctaccagcaggaggagcagatgcagctgcccagagccgacgccatcagaagcagactgatcgacaccttcagcctgatcgagcacctgcagggcctgagccaggccgtgcccagacacaccatcagagagctgctggaccccagcagacagaagaagctggtgctgggcgaccagcaccagctggtgagattcagcatcaagccccagagaatcgagcagatcagccacgcccagagactgctgagcagactgcacgtgagatgcagccagagaccccccctgagcctgtgggccggctgggtgctggagtgccccctgttcaagaacttcatcatcttcctggtgttcctgaacaccatcatcctgatggtggagatcgagctgctggagagcaccaacaccaagctgtggcccctgaagctgaccctggaggtggccgcctggttcatcctgctgatcttcatcctggagatcctgctgaagtggctgagcaacttcagcgtgttctggaagagcgcctggaacgtgttcgacttcgtggtgaccatgctgagcctgctgcccgaggtggtggtgctggtgggcgtgaccggccagagcgtgtggctgcagctgctgagaatctgcagagtgctgagaagcctgaagctgctggcccagttcagacagatccagatcatcatcctggtgctggtgagagccctgaagagcatgaccttcctgctgatgctgctgctgatcttcttctacatcttcgccgtgaccggcgtgtacgtgttcagcgagtacaccagaagccccagacaggacctggagtaccacgtgttcttcagcgacctgcccaacagcctggtgaccgtgttcatcctgttcaccctggaccactggtacgccctgctgcaggacgtgtggaaggtgcccgaggtgagcagaatcttcagcagcatctacttcatcctgtggctgctgctgggcagcatcatcttcagaagcatcatcgtggccatgatggtgaccaacttccagaacatcagaaaggagctgaacgaggagatggccagaagagaggtgcagctgaaggccgacatgttcaagagacagatcatccagagaagaaagaacatgagccacgaggccctgaccagcagccacagcaagatcgaggacagcagcagaggcgccagccagcagagagagagcctggacctgagcgaggtgagcgaggtggagagcaactacggcgccaccgaggaggacctgatcaccagcgccagcaagaccgaggagaccctgagcaagaagagagagtaccagagcagcagctgcgtgagcagcaccagcagcagctacagcagcagcagcgagagcagattcagcgagagcatcggcagactggactgggagaccctggtgcacgagaacctgcccggcctgatggagatggaccaggacgacagagtgtggcccagagacagcctgttcagatacttcgagctgctggagaagctgcagtacaacctggaggagagaaagaagctgcaggagttcgccgtgcaggccctgatgaacctggaggacaagtag

SEQ ID NO: 248074 - DNA, 1245 bp, Artificial Sequence
  derived and/or modified sequence
atggccgcctaccagcaggaggagcagatgcagctgcccagagccgacgccatcagaagcagactgatcgacaccttcagcctgatcgagcacctgcagggcctgagccaggccgtgcccagacacaccatcagagagctgctggaccccagcagacagaagaagctggtgctgggcgaccagcaccagctggtgagattcagcatcaagccccagagaatcgagcagatcagccacgcccagagactgctgagcagactgcacgtgagatgcagccagagaccccccctgagcctgtgggccggctgggtgctggagtgccccctgttcaagaacttcatcatcttcctggtgttcctgaacaccatcatcctgatggtggagatcgagctgctggagagcaccaacaccaagctgtggcccctgaagctgaccctggaggtggccgcctggttcatcctgctgatcttcatcctggagatcctgctgaagtggctgagcaacttcagcgtgttctggaagagcgcctggaacgtgttcgacttcgtggtgaccatgctgagcctgctgcccgaggtggtggtgctggtgggcgtgaccggccagagcgtgtggctgcagctgctgagaatctgcagagtgctgagaagcctgaagctgctggcccagttcagacagatccagatcatcatcctggtgctggtgagagccctgaagagcatgaccttcctgctgatgctgctgctgatcttcttctacatcttcgccgtgaccggcgtgtacgtgttcagcgagtacaccagaagccccagacaggacctggagtaccacgtgttcttcagcgacctgcccaacagcctggtgaccgtgttcatcctgttcaccctggaccactggtacgccctgctgcaggacgtgtggaaggtgcccgaggtgagcagaatcttcagcagcatctacttcatcctgtggctgctgctgggcagcatcatcttcagaagcatcatcgtggccatgatggtgaccaacttccagaacatcagaaaggagctgaacgaggagatggccagaagagaggtgcagctgaaggccgacatgttcaagagacagatcatccagagaagaaagaacatgagccacgaggccctgaccagcagccacagcaagatcgaggacagaagcttcggcctgggcgacagctgcgccagaaagagcgccagagccaacggcaacggcagcggctag

SEQ ID NO: 248075 - DNA, 1593 bp, Artificial Sequence
  derived and/or modified sequence
atggccgcataccagcaggaggaacagatgcagctgccacgagcggacgctatacgctctcgcctgatcgacaccttttctttaatcgagcacctgcaaggcttgagccaggcagttccacgccacaccattcgggagctgctggacccttctaggcaaaagaagcttgtgctcggggatcagcatcagttggtcaggttctctattaaacctcaacgtattgaacaaatctctcatgcccaaaggctactgagccgactgcacgtgaggtgctctcagcgacctccgctgtctctctgggccggctgggtcctggagtgccctctgttcaagaactttataattttcctcgtctttctgaatacgattattcttatggtggaaattgagctgctagaatccacaaacactaagttgtggcccctgaaactcacgctggaagtggcagcctggtttatactgctgatctttatattggagattctcctcaaatggctgtctaatttcagtgtattctggaagagcgcatggaacgtcttcgattttgtggtaacgatgctgtccttactgccagaagtagtggtcctggtaggcgttaccggtcagagcgtgtggctccaattactgcggatctgtcgggtcctccggagcttgaagttgctggctcagtttcggcaaatccagatcatcattttggtcctcgtgcgggcactgaaatctatgaccttcttgctgatgctcctgctgatctttttctatatttttgcagtaactggagtatatgtattcagcgagtatacacgctctccccgtcaggacctagaataccacgtgttcttcagtgatctgcctaactcactagtgacagtgtttatcctgttcacgttggatcattggtatgctttgctgcaagatgtgtggaaggtgcctgaggtatcccgaatcttcagctccatttacttcattctgtggcttcttctgggatctatcattttcagaagtataatcgttgctatgatggtaaccaacttccagaacatccggaaagaactgaatgaagaaatggcacggcgcgaggtccagctgaaagcagacatgtttaagcggcagattattcagagacggaaaaacatgtcccatgaggccctgactagcagtcactcaaagatcgaagatagtagccgcggtgcctctcagcaacgggaatcacttgacctatcagaagtgagtgaagtcgagtctaattacggcgctaccgaggaagatctgatcaccagtgccagcaaaaccgaagagaccttgagcaagaaaagagagtaccagtcatcctcgtgcgtatcatccacatcatcctcatactcaagtagctcagaatctcgtttctctgagagtatcggacggctggactgggagacactggttcacgagaaccttcctggcctgatggaaatggatcaggacgacagagtctggcctcgcgacagtctgttccgctactttgagctgttggaaaagttgcagtacaatctcgaggaacgcaagaaactgcaggaatttgccgtccaggcactgatgaatctggaagacaagtag

SEQ ID NO: 248076 - DNA, 1593 bp, Artificial Sequence
  derived and/or modified sequence
atggctgcttatcagcaagaggagcagatgcagttgccccgggccgacgctatcaggagtagacttattgacaccttctccctgatcgaacatctgcaaggtctcagtcaggctgttccccgacatacaatccgggagctcttggacccttctcggcagaaaaagctggtcttaggcgatcaacaccaactcgtgagattctctatcaagccgcagcgtattgagcagatctcgcacgcgcagcggttgctcagtagactccacgttcgttgcagccagcggccacctctctcgctgtgggccggatgggttctggagtgtccgctgtttaaaaattttatcatttttctcgttttcctgaacaccattatcctgatggtagaaattgagctgctagaatctactaataccaaattatggccactgaagttgacactggaggtcgctgcgtggttcattctgctcatttttatcttggagatccttctcaaatggttgtccaatttctctgtgttctggaagtccgcttggaatgttttcgacttcgtcgttaccatgctctctctcttgcctgaggtggtggtgctggtaggggtcaccggccagtccgtgtggttacaactgcttagaatttgccgagtgctgagatcactgaaattgctcgcgcaatttagacagatccagattattattctggttcttgtgagagccctaaagtctatgacttttctactgatgttgctccttatattcttttacatttttgccgtgactggggtctacgtgttctccgaatacacacggtcaccccgccaggacttggaataccacgttttctttagcgatctgcctaactcacttgtgaccgtgttcatcctttttaccctcgatcattggtacgctctgctccaggatgtttggaaggtgcctgaggtttcccgcatcttctcatcaatctactttatcctctggctgttgctcggcagcatcatcttccgcagtattatcgtggccatgatggtcacaaactttcaaaatatccgcaaagagctgaacgaggagatggctagacgcgaggttcagttgaaagctgatatgtttaagaggcagattattcagagacgcaaaaacatgagccatgaagcattaacaagttcacatagtaaaatcgaggactcaagcaggggggcttctcagcagcgcgaatccctggaccttagtgaggtgagcgaggtggagagtaactacggggcaaccgaggaagatctcataaccagcgccagcaagactgaggagactctgtctaagaagagggagtatcaaagcagctcttgcgtttcaagcactagttccagctactcttcatccagtgagtctcgctttagcgagtcaattggacggttagattgggagacgctcgtgcacgagaatctccctggcctgatggaaatggatcaagacgacagagtttggccccgtgattcactgtttcgttatttcgaactgcttgagaagttgcagtataatctcgaagaacggaagaaattacaggaattcgccgtacaggcgctgatgaatctcgaagataaatag

SEQ ID NO: 248077 - DNA, 1245 bp, Artificial Sequence
  derived and/or modified sequence
atggccgcctaccagcaagaagaacaaatgcaactgcccagggcagacgcaatacgttcacgtctcatagatacattttcactcatcgaacacctgcaagggctcagtcaagctgtgcccaggcatactatcagagaacttttggaccctagccgccagaagaagctggtgctgggcgaccagcaccagttagtccggttttcaatcaaacctcaaaggatcgaacagatctcacacgcacagaggcttctcagccgtttacatgtgcggtgtagtcagcgccctcccctgtccttatgggctggctgggtgcttgaatgccctctctttaagaacttcatcatctttttggtttttctgaacactatcatcctcatggtcgaaattgagctcctggagtctacaaataccaaattgtggcccctcaaactcaccctggaggttgctgcatggtttatcctgctaatatttatcctggaaattcttctgaaatggttgtctaactttagcgtgttctggaagagtgcttggaatgtttttgacttcgtagtcaccatgctgtccctgctaccggaagtagtagtgctggtgggcgttacaggccagagtgtttggctccaactattaagaatctgcagagtcctgcgctctctgaaacttttagcacagttcagacagattcagatcattattctggtgctcgtccgggctctgaagtccatgacattcctgctcatgctgctcttaatcttcttctatatcttcgcggtcacgggagtctacgtcttcagcgagtatacacgctcaccccggcaagatctggagtaccacgttttcttctcggacctgcccaactccctggtgactgtgttcatcctgtttacacttgatcactggtacgctctcctccaggacgtctggaaggttccagaagtctccaggatattctccagcatctatttcatactgtggctgctgttagggagtatcatatttagaagtattatcgtggcaatgatggtgacaaattttcagaacattaggaaagaactgaatgaggagatggcccggcgcgaggtgcagcttaaagccgatatgttcaaaaggcagattatccagagaagaaagaatatgagtcacgaggctctgacctcctcccatagcaagattgaagacagatctttcggactgggagactcatgtgctaggaagagtgccagagcaaacggcaatggctcaggctag

SEQ ID NO: 248078 - DNA, 1593 bp, Artificial Sequence
  derived and/or modified sequence
atggccgcctaccagcaggaggagcagatgcagctgcccagggcagatgccatccgcagccggctgattgacaccttcagcctgattgagcacctgcagggcctgagccaggccgtgcccaggcacaccatccgggagctgctggaccccagccggcagaagaagctggtgctgggggaccagcaccagctggtgcgcttcagcatcaagccccagagaattgagcagatcagccacgcccagaggctgctgagccggctgcacgtgcgctgcagccagaggcctcccctgagcctgtgggccggctgggtgctggagtgccccctcttcaagaacttcatcatcttcctggtgttcctgaacaccatcatcctgatggtggagattgagctgctggagagcaccaacaccaagctgtggcccctgaagctgaccctggaggtggccgcctggttcatcctgctgatcttcatcctggagatcctgctgaagtggctgagcaacttcagcgtcttctggaagagcgcctggaatgtgtttgattttgtggtgaccatgctgagcctgctgcctgaggtggtggtgctggtgggcgtgacaggccagagcgtgtggctgcagctgctgcgcatctgccgggtgctgcggagcctgaagctgctggcccagttccggcagatccagatcatcatcctggtgctggtgcgggccctgaagtccatgaccttcctgctgatgctgctgctgatcttcttctacatctttgctgtgactggagtgtatgtgttcagcgagtacaccaggagcccccggcaggacctggagtaccacgtgttcttcagtgacctgcccaacagcctggtgacagtgttcatcctcttcaccctggaccactggtacgccctgctgcaggatgtgtggaaggtgcctgaggtgagccgcatcttcagcagcatctacttcatcctgtggctgctgctgggcagcatcatcttccgcagcatcatcgtggccatgatggtgaccaacttccagaacatcaggaaggagctgaatgaggagatggcccggcgggaggtgcagctgaaggctgacatgttcaagaggcagatcatccagaggaggaagaacatgagccatgaggccctgaccagcagccacagcaagattgaggacagcagcagaggagccagccagcagcgggagagcctggacctgtctgaggtgtctgaggtggagagcaactacggggccacagaagaagatctcatcaccagcgccagcaagacagaggagaccctgagcaagaagcgggagtaccagagcagcagctgtgtgagcagcaccagcagcagctacagcagcagcagcgagagccgcttcagcgagagcatcggccgcctggactgggagaccctggtgcatgagaacctgcccggcctgatggagatggaccaggatgacagagtgtggccccgggacagcctcttccgctactttgagctgctggagaagctgcagtacaacctggaggagaggaagaagctgcaggagtttgctgtgcaggccctgatgaacctggaggacaagtag

SEQ ID NO: 248079 - DNA, 1245 bp, Artificial Sequence
  derived and/or modified sequence
atggccgcctaccagcaggaggagcagatgcagctgcccagggcagatgccatccgcagccggctgattgacaccttcagcctgattgagcacctgcagggcctgagccaggccgtgcccaggcacaccatccgggagctgctggaccccagccggcagaagaagctggtgctgggggaccagcaccagctggtgcgcttcagcatcaagccccagagaattgagcagatcagccacgcccagaggctgctgagccggctgcacgtgcgctgcagccagaggcctcccctgagcctgtgggccggctgggtgctggagtgccccctcttcaagaacttcatcatcttcctggtgttcctgaacaccatcatcctgatggtggagattgagctgctggagagcaccaacaccaagctgtggcccctgaagctgaccctggaggtggccgcctggttcatcctgctgatcttcatcctggagatcctgctgaagtggctgagcaacttcagcgtcttctggaagagcgcctggaatgtgtttgattttgtggtgaccatgctgagcctgctgcctgaggtggtggtgctggtgggcgtgacaggccagagcgtgtggctgcagctgctgcgcatctgccgggtgctgcggagcctgaagctgctggcccagttccggcagatccagatcatcatcctggtgctggtgcgggccctgaagtccatgaccttcctgctgatgctgctgctgatcttcttctacatctttgctgtgactggagtgtatgtgttcagcgagtacaccaggagcccccggcaggacctggagtaccacgtgttcttcagtgacctgcccaacagcctggtgacagtgttcatcctcttcaccctggaccactggtacgccctgctgcaggatgtgtggaaggtgcctgaggtgagccgcatcttcagcagcatctacttcatcctgtggctgctgctgggcagcatcatcttccgcagcatcatcgtggccatgatggtgaccaacttccagaacatcaggaaggagctgaatgaggagatggcccggcgggaggtgcagctgaaggctgacatgttcaagaggcagatcatccagaggaggaagaacatgagccatgaggccctgaccagcagccacagcaagattgaagatagaagctttggcctgggggacagctgtgccaggaagagcgcccgggccaatggaaatggaagtggatag

SEQ ID NO: 248080 - DNA, 1593 bp, Artificial Sequence
  derived and/or modified sequence
atggccgcctaccagcaggaggagcagatgcagctgccccgggccgacgccatccgttctagactgatagacacattctccctgattgagcacttacaaggactttctcaggcggtccctcggcataccatccgggaactgctggacccttcaagacagaaaaaactggtgctaggagaccagcaccagctcgttcgtttttctataaagccacagaggatcgaacaaatcagccacgctcagaggctgctttcccgcctccacgtgcgctgtagtcagcgacctccactcagtctttgggctggctgggtgctggagtgccctttatttaagaacttcattatatttctggtcttcctaaacactataattctaatggttgagattgagctgctggagagcacaaacacgaagctgtggcccttgaagctcacccttgaagttgctgcatggtttatactactgatcttcatcctggaaatcctactgaagtggctctctaactttagcgtcttctggaaaagtgcctggaacgtgtttgacttcgtggtcaccatgctctccctgctgccagaggttgttgtcctcgtcggggtaactggacagagtgtatggttacagttactgcggatttgtcgcgtattgcggagtctgaaactcctggctcagtttcgacaaattcagattattatcctggtgctcgtgcgggctctgaaatccatgacatttctattgatgctgctgcttatctttttctatatctttgctgtgaccggggtctacgtgttttccgagtatacccgcagccctagacaggacttggagtaccacgtgtttttttcagacctgcccaacagccttgtgaccgtgtttatcctgttcacgctcgatcactggtacgcgttgctccaggacgtttggaaggtgcccgaagtgtcacgtatcttttcctctatttattttattctctggttgctcctgggaagtattatcttcaggagtattattgtggccatgatggtgacaaacttccagaacatccgtaaagagttgaatgaggaaatggcccggagggaggtgcaactgaaagccgatatgttcaagcgtcagattatccaaagacgcaagaacatgagccacgaggcactcacttcaagtcacagcaagatagaggatagctcgaggggagcctctcagcagcgagagtccctcgatctgtctgaagtgtccgaggtggagtcaaactatggagccacagaggaagacctgatcactagtgcctccaagaccgaggagactctcagcaaaaagcgagagtatcagagtagcagctgcgtgtctagcacatcgtctagctactcctccagtagtgagtctaggtttagcgagagcattgggaggctcgattgggagaccctagtgcacgagaatctgcctggtctcatggagatggaccaagatgaccgggtgtggccacgggacagcctgttccgatattttgaattgttagagaagctacaatataacctagaggaacggaaaaaactgcaagagtttgcagtgcaagctctaatgaatctggaagacaaatag

SEQ ID NO: 248081 - DNA, 1593 bp, Artificial Sequence
  derived and/or modified sequence
atggccgcctaccagcaggaggagcagatgcagctgccccgggccgacgccatacggagccggctgatcgatacattttctttgatcgagcacctccagggcttatcacaagctgtgcctaggcacaccatacgggaactcctcgacccgtcgcgccagaaaaaactggtgcttggggaccagcaccagcttgtgagattctcaatcaaaccacagcgtatcgaacagataagtcatgctcagagactcctctctcgtctccacgtgagatgcagccaacgcccgccattaagtctttgggcggggtgggtactggaatgcccattgtttaaaaatttcatcatttttctcgtttttctgaatacaatcatcctgatggtagagatcgaattgttggaatctacgaatacaaaactatggcccttgaaactgaccttggaagtagccgcgtggttcatcctgctgatcttcatactggagatcctgttgaagtggctctctaacttcagcgttttctggaaaagcgcttggaacgtgttcgacttcgtcgtgacaatgttgagcctacttccagaagtggttgtcttggtgggcgtcacaggtcagtctgtgtggctccagctgctgaggatctgtagggtactgcgcagcctcaaactcctcgcccagttcaggcagattcagattatcatcctcgtgctcgttcgagccctgaaaagcatgaccttcttacttatgctgctcctgatttttttctatatctttgccgttactggagtgtatgtcttctctgaatatactcgatcgcctcgccaggatttggagtaccacgtttttttctctgatctgcccaatagtctggtaactgtttttatattgtttaccttagaccattggtatgctctcttgcaagatgtgtggaaggttcctgaggtcagtcggattttcagcagcatatattttattctctggctgctcctgggaagcatcatctttcgttctatcatcgtggccatgatggttactaattttcagaacatcagaaaagagctgaatgaggaaatggcaaggcgggaggtgcagttgaaagccgatatgttcaaacggcaaataatccaaaggcgcaaaaacatgagtcacgaagccctcacctctagccactccaagatagaagattcctcccgtggtgcatctcagcaacgggagtccttggatctctccgaggtgagcgaggtagaatcaaattacggcgccaccgaagaagatctcatcacctcagcctccaagactgaggagactctgagtaaaaagcgcgaataccagagtagttcctgtgtctcatccacttccagctcctatagttcaagtagtgaaagccgtttctctgagagcattgggcgtttggactgggaaacgctagtccacgagaatttgcctggtttaatggagatggaccaagacgacagggtatggccacgcgatagcctgtttaggtatttcgaattgttggagaagcttcagtacaacttggaagaacggaaaaaactgcaggagtttgccgtacaggccctcatgaatcttgaggacaagtag

SEQ ID NO: 248082 - DNA, 1245 bp, Artificial Sequence
  derived and/or modified sequence
atggccgcctaccagcaggaggagcagatgcagctgccccgggccgatgctattcgctcacggctcattgacaccttcagcctcatcgagcacctccaggggctttctcaggcagtgccacgacacaccatcagggaactgcttgacccaagtaggcagaaaaaactcgtcctcggcgatcagcaccagctggtcaggttttccattaaacctcagcgtatagagcagatatctcacgctcaacggttactgagtcggctgcacgtgcgctgcagccagcgtccccccctgagcctgtgggcaggttgggtgctcgagtgccctttgttcaaaaatttcataatctttctcgttttcttaaacaccatcattctcatggtggagattgagttattagagtcaacgaacaccaaactgtggccacttaagttaaccctagaggttgccgcctggttcattcttttgatcttcattctcgaaattctactaaaatggctgagcaatttttctgtgttttggaagtccgcctggaatgtgtttgattttgtggtgaccatgctgtccttattaccagaggtagttgtcctcgtgggcgtgactgggcagtctgtatggcttcagcttcttcggatatgtcgggtcctgcgctcactgaagctcctggctcagttcagacagatacagattattattcttgtcctggtccgggcactgaagtcaatgacatttctactgatgctcctactcatcttcttttacatctttgctgtgacaggcgtctatgtgttcagcgaatacacccggagtcctaggcaggacctcgaataccatgtgttttttagtgatctacccaacagcctcgtgaccgtgttcatactcttcaccttggaccattggtatgcactccttcaggatgtgtggaaggtgcctgaagtgtcccggattttttcgtcaatttacttcatattatggctactgctgggcagtatcatcttccggtccatcatcgttgctatgatggtgaccaatttccagaacatccggaaggaactaaatgaggaaatggcccgacgcgaggtgcagcttaaggcagatatgtttaagagacagatcattcagcggagaaaaaacatgagtcacgaggctctgacttcttcccatagcaagatagaggataggtccttcggcctgggcgactcttgtgcccgcaagagcgcgcgcgccaacgggaacggaagcggttag

SEQ ID NO: 248083 - DNA, 1593 bp, Artificial Sequence
  derived and/or modified sequence
atggctgcgtaccagcaggaggagcagatgcagcttcccagggccgacgctatcaggagccgtctcattgataccttttccctcatcgagcacctacaaggtctttctcaggccgtgccccgtcacaccatcagagagttgctggatcccagtaggcagaaaaaactcgtcctgggggaccagcaccaattggtgaggttttccattaaacctcagcgaatagaacagatctctcacgcccagcgattgctgtctcggctccatgttcggtgttcccagaggccaccactcagcttgtgggcgggatgggtactggaatgtccactgttcaagaactttattatattccttgtattcctcaataccataatccttatggtggaaatcgaattactggagagtacgaacacaaaactctggcctcttaagctgactctcgaggtagccgcatggttcattctgctgatctttatccttgaaatcttactgaaatggctctccaacttctccgttttctggaaatctgcctggaacgtctttgacttcgtcgttacaatgctctctctccttcccgaagtagtcgttcttgtcggtgtaaccggtcagtctgtgtggcttcagctgcttagaatatgccgagtgctgcgttccttgaagctcttggcccagttcaggcagattcaaataatcattttagtgttggttcgcgcactaaagtcaatgacttttctgctgatgctgctgctgatctttttttacatcttcgcagtcacgggggtctatgtgttttccgaatacacccgcagcccgaggcaagacctcgagtaccacgtgtttttttctgacctgccgaactctctggtaactgtttttattctgttcacactcgaccactggtacgccctgttgcaggatgtgtggaaggtcccggaggtgagcaggatttttagctctatctacttcattctttggttgcttctgggaagtataatctttcggtctattattgttgctatgatggtgacaaacttccagaacataagaaaggagctgaacgaggagatggcacggcgagaggtacaactgaaagccgatatgtttaagcgccaaattattcagagacggaaaaacatgagtcatgaggcactcacatcctcacactctaaaattgaggactccagccgcggagcatcccaacagagagagtccttagacttgagcgaagtcagcgaggtggaatccaattacggtgccacagaggaggatctgatcacttctgcatcgaaaactgaggagactctgtccaagaagcgcgaatatcagtcctcctcctgcgtcagcagtacttcttccagttatagcagctcctctgaaagccgcttttctgagtctattgggcgtctggactgggagactctggtgcatgagaacctgcccggtttaatggagatggaccaggatgatcgggtttggccaagagactcactgttcaggtatttcgagttgctggaaaagctgcagtacaacctggaggagcggaaaaaactgcaggagtttgctgtgcaggccctcatgaatttggaagataaatag

SEQ ID NO: 248084 - DNA, 1593 bp, Artificial Sequence
  derived and/or modified sequence
atggctgcttaccagcaagaagagcagatgcagctgcctcgggcagacgctattcgttcccggctgatagatacattctctctgatcgagcacctgcagggcctgagccaggcagtcccacgacacactattagagagctgctggatccctcaagacagaaaaagctggtgttaggcgatcagcatcagctggtccggttttccattaagcctcaacggatcgaacagatctctcacgcacagcgcctactcagtcgcctccacgtgcgctgctcccaaaggccacccctgtccttatgggccggatgggtgctggagtgtccgcttttcaaaaattttattatcttcctcgtctttctcaacactatcattctcatggtcgagatcgaactgctggagtccaccaacaccaagctttggcctcttaagctgacactggaagttgctgcatggttcatcctacttatcttcatcctggagattctgctgaaatggcttagtaactttagtgtgttttggaagtctgcctggaacgtttttgattttgtggtgacgatgctgtccctactccccgaggtggttgtcctggtaggcgtgacgggacagagcgtctggctccagctcctcagaatttgcagggttttaaggtcccttaaactcctcgcacagttcagacagattcagatcatcatcctcgttctggtacgagccctaaagtcaatgacttttctgctgatgctgcttctcatcttcttctatatcttcgccgttactggagtgtatgtgttcagtgaatatacacgcagccccagacaagacctagagtatcacgtgttcttcagcgatcttcctaacagcctagtcaccgttttcatcctcttcacactggaccactggtacgccctgctacaggatgtatggaaggttccagaagtctcacgcattttcagtagcatctatttcatcctgtggctgctgctgggctccatcattttccgctccatcatcgtagccatgatggtcacgaacttccagaacattagaaaggagctaaacgaggagatggcacgtcgggaggtccaactcaaggcggatatgtttaagagacaaattatccagcgaaggaaaaacatgagtcacgaagctcttacgagttctcacagtaaaatcgaggactcgtcaagaggcgcatcccagcagcgggaatccctagacctgagcgaagtgagcgaggtggagagcaattatggcgcaaccgaggaagatctgatcacctcagcatccaaaacagaggagaccctgtccaaaaaacgcgagtaccagagctcttcatgcgtcagctcgacaagcagcagctatagttcttctagcgaaagtagatttagcgagtcgattgggaggttggactgggagaccctcgttcacgagaacctcccaggcctcatggagatggatcaggatgacagggtttggcccagggattcactgttcaggtactttgagttactggaaaagttacagtacaacctggaagagcgaaaaaaacttcaagagtttgccgtgcaagccctgatgaacctggaggacaaatag

SEQ ID NO: 248085 - DNA, 1245 bp, Artificial Sequence
  derived and/or modified sequence
atggccgcttaccagcaggaagagcagatgcagctccctcgtgctgacgctatccgctctcggctgatcgacaccttttctttgatagaacatctgcagggcctgagccaggcagtgcctcgccatacaatacgggaattactagacccctcgaggcagaaaaagttagttctaggcgaccagcaccagttagtcagattctcgatcaagccccagcgcatcgaacagatctcgcatgcccaaaggctactgtccagactgcacgtgcggtgtagccagcggcctccacttagtctatgggccggttgggtgcttgaatgtcccctcttcaaaaacttcatcatattcctagtgtttctgaacaccatcatactaatggtggagatagaactgcttgaatccactaacactaagctctggcccctgaagctgacgctcgaggtggcagcctggttcatcctactgatcttcatactggaaatcctgctgaaatggctgagcaattttagtgtgttttggaaaagcgcttggaatgtgttcgattttgtggtaacaatgttgagcctgcttcctgaagtagtagtcttggtgggagtgaccgggcaatccgtttggctccagctgctcagaatatgccgcgtgcttagatccctgaagttgttggcccagttccgccagatccagatcatcatcctcgtgttagtgagagccctgaagagcatgactttcctgctcatgttgctgctaattttcttttacatctttgctgtcacaggagtgtacgtgttcagcgagtacactcggagcccacgccaggatctcgaataccacgtgtttttttctgatttacctaactctcttgtgacagtctttatcctcttcacacttgaccattggtatgcccttctccaggacgtttggaaggtccccgaggtgtcaaggattttttctagcatatacttcatcctttggctgttacttggatcaattattttccggtctatcatcgtagccatgatggtaaccaactttcagaacatccgcaaggagttgaacgaggaaatggccaggcgcgaagttcagcttaaggcagatatgttcaagaggcagattatccaaaggaggaaaaacatgtcccacgaggctctgacaagttcgcactctaagatcgaggacagaagcttcggcctgggggatagttgcgccaggaaaagcgcccgagctaacggcaatggctctggctag

SEQ ID NO: 248086 - DNA, 1732 bp, Artificial Sequence
  derived and/or modified sequence
atggccgcttaccaacaagaagagcagatgcagcttccccgagctgatgccattcgttcacgtctcatcgatactttctctctcattgagcatttgcaaggcttgagccaagctgtgccgcggcacactatcagggagttacttgatccttcccgccagaagaaacttgtattgggagatcaacaccagctagtgcgtttctctataaagcctcagcgtatagaacagatttcacatgcccagaggctgttgagcaggcttcatgtgcgctgcagtcagaggccacctctttctttgtgggccggatgggtccttgagtgtcctctcttcaaaaacttcatcatcttcctggtctttttgaatacgatcatattgatggttgaaatagaattgctggaatccacaaataccaaactatggccattgaagctgaccttggaggtggcagcttggtttatcttgcttattttcatcctggagatccttcttaagtggctatccaacttttctgttttctggaagagtgcctggaatgtctttgactttgttgttaccatgttgtccctgcttcccgaggttgtggtattggtaggggtaacaggccaatcggtgtggcttcagcttctgaggatctgccgggtgctgaggtctctcaaactccttgcacaattccgtcaaattcaaattattattttggtcctggtcagggccctcaagagcatgaccttcctcttgatgttgctgctcatcttcttctacatttttgctgtgactggtgtctacgtcttctcagagtacacccgttcacctcgtcaggacctggagtaccatgtgttcttctcggacctcccgaattccctggtaacagtgttcattctcttcaccttggatcattggtatgcactgcttcaggacgtctggaaggtgcctgaagtcagtcgcatcttcagcagcatctatttcatcctttggttgttgcttggctccattatctttcgaagtatcatagtagccatgatggttactaactttcagaatatcaggaaagagctgaatgaggagatggcgcgtcgggaggttcagctcaaagctgacatgttcaagcggcagatcatccagaggagaaaaaacatgtcacatgaagcactgacgtcaagccatagcaaaatagaggacagttcaagaggagctagtcaacaaagggaaagtttggacttatcagaagtgtctgaagtagagtctaattatggtgccactgaagaggatttaataacatctgcatcaaaaacagaagagaccttgtcaaaaaagagagagtaccagtcttcctcctgtgtctcctccacatcctcttcctattcttcctcttctgaatccagattttctgaatctattggtcgtttggactgggagactcttgtgcacgaaaatctgcccgggctaatggaaatggatcaggatgaccgtgtttggcccagagactcactcttccgatattttgagttgctagaaaagcttcagtataacctagaggaacgtaagaagttacaagagtttgcagtgcaggcactgatgaacttggaagacaagtaaagcaatggatggcttcaatatccttgggcccagcaaaagataatgaagggaattgttggaaatagagaattgaaaatataaacattcagatagaacaatgtctgttcattaaaattaaaaagtataagtgtctaggcca

SEQ ID NO: 248087 - DNA, 1924 bp, Artificial Sequence
  derived and/or modified sequence
gctccgcatggtcctgggctgtgggtaggggctagggccgggtcccggggtgagccgaaacctgggggtcgagcggggcggggaatggggcgcagtgaggctgggagccggccctgagctcgtcttgcataggggtagccaggctcggggcacctgagctggaggcggaagcgtgaaataaggactgagtgggcaaagagaacctgggctgagacatggccgcttaccaacaagaagagcagatgcagcttccccgagctgatgccattcgttcacgtctcatcgatactttctctctcattgagcatttgcaaggcttgagccaagctgtgccgcggcacactatcagggagttacttgatccttcccgccagaagaaacttgtattgggagatcaacaccagctagtgcgtttctctataaagcctcagcgtatagaacagatttcacatgcccagaggctgttgagcaggcttcatgtgcgctgcagtcagaggccacctctttctttgtgggccggatgggtccttgagtgtcctctcttcaaaaacttcatcatcttcctggtctttttgaatacgatcatattgatggttgaaatagaattgctggaatccacaaataccaaactatggccattgaagctgaccttggaggtggcagcttggtttatcttgcttattttcatcctggagatccttcttaagtggctatccaacttttctgttttctggaagagtgcctggaatgtctttgactttgttgttaccatgttgtccctgcttcccgaggttgtggtattggtaggggtaacaggccaatcggtgtggcttcagcttctgaggatctgccgggtgctgaggtctctcaaactccttgcacaattccgtcaaattcaaattattattttggtcctggtcagggccctcaagagcatgaccttcctcttgatgttgctgctcatcttcttctacatttttgctgtgactggtgtctacgtcttctcagagtacacccgttcacctcgtcaggacctggagtaccatgtgttcttctcggacctcccgaattccctggtaacagtgttcattctcttcaccttggatcattggtatgcactgcttcaggacgtctggaaggtgcctgaagtcagtcgcatcttcagcagcatctatttcatcctttggttgttgcttggctccattatctttcgaagtatcatagtagccatgatggttactaactttcagaatatcaggaaagagctgaatgaggagatggcgcgtcgggaggttcagctcaaagctgacatgttcaagcggcagatcatccagaggagaaaaaacatgtcacatgaagcactgacgtcaagccatagcaaaatagaggacagttcaagaggagctagtcaacaaagggaaagtttggacttatcagaagtgtctgaagtagagtctaattatggtgccactgaagaggatttaataacatctgcatcaaaaacagaagagaccttgtcaaaaaagagagagtaccagtcttcctcctgtgtctcctccacatcctcttcctattcttcctcttctgaatccagattttctgaatctattggtcgtttggactgggagactcttgtgcacgaaaatctgcccgggctaatggaaatggatcaggatgaccgtgtttggcccagagactcactcttccgatattttgagttgctagaaaagcttcagtataacctagaggaacgtaagaagttacaagagtttgcagtgcaggcactgatgaacttggaagacaagtaaagcaatggatggcttcaatatccttgggcccagcaaaagataatgaagggaattgttggaaatagagaattgaaaatataaacattcagatagaacaatgtctgttcattaaaatt

SEQ ID NO: 248088 - protein, 221 aa, Artificial Sequence
  derived and/or modified sequence
MRPRLWLLLAAQLTVLHGNSVLQQTPAYIKVQTNKMVMLSCEAKISLSNMRIYWLRQRQAPSSDSHHEFLALWDSAKGTIHGEEVEQEKIAVFRDASRFILNLTSVKPEDSGIYFCMIVGSPELTFGKGTQLSVVDFLPTTAQPTKKSTLKKRVCRLPRPETQKGPLCSPITLGLLVAGVLVLLVSLGVAIHLCCRRRRARLRFMKQLRLHPLEKCSRMDY

SEQ ID NO: 248089 - DNA, 666 bp, Artificial Sequence
  derived and/or modified sequence
atgcgacccaggctgtggttgctcctggccgcacagcttactgtgcttcatggcaatagcgtcttacaacaaacacctgcttacattaaagtgcaaaccaacaaaatggtgatgctctcttgtgaagctaagatttctttatcaaacatgaggatctactggctgcggcagagacaagctccttcttctgactcacatcacgagttcctcgcactgtgggattctgccaagggaacgattcatggggaagaagttgaacaggagaagattgccgtgtttcgggacgctagccgatttatcctcaacctgacttccgtgaagccggaggatagcgggatttatttctgcatgattgtgggaagtccggaactaacattcggcaagggtactcagctgagtgttgttgacttcctgcctacgactgcccagcctacgaagaagtccactcttaaaaagcgggtttgccgactgccgaggcccgaaacccagaaggggccactgtgctcacccatcacactgggtttgttagtggccggcgtacttgtgctgctcgttagcttaggcgtggcaattcatctgtgctgtcgtcgacggagagcacggctccggttcatgaaacaactcaggctccaccctcttgaaaagtgcagcagaatggattactag

SEQ ID NO: 248090 - DNA, 666 bp, Artificial Sequence
  derived and/or modified sequence
atgaggccccggctgtggctgctgctggccgcccagctgactgtgctgcacggcaacagcgtgctgcagcagaccccagcctacatcaaggtgcagaccaacaagatggtgatgctgagctgtgaggccaagatcagcctgagcaacatgaggatctactggctgcggcagaggcaggcccccagcagtgacagccaccacgagttcctggccctgtgggacagcgccaagggcaccatccatggagaggaggtggagcaggagaagattgctgtgttcagagatgccagccgcttcatcctgaacctgacctctgtgaagccagaagattctggcatctacttctgcatgattgtgggcagccctgagctgaccttcggcaagggcacccagctgtctgtggtggacttcctgcccaccacagcccagcccaccaagaagagcaccctgaagaagagggtgtgccgcctgcccaggcctgagacccagaagggccccctgtgcagccccatcaccctgggcctgctggtggccggcgtgctggtgctgctggtgtccctgggcgtggccatccacctgtgctgcagaagaagaagagcccggctgcgcttcatgaagcagctgcggctgcaccccctggagaagtgcagcaggatggactactag

SEQ ID NO: 248091 - DNA, 666 bp, Artificial Sequence
  derived and/or modified sequence
atgcggccccggctgtggctgctgctggccgcccagctgaccgtgttacacggcaattcggttttgcaacaaactccagcgtatattaaggtgcagacaaataaaatggttatgctcagctgtgaagcaaagattagcctgtccaatatgaggatttattggctgcgccagagacaagcaccgtccagtgattcccaccacgaattcctcgcactatgggattcagctaagggtacgattcatggcgaggaggtggagcaagagaagatcgcggttttccgtgacgcttcaagatttatcctcaatctgaccagcgtgaagcccgaggacagcggcatctacttctgcatgatcgtgggctctccggaattgacattcgggaagggtacgcaactcagtgtggtggactttctcccaacaaccgctcagcccacgaagaagtccacactgaagaagagagtctgtcggttaccccggcccgagacacagaaagggccgctgtgtagccccattacacttggtctcctggtggcgggcgtgttggtgctgcttgtgagtttgggagtggcaatacatctctgttgtcggcgtaggcgggctaggctgcggtttatgaaacagttgcggctgcaccctctcgagaaatgctcaagaatggactattag

SEQ ID NO: 248092 - DNA, 666 bp, Artificial Sequence
  derived and/or modified sequence
atgcggcctaggctctggctactgcttgccgctcaactgacggtactacacggcaactccgtactccagcagacacccgcttatatcaaagttcagaccaacaaaatggttatgctaagttgtgaagctaagatctctctgtctaatatgcggatatactggctccggcagcggcaggcgcctagttcagattctcatcatgaattcttggctctctgggacagcgccaaaggtacaatccacggcgaggaagtcgaacaggaaaagatcgcggtgtttcgggacgcgagccggttcatccttaatctgacttccgtgaaaccagaggatagcggcatttacttctgcatgatcgtggggtcacctgagctgacattcggaaaaggcacgcagctgagcgttgtcgatttcctccccacgaccgcgcagcccactaaaaaaagcaccctgaaaaagcgggtctgtcgactgcccaggcccgaaacacaaaagggaccgctctgcagcccaatcaccctcggtctgttagtggcaggggtcctggtattactcgtgtcattaggggttgccattcacttgtgctgccgcaggcggcgtgctagactccggttcatgaagcaacttaggttacatcccctggaaaaatgttctagaatggactattag

SEQ ID NO: 248093 - DNA, 666 bp, Artificial Sequence
  derived and/or modified sequence
atgagacccagactgtggctgctgctggccgcccagctgaccgtgctgcacggcaacagcgtgctgcagcagacccccgcctacatcaaggtgcagaccaacaagatggtgatgctgagctgcgaggccaagatcagcctgagcaacatgagaatctactggctgagacagagacaggcccccagcagcgacagccaccacgagttcctggccctgtgggacagcgccaagggcaccatccacggcgaggaggtggagcaggagaagatcgccgtgttcagagacgccagcagattcatcctgaacctgaccagcgtgaagcccgaggacagcggcatctacttctgcatgatcgtgggcagccccgagctgaccttcggcaagggcacccagctgagcgtggtggacttcctgcccaccaccgcccagcccaccaagaagagcaccctgaagaagagagtgtgcagactgcccagacccgagacccagaagggccccctgtgcagccccatcaccctgggcctgctggtggccggcgtgctggtgctgctggtgagcctgggcgtggccatccacctgtgctgcagaagaagaagagccagactgagattcatgaagcagctgagactgcaccccctggagaagtgcagcagaatggactactag

SEQ ID NO: 248094 - protein, 213 aa, Artificial Sequence
  derived and/or modified sequence
MRPRLWLLLAAQLTVLHGNSVLQQTPAYIKVQTNKMVMLSCEAKISLSNMRIYWLRQRQAPSSDSHHEFLALWDSAKGTIHGEEVEQEKIAVFRDASRFILNLTSVKPEDSGIYFCMIVGSPELTFGKGTQLSVVDFLPTTAQPTKKSTLKKRVCRLPRPETQKGRRRRARLRFMKQPQGEGISGTFVPQCLHGYYSNTTTSQKLLNPWILKT

SEQ ID NO: 248095 - protein, 50 aa, Artificial Sequence
  derived and/or modified sequence
ERGRERRVKLRFSARPQGEGISGTFVPQCLHGYYSNTTTSQKLLNPWILK

SEQ ID NO: 248096 - DNA, 642 bp, Artificial Sequence
  derived and/or modified sequence
atgcgacccagactgtggctactgctcgcagcacagcttactgttctgcatggtaactctgtgctgcagcagacccccgcatatattaaagtgcagactaataagatggtgatgctgtcttgcgaagcaaagatttccttgtccaacatgcgaatttactggctgaggcaaaggcaggctccaagtagcgatagccaccatgaattcctggccctgtgggactccgctaagggaacaattcatggggaggaggtagagcaggagaagattgctgtgttccgagacgcctctcggtttatcctcaatctgacctcagtgaagccagaagatagtggaatctacttctgtatgattgttggatcccccgagctgaccttcggtaaaggtacacagctgtccgtggttgacttcttgccaactaccgcgcaaccaactaaaaaatcgacgctgaaaaagcgtgtgtgtaggttgcctcggccagaaactcaaaaaggacgccgcagaagggccagactgagattcatgaagcagccccagggggagggtatcagcggcaccttcgtgcctcagtgtctgcacggatactattctaacactacaacgtcacagaagttgcttaacccttggatactgaagacttag

SEQ ID NO: 248097 - DNA, 153 bp, Artificial Sequence
  derived and/or modified sequence
gagaggggtagggagcgccgggtaaaactccggttctctgctcggccccaaggggaaggaatttccggcaccttcgttcctcaatgcttgcacggctactatagtaacaccactaccagccagaagctacttaatccctggatccttaagtag

SEQ ID NO: 248098 - DNA, 642 bp, Artificial Sequence
  derived and/or modified sequence
atgaggccccggctgtggctgctgctggccgcccagctgactgtgctgcacggcaacagcgtgctgcagcagaccccagcctacatcaaggtgcagaccaacaagatggtgatgctgagctgtgaggccaagatcagcctgagcaacatgaggatctactggctgcggcagaggcaggcccccagcagtgacagccaccacgagttcctggccctgtgggacagcgccaagggcaccatccatggagaggaggtggagcaggagaagattgctgtgttcagagatgccagccgcttcatcctgaacctgacctctgtgaagccagaagattctggcatctacttctgcatgattgtgggcagccctgagctgaccttcggcaagggcacccagctgtctgtggtggacttcctgcccaccacagcccagcccaccaagaagagcaccctgaagaagagggtgtgccgcctgcccaggcctgagacccagaagggcagaagaagaagagcccggctgcgcttcatgaagcagccccagggcgagggcatcagcggcacctttgtgccccagtgcctgcacggctactacagcaacaccaccaccagccagaagctgctgaacccctggatcctgaagacctag

SEQ ID NO: 248099 - DNA, 153 bp, Artificial Sequence
  derived and/or modified sequence
gagcggggccgggagcggcgggtgaagctgcgcttcagcgcccggccccagggcgagggcatcagcggcacctttgtgccccagtgcctgcacggctactacagcaacaccaccaccagccagaagctgctgaacccctggatcctgaagtag

SEQ ID NO: 248100 - DNA, 642 bp, Artificial Sequence
  derived and/or modified sequence
atgcggccccggctgtggctgctgctggccgcccagctgaccgtgctccacggcaattccgtgctgcaacagactcctgcatacatcaaagtgcagaccaacaagatggtcatgctgtcatgcgaggccaaaatctctctctcaaatatgagaatttattggctgcggcagcgacaggcaccctcctcggattcgcaccatgaatttctcgcactttgggactccgccaagggcacgatacacggtgaggaagtcgaacaggaaaagatcgctgtcttccgggatgcatcgcgcttcatcttgaacctgacctctgtgaagcctgaggactctggaatttatttctgcatgattgtgggcagccccgagctgacgttcggaaagggtacgcagctctctgtcgttgactttctgcccacaaccgcccagcctaccaagaagtcaactctcaagaagcgtgtttgcagacttccacggcctgaaacccagaaaggaaggcggcggagggctagactgagatttatgaagcaacctcagggagaaggaatctcagggaccttcgtcccacagtgtcttcatgggtactacagtaacactaccacgtcccaaaaactactgaacccctggatcctgaagacctag

SEQ ID NO: 248101 - DNA, 153 bp, Artificial Sequence
  derived and/or modified sequence
gagcggggccgggagcggcgggtgaagctgcggttcagcgcccggcctcaaggggaagggatcagcggcaccttcgtgccacaatgcctgcacggctattatagtaatacaaccacaagtcaaaagctgctgaatccgtggatcttaaaatag

SEQ ID NO: 248102 - DNA, 642 bp, Artificial Sequence
  derived and/or modified sequence
atgaggccaaggctctggctgctgctggcggctcagctgaccgttctgcacggcaattcagtcctgcagcagacccccgcatatatcaaggtccagactaataaaatggtgatgctctcctgtgaagcaaagatctccctctcgaacatgcggatatattggctgagacaacgccaagcaccctcctccgacagccaccacgaatttctagccttgtgggatagtgcaaaaggcaccatccacggcgaggaagtggaacaagaaaaaattgctgtgtttagagatgctagtaggttcatcctgaatctgactagcgtaaaacctgaagactctggcatctacttctgcatgatcgtaggctcaccagagctgacctttggcaaaggcacccagctgagcgtcgtggatttcctccctactacagcacaacccactaagaagagcacccttaaaaagcgtgtctgtcggctgccccgacccgagacccagaagggacgaagacgtcgcgcaaggctgaggttcatgaagcagccccagggtgaagggatttccgggacttttgttccacagtgcctgcacggctactatagcaacacaacaacgtcccagaaactgctgaacccttggatcctcaaaacctag

SEQ ID NO: 248103 - DNA, 153 bp, Artificial Sequence
  derived and/or modified sequence
gagcgcggaagggagagaagagtcaagttgcgcttctcagctcggcctcagggagaaggaatcagcggaaccttcgttccacagtgtctacacgggtactactccaatactacaacatctcaaaagctgctaaacccctggatcctcaaatag

SEQ ID NO: 248104 - DNA, 849 bp, Artificial Sequence
  derived and/or modified sequence
gcgactgtctccgccgagcccccggggccaggtgtcccgggcgcgccacgatgcggccgcggctgtggctcctcttggccgcgcagctgacagttctccatggcaactcagtcctccagcagacccctgcatacataaaggtgcaaaccaacaagatggtgatgctgtcctgcgaggctaaaatctccctcagtaacatgcgcatctactggctgagacagcgccaggcaccgagcagtgacagtcaccacgagttcctggccctctgggattccgcaaaagggactatccacggtgaagaggtggaacaggagaagatagctgtgtttcgggatgcaagccggttcattctcaatctcacaagcgtgaagccggaagacagtggcatctacttctgcatgatcgtcgggagccccgagctgaccttcgggaagggaactcagctgagtgtggttgatttccttcccaccactgcccagcccaccaagaagtccaccctcaagaagagagtgtgccggttacccaggccagagacccagaagggccggcggaggagagcccggcttcgtttcatgaaacagcctcaaggggaaggtatatcaggaacctttgtcccccaatgcctgcatggatactacagcaatactacaacctcacagaagctgcttaacccatggatcctgaaaacataggcaagaagcacaggtcctgatgagtggatctttactacttttaccagattcctccctcgctcagagggatcctcccacacacccagcagagacttctctgccaccatcaaccccccaagtcatagggggctcaagttctgccctggtgagctgtggc

SEQ ID NO: 248105 - DNA, 150 bp, Artificial Sequence
  derived and/or modified sequence
gaaagagggagagagagaagagtgaaactgcgattttcggcaaggcctcaaggggaaggtatatcaggaacctttgtcccccaatgcctgcatggatactacagcaatactacaacctcacagaagctgcttaacccatggatcctgaaa

SEQ ID NO: 248106 - DNA, 642 bp, Artificial Sequence
  derived and/or modified sequence
atgagacccagactgtggctgctgctggccgcccagctgaccgtgctgcacggcaacagcgtgctgcagcagacccccgcctacatcaaggtgcagaccaacaagatggtgatgctgagctgcgaggccaagatcagcctgagcaacatgagaatctactggctgagacagagacaggcccccagcagcgacagccaccacgagttcctggccctgtgggacagcgccaagggcaccatccacggcgaggaggtggagcaggagaagatcgccgtgttcagagacgccagcagattcatcctgaacctgaccagcgtgaagcccgaggacagcggcatctacttctgcatgatcgtgggcagccccgagctgaccttcggcaagggcacccagctgagcgtggtggacttcctgcccaccaccgcccagcccaccaagaagagcaccctgaagaagagagtgtgcagactgcccagacccgagacccagaagggcagaagaagaagagccagactgagattcatgaagcagccccagggcgagggcatcagcggcaccttcgtgccccagtgcctgcacggctactacagcaacaccaccaccagccagaagctgctgaacccctggatcctgaagacctag

SEQ ID NO: 248107 - DNA, 153 bp, Artificial Sequence
  derived and/or modified sequence
gagagaggcagagagagaagagtgaagctgagattcagcgccagaccccagggcgagggcatcagcggcaccttcgtgccccagtgcctgcacggctactacagcaacaccaccaccagccagaagctgctgaacccctggatcctgaagtag

SEQ ID NO: 248108 - protein, 616 aa, Artificial Sequence
  derived and/or modified sequence
MEDSQDLNEQSVKKTCTESDVSQSQNSRSMEMQDLASPHTLVGGGDTPGSSKLEKSNLSSTSVTTNGTGVSLLAVKTEPLNSSETTATTGDGALDTFTGSVITSSGYSPRSAHQYSPQLYPSKPYPHILSTPAAQTMSAYAGQTQYSGMQQPAVYTAYSQTGQPYSLPTYDLGVMLPAIKTESGLSQTQSPLQSGCLSYSPGFSTPQPGQTPYSYQMPGSSFAPSSTIYANNSVSNSTNFSGSQQDYPSYTAFGQNQYAQYYSASTYGAYMTSNNTADGTPSSTSTYQLQESLPGLTNQPGEFDTMQSPSTPIKDLDERTCRSSGSKSRGRGRKNNPSPPPDSDLERVFVWDLDETIIVFHSLLTGSYAQKYGKDPPMAVTLGLRMEEMIFNLADTHLFFNDLEECDQVHIDDVSSDDNGQDLSTYSFATDGFHAAASSANLCLPTGVRGGVDWMRKLAFRYRRVKELYNTYKNNVGGLLGPAKRDAWLQLRAEIEGLTDSWLTNALKSLSIISTRSNCINVLVTTTQLIPALAKVLLYSLGGAFPIENIYSATKIGKESCFERIMQRFGRKVVYVVIGDGVEEEQAAKKHNMPFWRISSHSDLLALHQALELEYL

SEQ ID NO: 248109 - DNA, 4317 bp, Artificial Sequence
  derived and/or modified sequence
gggaaaagccggggagtgacgactgcggcggctgggcgcgctctctcattttcttttcttctcctttcccccctgtcgcagtccggagttttggctcctctcctttcctcctccccctcggagccggcttctccctccgccccgcttctcccccgcttgtgtacgctatttgttgtggggtggccgaaggggatgtcctgttttcaccagaggcacagcgcgaaggggaaacttcgacactggaaggaacgagaataaatacttaattacggacgcactgaaccgcggctgggacagacacttcgggaacccgaggcggaccgggcgacgagatagtcatttttacttgaaggaagctgcttctacttgggagtggcaggagaagtgagaaaaccacatggaagactcccaggatttaaatgaacaatcagtaaagaaaacgtgcacagaatcagatgtttcacaatctcagaattccaggtctatggaaatgcaggacctagcaagtcctcatactcttgttggaggtggtgatactccaggtagctccaaactggaaaaatctaatctcagcagcacatcagttactacaaatgggacaggagtgtctcttcttgcagtcaaaacagagcccttgaacagcagtgaaaccacagccacgactggagatggagcgcttgacacttttactgggtcagtaattacaagtagtggctacagccccagatcagcacatcagtattccccacagctgtatccttccaagccctatccacacattctttctacaccagcagctcaaacaatgtctgcctatgcaggccagactcagtattcggggatgcagcagccagccgtctacacagcctactcacagacaggacagccctacagcttgcccacttacgatttgggtgtgatgttgccagccatcaagacagagagtggactttcccaaactcagtccccattacagagtggctgcctcagttacagcccagggttctctaccccacagccaggccagacaccttattcttaccaaatgccaggttctagttttgcaccatcatctactatttatgcaaataattcagtttccaattcaacgaatttcagtggttcacaacaggattatccatcctatacagcctttggccaaaaccagtatgcacagtattattcagcatcaacgtatggagcgtatatgacatcgaataacacagccgatggcacaccctcttcaacctctacttatcagttgcaggaatctctcccaggactgactaaccaaccaggagagttcgataccatgcagagtccctccacacccatcaaagatcttgatgagagaacctgtaggagttctgggtcaaagtccagaggaagaggccggaaaaataatccctccccgcctcctgatagtgacctggagcgtgtgtttgtctgggatttggatgaaaccatcattgtttttcactcactgctcaccgggtcttatgcacagaagtatggcaaggatccccccatggctgtaacccttggactccgcatggaagaaatgatttttaatcttgctgatactcatttgttttttaatgatttagaggagtgtgatcaagttcatatagatgatgtttcctctgatgataatgggcaggacttaagtacctacagttttgcaactgatggcttccatgcagctgcaagtagtgcaaacctttgtttgccaacaggtgtaagaggaggggttgactggatgaggaagttggcttttcgttacagaagagtaaaagaattatataacacctacaagaacaacgttggaggactccttggccctgccaagagggatgcctggctacagttaagggcagagattgaaggtctgacagattcctggctaacaaatgcacttaagtctttatcaattattagcactaggagtaactgcataaatgtcttggtaacgacaactcaactgatcccagcacttgcgaaggttctactctatagtttaggaggtgctttccccattgagaatatttacagtgcaactaaaataggaaaagaaagttgctttgaacgaataatgcaaaggtttggcagaaaagtagtgtatgttgtaattggggatggtgtagaagaagaacaggcagcaaaaaagcacaacatgcccttctggaggatatccagtcactcagacctcctggctctccaccaagcactggaattagagtatttgtaactgtgttctttagccggagatccattttttatatttcaagtacactgaatttttatgtgtgattcaatgcctctggctctacacatataaattgtcttaatggatgaaatcatatttggaataaaaattccagaatgaagaattcagattgctgaatggagttaaactttagtgctacagaaaagaaactctatggtcttatatttacaacactttaatgggttttttaaaaatctgtggaggttgctggtacacaccaaatgagtccaaactggaatgagcagctttagcaaagaactcttaccctggcaaagcagcaacacacatgctccgtctgacaaggtggtcaacaacattcctcaaaatgggagatcttctcagccctgaggtttgaatctgactttagcctacctaacccagaaaatctgaattggaatgcactcagactgtataaggacagtcctatttagacatgtaatttgtgtaaattattgatgaaaataatttactgtgactttattagcagctgactttcaaagtggatgcaatttttctttcttttgttggggaggggaatgggaggggaaatgggaatataatattgtctcttttttaagtttggcaaacagaatgttcatactgatgtgttgtgccttaaagacaagacagcatttgtgtgttacaatgtaactttggttaaaatctctgtagataatgaaaaaaaacaaaaaaaaaaacctttgtgatgattcttaacatgaccaaatttaaaagtcaagctctcagagcttaattaccgcatcagcaagaaactgagtattttttgcaataagaaaacaacaataataaaggaaagcttgtgtttcatttgggttcttaataattccaataattgtatgaggcaactatttgcgcatccaaccatgagtggaaggtttgggaaagactgtgggacctttacttagaaagtgaaatgtatgtagaagtctcaagtaccccttctacagttttactggagaaaactaagagccatattcatgacaacttgcacagttttgaggttgagacttttgatatgtgtaagttgcatagaggaggatattatcatgcaaatcatgagcaattatcacataaacttttttagaatgtgccatgaacatggcataaaattcacattgagtgcacagggcttaaaataaagctaagtatgtttattcccaatgccatggcaaaaatgataatatcatcagaaatggaaggcagttctcccagatggtgtctaatgaaagcaatgagtctatgaaaattttacctagaatatcatcataaattaaattagcaagtgcgctggatcttggcagcgctgctgaaatgacaacagtaaaataatacctggttctccatctgaatacatcaatgcaggttctcctcgtaacagacttgcatatgtttgttagtttctgcctgtattgtcactgcgcaacggatggcattcattacaagaagagcccatcatcgttgtgtttgcatggtttttttccttgtgtgtagcccatgttgggaacacgatacaggttctcctcttatttcctatgacacgatttcccttgtggaaatttaagactttaagaactagagtatttttatggtgtctgcacctgcagttctgtgtttaaaatgtcataatgtggatcctggagtcaggctactagtcagtgcccctagccagaggctggttcatgagttcatcaactgaggcctctgtggcttcaataaagtctacattttgctcacagatcacaacattcactgtggaaatatgatttcatttctttaggctacaaacctgtatttctttactgaatgctaaggccatgtttatattgggtagaaagatattgagatcccaattttgtacaagattgtgatttcattatctaaaccttaaacttaatcctttaaattttgtagcttttggctgcatctgccccaagtactattccaggcaaattaaagttggaatacctttaataatataaaaataatgatagtaaatcttatacttctgt

SEQ ID NO: 248110 - DNA, 1851 bp, Artificial Sequence
  derived and/or modified sequence
atggaagacagtcaggatctcaacgagcagagtgtcaagaaaacatgtactgaaagtgacgtatcacaatctcagaactctaggtctatggagatgcaagatctggcaagtccgcacactttggtgggtggcggcgacacaccagggagctctaagctggagaaatccaacctctctagtacaagcgtgactaccaatggaaccggcgtgtcgctcctggctgtgaaaacagagcctctgaactcttcagaaactaccgctacaactggcgatggcgcgcttgacaccttcactgggtcagtgataacctcctcagggtacagtcctcgttctgcccatcagtactcacctcaattataccctagcaaaccatacccccacatcctaagcacacccgccgcccagactatgagcgcttatgcaggtcagactcagtactcaggaatgcagcagcctgccgtgtatactgcttactcccaaactggacaaccctattcactgcctacatatgacttgggtgtgatgcttcctgctatcaagaccgaaagtggactgtcacagacacaatcaccactccagtctggctgcttatcttatagtcctgggtttagcacaccccagccaggacagacaccttatagctaccagatgcctgggagtagtttcgccccttcttcaactatctacgcaaataactctgtgtccaattctacaaatttttccgggtcacagcaagactatccttcttacacagcctttggccagaaccagtacgcacagtactactccgcatctacatacggggcgtatatgacatcaaacaacaccgctgatggcactccgagctctacctctacctaccagctgcaggaaagtctgccgggcctgacaaatcaacctggggagttcgacacgatgcagtcaccaagcactccaattaaagacctggatgagcgcacttgccggtccagcggtagcaagtctcgaggaagagggcggaagaataatcccagcccacccccagatagcgatctggagcgagtgttcgtttgggacctggacgaaaccatcatcgtttttcactcactcctgaccggaagctatgcccagaaatacgggaaagacccacccatggctgtaaccctgggacttcggatggaggagatgatttttaacctcgcagatacgcacctcttctttaacgatttggaagagtgtgaccaggtacatatcgacgacgtttcaagcgatgacaacgggcaggacctgagcacgtatagttttgccaccgatgggttccacgccgccgcgagttccgcaaacctatgtctaccaaccggcgtgaggggtggagtcgattggatgcggaagctggcattccgctacaggcgcgtcaaagaactttacaacacttataaaaataacgtgggcggcctgctcgggccggcgaagagagacgcctggctgcagttgagagccgagatcgaagggctgactgattcgtggctgacaaatgcgctgaagagcctctcaatcatctcaacccgaagtaattgcataaacgtcctcgtgaccactacacagctgattcccgcacttgccaaggtgttgctttactcgctggggggcgcttttccaatcgagaacatctattcggcaaccaagattggtaaggaatcttgctttgagcgtattatgcagcgatttgggcgcaaggtcgtgtatgtggtaatcggagacggggttgaggaggagcaggctgcaaagaagcacaatatgcctttttggcggatatcctctcattcagacttgcttgctttgcaccaggcccttgagctggagtacctgtag

SEQ ID NO: 248111 - DNA, 1851 bp, Artificial Sequence
  derived and/or modified sequence
atggaggacagccaggacctgaatgagcagagcgtgaagaagacctgcacagaaagtgatgtgtcccagagccagaacagccgctccatggagatgcaggacctggccagcccccacaccctggtgggcggcggggacaccccaggcagcagcaagctggagaagagcaacctgagcagcacctctgtgaccaccaacggcaccggggtgtccctgctggccgtgaagacagagcccctgaacagcagcgagaccacagccaccactggagatggagccctggacaccttcaccggcagcgtcatcaccagcagcggctacagccccaggtctgcccaccagtacagcccccagctgtaccccagcaagccctacccccacatcctgagcaccccagctgcccagaccatgtctgcctatgccggccagacccagtacagcggcatgcagcagcctgctgtgtacacagcctacagccagacaggccagccctacagcctgcccacctatgacctgggcgtgatgctgcctgccatcaagacagaaagtggcctgagccagacccagagccccctgcagagcggctgcctgagctacagccctggcttcagcaccccccagcccggccagaccccctacagctaccagatgcctggcagcagctttgcccccagcagcaccatctatgccaacaacagcgtgagcaacagcaccaacttcagcggcagccagcaggactaccccagctacacagccttcggccagaaccagtatgcccagtactacagcgccagcacctatggagcctacatgaccagcaacaacacagcagatggcacccccagcagcaccagcacctaccagctgcaggagagcctgcccggcctgaccaaccagcccggggagtttgacaccatgcagagccccagcacccccatcaaggacctggatgagaggacctgccgcagcagcggcagcaagagccggggccggggcaggaagaacaaccccagccccccaccagacagcgacctggagcgggtgtttgtgtgggacctggatgagaccatcatcgtgttccacagcctgctgaccggcagctatgcccagaagtatggcaaggacccccccatggctgtgaccctgggcctgaggatggaggagatgatcttcaacctggccgacacccacctgttcttcaatgacctggaggagtgtgaccaggtgcacattgatgatgtgtccagtgatgacaatggccaggacctgagcacctacagctttgccacagatggcttccacgccgccgccagcagcgccaacctgtgcctgcccaccggggtgcggggcggcgtggactggatgaggaagctggccttccgctacagaagagtgaaggagctgtacaacacctacaagaacaacgtgggcggcctgctgggccctgccaagagagatgcctggctgcagctgcgggcagaaattgagggcctgacagacagctggctgaccaatgccctgaagagcctgagcatcatcagcaccaggagcaactgcatcaacgtgctggtgaccaccacccagctgatcccagccctggccaaggtgctgctgtacagcctgggcggggccttccccatcgagaacatctacagcgccaccaagattggcaaggagagctgctttgagcgcatcatgcagagatttggaaggaaggtggtgtatgtggtgattggagatggagtggaggaggagcaggccgccaagaagcacaacatgcccttctggaggatcagcagccacagcgacctgctggccctgcaccaggccctggagctggagtacctgtag

SEQ ID NO: 248112 - DNA, 1851 bp, Artificial Sequence
  derived and/or modified sequence
atggaggacagccaggacctgaacgagcagagcgtgaagaagacctgtactgaaagcgatgtgtcccagtctcagaacagcaggagcatggaaatgcaggacctggcatcccctcatactcttgttggaggaggcgacacaccgggctcttctaaactcgaaaagtccaacctgtccagcacatcagttaccaccaatgggaccggagtctcgctgttggcagtgaagactgagcccctgaactcatcagagacaactgcaactacaggggacggcgcattggacacattcacaggctccgttatcacatcttcaggctattcgccaaggtctgcgcatcagtatagtccccagctgtatccttctaagccgtacccgcacatcctttctacccctgcggcacaaactatgagtgcctatgctgggcagacccagtactccggcatgcaacagccggcagtttacacagcctacagtcagaccggacagccctactccctgccaacgtacgacttaggggtgatgctgcctgccatcaagaccgaatcaggcctgagccagacacagagccctttgcagtcaggctgtctgtcttatagccccggctttagcacacctcagccagggcaaacaccatactcttaccaaatgcccggatccagctttgctccttctagcacaatttacgctaacaacagcgtgtccaatagtactaatttctctggttcgcagcaggactatccttcttacaccgccttcggacagaaccaatatgcccagtattactctgcttctacatacggggcctacatgaccagcaacaacaccgcagacggcacccccagttcaacatcaacgtatcagctgcaagagtcactgcccgggctgacaaatcagccaggcgaatttgatactatgcaatctcccagcactcctattaaggacctggacgagagaacctgtcgcagcagcggcagcaaatcaaggggtcggggccgcaaaaacaacccgtccccgcctccagacagcgatctggagagggtgttcgtatgggatctggatgaaactataattgtattccacagcctgcttaccgggtcatacgcccaaaaatacggaaaggaccctcctatggctgtcacgctcggtctgagaatggaggagatgattttcaatctggccgacactcatctgttcttcaatgacctggaggagtgcgaccaggtgcatatagatgacgtgtcatctgacgataacggacaggacctgagcacgtactcctttgctacagacggcttccacgcagctgcatcgagcgccaacctatgtctgccgactggcgtaaggggaggtgtggattggatgcgcaagctggcctttaggtacagaagagttaaggaactgtataacacttataagaataatgtcggtggccttctggggcctgctaagagagacgcttggttacaactgcgggccgagatcgaaggtttgacagattcttggctgacaaatgctttaaagtccctgagtatcatctcaactagaagcaattgtatcaacgtgctcgtgaccaccacacagctcattccagctctggcgaaggtgcttctttattcacttggcggcgctttcccgattgaaaacatctattcggccactaagatcggcaaggaaagttgcttcgaacgtataatgcagcgcttcgggcgtaaggtggtatatgttgtcatcggggacggcgtggaagaagagcaggccgccaaaaaacacaacatgccattttggaggatcagctcacactccgatttgctcgccctccaccaggcattggaactagagtacctctag

SEQ ID NO: 248113 - DNA, 1851 bp, Artificial Sequence
  derived and/or modified sequence
atggaagactcccaggacctgaatgaacagtctgtgaagaagacatgcacagagtcagatgtctcacagagccagaattcaaggagcatggagatgcaggacttggcatctccccatacgctggttggcggtggggatacacctggcagctctaaactcgaaaaaagcaacctgtcttccacttctgttactacaaatggaactggcgtctcactcctggcggtgaaaaccgagcctctgaatagcagcgaaacaaccgcgaccaccggcgatggcgcactggacacctttacaggatcagttattacttctagtgggtacagccctcgttcagctcatcaatactcaccacagctgtatcctagcaaaccctatcctcatatactctctacgcccgctgcacagactatgagcgcctacgcaggtcagacacagtacagtggcatgcaacaaccagctgtgtacaccgcatactcccagacgggccagccttactcgttgccgacgtatgatctcggcgtaatgctgcctgccattaaaaccgagagcggactgtcacaaacccagagcccacttcagtctggatgtttgtcttactcccctgggttctctactcctcagcccggacagaccccatattcgtaccaaatgcccggatcttccttcgccccatccagtactatctacgccaataacagtgtgagcaactccacaaacttctcaggctcccaacaggattacccatcctacactgcgtttgggcagaaccaatacgcccagtattactccgcttctacctacggagcctacatgacctctaataatactgccgatggaaccccttccagtacgtccacatatcagctgcaggagagtctgccaggattgaccaatcaacccggtgagtttgatacgatgcaatccccaagtacgcccatcaaagatttggatgagcgcacctgcaggtcatcaggctctaagtcccggggtcggggtaggaagaacaacccttcccccccacccgattccgatctcgagcgagtattcgtttgggatcttgatgagaccattatcgtgttccactctctgctgaccggatcatacgcccagaagtacggtaaggaccctcctatggcggtgacactggggttgaggatggaagaaatgatcttcaacctggccgatacgcatcttttcttcaacgatctcgaggagtgcgatcaagtgcacatcgacgatgtgagtagcgatgataatggacaggatttaagcacatacagttttgcaacagacggcttccatgcagcagcatcaagcgctaacctgtgcctccctaccggggtgcggggtggggtggactggatgcgaaagctggctttccggtaccgccgtgtcaaagaattgtacaacacttataaaaacaatgtaggcggacttctcggcccagccaagcgcgatgcctggctgcagctcagggcggaaatagaagggctgactgactcttggctcacaaatgctctgaagagcctgtcaatcatatccacccgaagcaattgcatcaatgttttggttactactacccagctgatccctgccttggcgaaagttctgttatattccttgggcggagcgttccctattgaaaatatatactcagctactaagattggtaaagagtcttgctttgagcgaattatgcagcggtttgggagaaaggtcgtgtacgtcgtaattggggatggtgtggaagaggagcaggctgccaagaagcataacatgcccttttggcgtatctcaagccatagcgacctgctggctttgcatcaggctctcgaactggaatacctctag

SEQ ID NO: 248114 - DNA, 1851 bp, Artificial Sequence
  derived and/or modified sequence
atggaggacagccaggacctgaacgagcagagcgtgaagaagacctgcaccgagagcgacgtgagccagagccagaacagcagaagcatggagatgcaggacctggccagcccccacaccctggtgggcggcggcgacacccccggcagcagcaagctggagaagagcaacctgagcagcaccagcgtgaccaccaacggcaccggcgtgagcctgctggccgtgaagaccgagcccctgaacagcagcgagaccaccgccaccaccggcgacggcgccctggacaccttcaccggcagcgtgatcaccagcagcggctacagccccagaagcgcccaccagtacagcccccagctgtaccccagcaagccctacccccacatcctgagcacccccgccgcccagaccatgagcgcctacgccggccagacccagtacagcggcatgcagcagcccgccgtgtacaccgcctacagccagaccggccagccctacagcctgcccacctacgacctgggcgtgatgctgcccgccatcaagaccgagagcggcctgagccagacccagagccccctgcagagcggctgcctgagctacagccccggcttcagcaccccccagcccggccagaccccctacagctaccagatgcccggcagcagcttcgcccccagcagcaccatctacgccaacaacagcgtgagcaacagcaccaacttcagcggcagccagcaggactaccccagctacaccgccttcggccagaaccagtacgcccagtactacagcgccagcacctacggcgcctacatgaccagcaacaacaccgccgacggcacccccagcagcaccagcacctaccagctgcaggagagcctgcccggcctgaccaaccagcccggcgagttcgacaccatgcagagccccagcacccccatcaaggacctggacgagagaacctgcagaagcagcggcagcaagagcagaggcagaggcagaaagaacaaccccagccccccccccgacagcgacctggagagagtgttcgtgtgggacctggacgagaccatcatcgtgttccacagcctgctgaccggcagctacgcccagaagtacggcaaggacccccccatggccgtgaccctgggcctgagaatggaggagatgatcttcaacctggccgacacccacctgttcttcaacgacctggaggagtgcgaccaggtgcacatcgacgacgtgagcagcgacgacaacggccaggacctgagcacctacagcttcgccaccgacggcttccacgccgccgccagcagcgccaacctgtgcctgcccaccggcgtgagaggcggcgtggactggatgagaaagctggccttcagatacagaagagtgaaggagctgtacaacacctacaagaacaacgtgggcggcctgctgggccccgccaagagagacgcctggctgcagctgagagccgagatcgagggcctgaccgacagctggctgaccaacgccctgaagagcctgagcatcatcagcaccagaagcaactgcatcaacgtgctggtgaccaccacccagctgatccccgccctggccaaggtgctgctgtacagcctgggcggcgccttccccatcgagaacatctacagcgccaccaagatcggcaaggagagctgcttcgagagaatcatgcagagattcggcagaaaggtggtgtacgtggtgatcggcgacggcgtggaggaggagcaggccgccaagaagcacaacatgcccttctggagaatcagcagccacagcgacctgctggccctgcaccaggccctggagctggagtacctgtag

SEQ ID NO: 248115 - protein, 639 aa, Artificial Sequence
  derived and/or modified sequence
MEDSQDLNEQSVKKTCTESDVSQSQNSRSMEMQDLASPHTLVGGGDTPGSSKLEKSNLSSTSVTTNGTGGENMTVLNTADWLLSCNTPSSATMSLLAVKTEPLNSSETTATTGDGALDTFTGSVITSSGYSPRSAHQYSPQLYPSKPYPHILSTPAAQTMSAYAGQTQYSGMQQPAVYTAYSQTGQPYSLPTYDLGVMLPAIKTESGLSQTQSPLQSGCLSYSPGFSTPQPGQTPYSYQMPGSSFAPSSTIYANNSVSNSTNFSGSQQDYPSYTAFGQNQYAQYYSASTYGAYMTSNNTADGTPSSTSTYQLQESLPGLTNQPGEFDTMQSPSTPIKDLDERTCRSSGSKSRGRGRKNNPSPPPDSDLERVFVWDLDETIIVFHSLLTGSYAQKYGKDPPMAVTLGLRMEEMIFNLADTHLFFNDLEECDQVHIDDVSSDDNGQDLSTYSFATDGFHAAASSANLCLPTGVRGGVDWMRKLAFRYRRVKELYNTYKNNVGGLLGPAKRDAWLQLRAEIEGLTDSWLTNALKSLSIISTRSNCINVLVTTTQLIPALAKVLLYSLGGAFPIENIYSATKIGKESCFERIVSRFGTNITYVVIGDGRDEEHAANQHNMPFWRISSHSDLLALHQALELEYL

SEQ ID NO: 248116 - DNA, 5692 bp, Artificial Sequence
  derived and/or modified sequence
gcaaaacttccatcctgtccacgtgaagttgtcgctgccttagagagggggaaagagctgcgggaaaagccggggagtgacgactgcggcggctgggcgcgctctctcattttcttttcttctcctttcccccctgtcgcagtccggagttttggctcctctcctttcctcctccccctcggagccggcttctccctccgccccgcttctcccccgcttgtgtacgctatttgttgtggggtggccgaaggggatgtcctgttttcaccagaggcacagcgcgaaggggaaacttcgacactggaaggaacgagaataaatacttaattacggacgcactgaaccgcggctgggacagacacttcgggaacccgaggcggaccgggcgacgagatagtcatttttacttgaaggaagctgcttctacttgggagtggcaggagaagtgagaaaaccacatggaagactcccaggatttaaatgaacaatcagtaaagaaaacgtgcacagaatcagatgtttcacaatctcagaattccaggtctatggaaatgcaggacctagcaagtcctcatactcttgttggaggtggtgatactccaggtagctccaaactggaaaaatctaatctcagcagcacatcagttactacaaatgggacaggaggggaaaacatgactgttttaaacacagcagactggttgctgagttgcaacaccccctcttctgcaacaatgtctcttcttgcagtcaaaacagagcccttgaacagcagtgaaaccacagccacgactggagatggagcgcttgacacttttactgggtcagtaattacaagtagtggctacagccccagatcagcacatcagtattccccacagctgtatccttccaagccctatccacacattctttctacaccagcagctcaaacaatgtctgcctatgcaggccagactcagtattcggggatgcagcagccagccgtctacacagcctactcacagacaggacagccctacagcttgcccacttacgatttgggtgtgatgttgccagccatcaagacagagagtggactttcccaaactcagtccccattacagagtggctgcctcagttacagcccagggttctctaccccacagccaggccagacaccttattcttaccaaatgccaggttctagttttgcaccatcatctactatttatgcaaataattcagtttccaattcaacgaatttcagtggttcacaacaggattatccatcctatacagcctttggccaaaaccagtatgcacagtattattcagcatcaacgtatggagcgtatatgacatcgaataacacagccgatggcacaccctcttcaacctctacttatcagttgcaggaatctctcccaggactgactaaccaaccaggagagttcgataccatgcagagtccctccacacccatcaaagatcttgatgagagaacctgtaggagttctgggtcaaagtccagaggaagaggccggaaaaataatccctccccgcctcctgatagtgacctggagcgtgtgtttgtctgggatttggatgaaaccatcattgtttttcactcactgctcaccgggtcttatgcacagaagtatggcaaggatccccccatggctgtaacccttggactccgcatggaagaaatgatttttaatcttgctgatactcatttgttttttaatgatttagaggagtgtgatcaagttcatatagatgatgtttcctctgatgataatgggcaggacttaagtacctacagttttgcaactgatggcttccatgcagctgcaagtagtgcaaacctttgtttgccaacaggtgtaagaggaggggttgactggatgaggaagttggcttttcgttacagaagagtaaaagaattatataacacctacaagaacaacgttggaggactccttggccctgccaagagggatgcctggctacagttaagggcagagattgaaggtctgacagattcctggctaacaaatgcacttaagtctttatcaattattagcactaggagtaactgcataaatgtcttggtaacgacaactcaactgatcccagcacttgcgaaggttctactctatagtttaggaggtgctttccccattgagaatatttacagtgcaactaaaataggcaaggaaagctgttttgagcgtatagtgtccagatttggcactaacataacttatgttgtgattggagatggccgagatgaggagcatgccgctaaccagcacaacatgcccttctggaggatatccagtcactcagacctcctggctctccaccaagcactggaattagagtatttgtaactgtgttctttagccggagatccattttttatatttcaagtacactgaatttttatgtgtgattcaatgcctctggctctacacatataaattgtcttaatggatgaaatcatatttggaataaaaattccagaatgaagaattcagattgctgaatggagttaaactttagtgctacagaaaagaaactctatggtcttatatttacaacactttaatgggttttttaaaaatctgtggaggttgctggtacacaccaaatgagtccaaactggaatgagcagctttagcaaagaactcttaccctggcaaagcagcaacacacatgctccgtctgacaaggtggtcaacaacattcctcaaaatgggagatcttctcagccctgaggtttgaatctgactttagcctacctaacccagaaaatctgaattggaatgcactcagactgtataaggacagtcctatttagacatgtaatttgtgtaaattattgatgaaaataatttactgtgactttattagcagctgactttcaaagtggatgcaatttttctttcttttgttggggaggggaatgggaggggaaatgggaatataatattgtctcttttttaagtttggcaaacagaatgttcatactgatgtgttgtgccttaaagacaagacagcatttgtgtgttacaatgtaactttggttaaaatctctgtagataatgaaaaaaaacaaaaaaaaaaacctttgtgatgattcttaacatgaccaaatttaaaagtcaagctctcagagcttaattaccgcatcagcaagaaactgagtattttttgcaataagaaaacaacaataataaaggaaagcttgtgtttcatttgggttcttaataattccaataattgtatgaggcaactatttgcgcatccaaccatgagtggaaggtttgggaaagactgtgggacctttacttagaaagtgaaatgtatgtagaagtctcaagtaccccttctacagttttactggagaaaactaagagccatattcatgacaacttgcacagttttgaggttgagacttttgatatgtgtaagttgcatagaggaggatattatcatgcaaatcatgagcaattatcacataaacttttttagaatgtgccatgaacatggcataaaattcacattgagtgcacagggcttaaaataaagctaagtatgtttattcccaatgccatggcaaaaatgataatatcatcagaaatggaaggcagttctcccagatggtgtctaatgaaagcaatgagtctatgaaaattttacctagaatatcatcataaattaaattagcaagtgcgctggatcttggcagcgctgctgaaatgacaacagtaaaataatacctggttctccatctgaatacatcaatgcaggttctcctcgtaacagacttgcatatgtttgttagtttctgcctgtattgtcactgcgcaacggatggcattcattacaagaagagcccatcatcgttgtgtttgcatggtttttttccttgtgtgtagcccatgttgggaacacgatacaggttctcctcttatttcctatgacacgatttcccttgtggaaatttaagactttaagaactagagtatttttatggtgtctgcacctgcagttctgtgtttaaaatgtcataatgtggatcctggagtcaggctactagtcagtgcccctagccagaggctggttcatgagttcatcaactgaggcctctgtggcttcaataaagtctacattttgctcacagatcacaacattcactgtggaaatatgatttcatttctttaggctacaaacctgtatttctttactgaatgctaaggccatgtttatattgggtagaaagatattgagatcccaattttgtacaagattgtgatttcattatctaaaccttaaacttaatcctttaaattttgtagcttttggctgcatctgccccaagtactattccaggcaaattaaagttggaatacctttaataatataaaaataatgatagtaaatcttatacttctgttggcccttagcttgaaaatagcagttaaaaaaatttaaatgttgccttgattatcagtacttaattatgttgtgcactaaaaccttaaatatttattactgtgaataaaaacaaattatctttactgtatagctggtttctttaaatgttgatagaattgtggcattacatctaaatttgtaagtcttttcatatcaaacaagcaaggctttttatgctgctaagtctgtgggtgcagaaagaaacaccccttggaagggcaaagagaagccggctggttgcatcaccccgtgcagtttctcacacacatctctttttctgattctgtgttcagaagaggctgccggcataaaacctaaatgcaaggttgacggagaacagcttgtctggcacaacaatggtgcaggcccacgagccagcatcacagcttggccatgggacgttgagtatgcacaaactagaactcttcccttcccaccttaggaatagaaaatcctcttcctttctaatctgaaaaacgaaaactgaacaaacacaaaaccaaccccttggcagttcccacctcctattgacatatggaatattgtgccttattgtaaaccagtttgaaaaatgttctgtaactaaagtgggttttcggctattatgtatacagcttggtatattactacgaaagataaccaccttgtgttgcaccttaaaaatatcaagaccatgtaatttccataacaaaataggtggcctggctatggtattatagcatacaattaggacactatgcccctgcaaaattttgtaaatcaaattcagaggcaaaaacatattttagaatcatacagtttgcacacgacaagtaggtaataactgtctctaaaaatgttttctccttagtccgcaatgagctaagattcagaatagtgtcaacagcatgctcctatatgaagttgttttttttaaagcacatttgtttatgacaagcctacattctcagtgaatatggcatttagtatttcttttgaaaacaaacttaagcatcatgagccaaagttgcactttgactcccaactacggtagcattatggacatctcacaatgtcaagggtttctgttatgtattagtaaagtatagattattggggcctacataatttaaaagaaatgtaaattaatattaaaagcttgtaaaaatatgtatatctttactatttctcaataaatacctttgcaattgttttcatttccttc

SEQ ID NO: 248117 - DNA, 1920 bp, Artificial Sequence
  derived and/or modified sequence
atggaagattcccaggacctcaacgaacagagcgtcaagaagacttgtactgaatctgatgtgtcacagagccagaatagcaggtctatggaaatgcaggatcttgcctcaccacatacgctggttggagggggcgatacccccggttcctcaaaactggaaaaaagtaacctgtcttcgacctccgtaaccactaatggaaccggtggggagaacatgactgttctgaacactgctgactggctcctaagctgtaatactccatcttccgccaccatgtccttactggctgtaaagaccgaacccctgaatagctccgaaacaaccgcaaccactggcgacggcgccctggatacctttaccggcagcgtcattaccagcagcgggtactccccacggagcgcccaccagtactcaccccagctgtacccttccaagccgtaccctcatatcctcagcacaccagcagcccaaactatgtcggcctacgccggtcagacccagtacagcggaatgcaacagcccgcggtgtacactgcttacagccaaaccggtcaaccttactccctccctacctacgacttgggggtaatgctccccgctataaagacagagtctggcctgtcgcagacacagagtcccctccagtcaggctgcctgagctattccccaggtttttctaccccacagccaggacaaaccccttactcttatcaaatgcctggatcctccttcgcccccagttccactatttacgccaataactccgtcagtaactctactaacttctctgggtcccagcaggattacccaagctacactgccttcggccagaaccagtatgcacagtattattccgcctccacatatggcgcctatatgacttcaaacaacactgccgatggaaccccatctagcacctcgacatatcagctgcaggaatcgctgccaggtctcactaaccagcctggagaatttgataccatgcagagtcccagcacacccattaaggatctcgacgagcgtacttgcaggtcatccggatctaagagcaggggcagagggaggaaaaacaatccaagtcctccccccgacagtgacctcgagagagtattcgtgtgggatctcgacgaaacaataatagtcttccacagcctcctgactgggagctacgctcagaaatatggtaaagatccccctatggcagtaacattaggactcagaatggaggagatgatatttaatctggcagatacccacttgttttttaatgacttagaggagtgtgaccaggtacatatcgacgacgtatcttccgatgacaatggccaggacctgagtacgtactccttcgctacagacggatttcacgcagcagcgtcttcagccaatctatgtctgcccaccggggttagggggggagttgattggatgagaaagcttgccttccggtaccgtcgggtgaaggaactgtataacacttacaaaaataatgtgggggggctcctcgggcctgccaaaagagacgcctggttgcagctccgggcagaaatcgagggtttgacagactcatggttgactaatgccctgaagagcttatctatcatatccacacgcagcaactgcattaatgtgctggtcactacaactcagctgatacccgctctggcgaaggtcctgctctacagcctcggcggggcatttcccattgagaatatttacagcgccacaaaaattggcaaagagtcctgttttgagagaatcgtgagccgctttggtaccaatatcacatatgtcgtcattggagacggtagagacgaggagcatgccgcaaatcagcataacatgcccttttggcgcatctccagccatagcgacctgctagccctgcatcaagcattagagctggagtacttatag

SEQ ID NO: 248118 - DNA, 1920 bp, Artificial Sequence
  derived and/or modified sequence
atggaggacagccaggacctgaatgagcagagcgtgaagaagacctgcacagaaagtgatgtgtcccagagccagaacagccgctccatggagatgcaggacctggccagcccccacaccctggtgggcggcggggacaccccaggcagcagcaagctggagaagagcaacctgagcagcacctctgtgaccaccaacggcactggaggagagaacatgacagtgctgaacacagctgactggctgctgagctgcaacacccccagcagcgccaccatgagcctgctggccgtgaagacagagcccctgaacagcagcgagaccacagccaccactggagatggagccctggacaccttcaccggcagcgtcatcaccagcagcggctacagccccaggtctgcccaccagtacagcccccagctgtaccccagcaagccctacccccacatcctgagcaccccagctgcccagaccatgtctgcctatgccggccagacccagtacagcggcatgcagcagcctgctgtgtacacagcctacagccagacaggccagccctacagcctgcccacctatgacctgggcgtgatgctgcctgccatcaagacagagagcggcctgagccagacccagagccccctgcagagcggctgcctgagctacagccctggcttcagcaccccccagcccggccagaccccctacagctaccagatgcctggcagcagctttgcccccagcagcaccatctatgccaacaacagcgtgagcaacagcaccaacttcagcggcagccagcaggactaccccagctacacagccttcggccagaaccagtatgcccagtactacagcgccagcacctacggggcctacatgaccagcaacaacacagcagatggcacccccagcagcaccagcacctaccagctgcaggagagcctgcccggcctgaccaaccagcctggagaatttgacaccatgcagagccccagcacccccatcaaggacctggatgagaggacctgccgcagcagcggcagcaagagccggggccggggcaggaagaacaaccccagccccccaccagacagcgacctggagcgggtgtttgtgtgggacctggatgagaccatcatcgtgttccacagcctgctgaccggcagctatgcccagaagtatggcaaggacccccccatggctgtgaccctgggcctgaggatggaggagatgatcttcaacctggccgacacccacctgttcttcaatgacctggaggagtgtgaccaggtgcacattgatgatgtgtccagtgatgacaatggccaggacctgagcacctacagctttgccacagatggcttccacgccgccgccagcagcgccaacctgtgcctgcccactggagtgcggggcggcgtggactggatgaggaagctggccttccgctaccgccgggtgaaggagctgtacaacacctacaagaacaacgtgggcggcctgctgggccctgccaagagagatgcctggctgcagctgcgggcagaaattgagggcctgacagacagctggctgaccaatgccctgaagagcctgagcatcatcagcaccaggagcaactgcatcaacgtgctggtgaccaccacccagctgatcccagccctggccaaggtgctgctgtacagcctgggcggggccttccccatcgagaacatctacagcgccaccaagattggcaaggagagctgctttgagcgcatcgtgagccgcttcggcaccaacatcacctacgtggtgattggagatggaagagatgaggagcacgccgccaaccagcacaacatgcccttctggaggatcagcagccacagcgacctgctggccctgcaccaggccctggagctggagtacctgtag

SEQ ID NO: 248119 - DNA, 1920 bp, Artificial Sequence
  derived and/or modified sequence
atggaggacagccaggacctgaacgagcagagcgtgaagaagacctgcactgaatctgatgtgagccagagtcaaaactctcgctctatggagatgcaggacctagcttctccccacaccctcgtcggcgggggggatacccccggctccagcaaactcgagaaaagcaacctttcttcaacttccgtcacaactaacggaacagggggtgagaacatgaccgtgttgaataccgcagactggcttctctcatgtaatacaccctcttccgccacaatgagtctcctcgccgtgaagaccgaacccctgaattcttccgagacgaccgccacaaccggcgatggcgcgctcgatacatttaccggctccgtgatcacatcaagcggttattccccccgctcggctcaccagtactcaccgcaactgtacccaagtaaaccctatcctcatatcctgtccacccccgctgcgcaaactatgagtgcctacgctggccagactcagtatagtggcatgcagcagccagcagtctacaccgcctactctcagaccggtcagccttactccctccccacttacgatctgggagtgatgctgccggcaattaagactgagtctgggttaagtcagactcagtctcccctgcagagcggctgcctgagctattctccggggttttccaccccacaacctggacagactccatattcttaccagatgcctggctccagttttgctccgtcgagtacaatttatgccaataatagtgtctcaaacagtaccaacttttcaggctcccagcaggattatccctcttacactgcatttggacaaaaccagtacgcccaatattactcagctagtacgtatggcgcttacatgacgtcaaacaacactgctgatggcacccctagtagcactagtacctatcagctccaggaaagcttacccggactgaccaaccagcctggggagttcgacactatgcaatctccctcgacgcctattaaggacctggatgagcgcacctgtcgatcttccgggtccaagtcccgaggcagagggcgaaagaacaacccgagcccccctcccgatagcgaccttgaaagagtattcgtttgggatttggacgaaacgatcatcgtcttccactctctcctcacagggagttatgcacagaagtacggcaaggacccacctatggcagttacactaggactgcgaatggaggaaatgatttttaacctcgcggatacacatcttttttttaacgaccttgaggagtgtgaccaggtgcatattgatgacgtgagctcagatgacaatgggcaagacttgtctacttatagctttgccacagatgggtttcatgccgccgcatctagtgctaatctgtgcttgcctactggagtgaggggaggtgtcgactggatgagaaagctggccttcagatatcgccgtgtgaaagagctgtacaatacttacaaaaacaatgtaggagggttgctggggcccgcaaagagagacgcctggttgcaactgcgcgcggagatcgagggcctgacggacagttggctgactaacgcattaaagtccctgagtatcatatccacccggagtaattgcataaatgtgttggtgacaacaacgcaactgattcctgccctggccaaggtattgctctatagcctcggaggggcatttccgatagaaaacatctactctgccacaaagattggaaaggaatcctgtttcgagagaattgtgagccggttcggcacaaacatcacatacgtggtgatcggagatggcagagacgaagagcatgcagcaaaccagcataacatgccgttctggaggatcagttctcatagcgatctgttagccctgcaccaagcacttgagctcgagtacctctag

SEQ ID NO: 248120 - DNA, 1920 bp, Artificial Sequence
  derived and/or modified sequence
atggaggattctcaggacctgaatgagcagagcgtaaaaaaaacatgtacagaatccgatgtgagccagtcccagaactctcgctctatggagatgcaagatctggcatccccccacacactggtggggggaggagatacccctggttcttcgaagcttgagaagtcaaatctgtcgtccacttccgtaaccacaaatggcacaggcggagaaaatatgacagtactgaacaccgccgactggcttctgtcttgcaacacaccaagttctgcaacaatgagtctgctagcagtcaaaaccgagccgctgaattctagtgaaactactgccacaaccggagacggtgccctggacacctttaccggttctgtgattacaagcagtgggtatagcccgagatcggctcaccagtattccccacagctctacccctccaaaccatatcctcatatcctgtcgactcctgcagcacagaccatgtccgcctatgccggacaaacccagtattctggaatgcagcagcccgctgtgtacacggcgtactcccagacagggcaaccctacagcctcccaacgtacgaccttggcgtgatgttgccagccatcaagaccgagtcgggcctcagtcaaacccagtcccctctgcagtccgggtgcttgagttacagcccagggttttccaccccccagcccggtcagacaccttactcctaccagatgcccggaagctccttcgccccttcaagtactatatacgccaacaatagtgtgtctaactccacaaacttctctggatctcagcaggactatccatcatacaccgcttttggccagaaccaatacgcccaatattacagcgcctcgacatatggagcgtatatgacttctaacaacaccgcggatgggacaccgtcgtccacctctacctaccagctccaggaaagcctcccaggtctcaccaatcagcccggagagttcgacaccatgcagtccccatcaacccctatcaaggacctcgatgagcgaacatgccggagcagtggtagcaaatcacgcggacgaggacggaagaataaccctagtccacctccggattccgacctggagagagtctttgtctgggatctggacgagaccattatcgtttttcacagcttgctgacaggcagctacgcacagaagtatgggaaggatcctcccatggcagtgacccttggtctccgcatggaagagatgattttcaacctggcagatactcatctgtttttcaatgatttagaggagtgtgaccaggtgcacatcgatgacgtgagctctgatgataatggccaggatctctccacgtattccttcgcaacggatggattccatgcagcagcatctagtgccaacctctgcctaccaacaggagtgcgcggaggcgtggattggatgagaaagttggccttcagataccggagggtgaaagagctatataacacttacaagaacaatgtcggaggactcctgggcccagctaagagggatgcctggctccagctgcgtgccgagatcgaaggtctgaccgacagctggctgacaaacgcactgaagtccctctccatcataagtacccgtagcaattgtatcaatgttctggttactactacccaattgattcccgcacttgcgaaagtgctgttgtactctttgggcggtgcttttcctatagagaacatttacagcgcaaccaagattggcaaggaatcatgctttgaacgaattgtcagtagatttggcactaacatcacctacgtcgtgattggggatgggagggatgaagaacacgctgccaatcagcataatatgcctttctggcgcatctccagtcatagcgacctgctggccctacaccaggctctagagttggagtatttatag

SEQ ID NO: 248121 - DNA, 1920 bp, Artificial Sequence
  derived and/or modified sequence
atggaggacagccaggacctgaacgagcagagcgtgaagaagacctgcaccgagagcgacgtgagccagagccagaacagcagaagcatggagatgcaggacctggccagcccccacaccctggtgggcggcggcgacacccccggcagcagcaagctggagaagagcaacctgagcagcaccagcgtgaccaccaacggcaccggcggcgagaacatgaccgtgctgaacaccgccgactggctgctgagctgcaacacccccagcagcgccaccatgagcctgctggccgtgaagaccgagcccctgaacagcagcgagaccaccgccaccaccggcgacggcgccctggacaccttcaccggcagcgtgatcaccagcagcggctacagccccagaagcgcccaccagtacagcccccagctgtaccccagcaagccctacccccacatcctgagcacccccgccgcccagaccatgagcgcctacgccggccagacccagtacagcggcatgcagcagcccgccgtgtacaccgcctacagccagaccggccagccctacagcctgcccacctacgacctgggcgtgatgctgcccgccatcaagaccgagagcggcctgagccagacccagagccccctgcagagcggctgcctgagctacagccccggcttcagcaccccccagcccggccagaccccctacagctaccagatgcccggcagcagcttcgcccccagcagcaccatctacgccaacaacagcgtgagcaacagcaccaacttcagcggcagccagcaggactaccccagctacaccgccttcggccagaaccagtacgcccagtactacagcgccagcacctacggcgcctacatgaccagcaacaacaccgccgacggcacccccagcagcaccagcacctaccagctgcaggagagcctgcccggcctgaccaaccagcccggcgagttcgacaccatgcagagccccagcacccccatcaaggacctggacgagagaacctgcagaagcagcggcagcaagagcagaggcagaggcagaaagaacaaccccagccccccccccgacagcgacctggagagagtgttcgtgtgggacctggacgagaccatcatcgtgttccacagcctgctgaccggcagctacgcccagaagtacggcaaggacccccccatggccgtgaccctgggcctgagaatggaggagatgatcttcaacctggccgacacccacctgttcttcaacgacctggaggagtgcgaccaggtgcacatcgacgacgtgagcagcgacgacaacggccaggacctgagcacctacagcttcgccaccgacggcttccacgccgccgccagcagcgccaacctgtgcctgcccaccggcgtgagaggcggcgtggactggatgagaaagctggccttcagatacagaagagtgaaggagctgtacaacacctacaagaacaacgtgggcggcctgctgggccccgccaagagagacgcctggctgcagctgagagccgagatcgagggcctgaccgacagctggctgaccaacgccctgaagagcctgagcatcatcagcaccagaagcaactgcatcaacgtgctggtgaccaccacccagctgatccccgccctggccaaggtgctgctgtacagcctgggcggcgccttccccatcgagaacatctacagcgccaccaagatcggcaaggagagctgcttcgagagaatcgtgagcagattcggcaccaacatcacctacgtggtgatcggcgacggcagagacgaggagcacgccgccaaccagcacaacatgcccttctggagaatcagcagccacagcgacctgctggccctgcaccaggccctggagctggagtacctgtag

SEQ ID NO: 248122 - protein, 854 aa, Artificial Sequence
  derived and/or modified sequence
MVQKSRNGGVYPGPSGEKKLKVGFVGLDPGAPDSTRDGALLIAGSEAPKRGSILSKPRAGGAGAGKPPKRNAFYRKLQNFLYNVLERPRGWAFIYHAYVFLLVFSCLVLSVFSTIKEYEKSSEGALYILEIVTIVVFGVEYFVRIWAAGCCCRYRGWRGRLKFARKPFCVIDIMVLIASIAVLAAGSQGNVFATSALRSLRFLQILRMIRMDRRGGTWKLLGSVVYAHSKELVTAWYIGFLCLILASFLVYLAEKGENDHFDTYADALWWGLITLTTIGYGDKYPQTWNGRLLAATFTLIGVSFFALPAGILGSGFALKVQEQHRQKHFEKRRNPAAGLIQSAWRFYATNLSRTDLHSTWQYYERTVTVPMYSSQTQTYGASRLIPPLNQLELLRNLKSKSGLAFRKDPPPEPSPSQKVSLKDRVFSSPRGVAAKGKGSPQAQTVRRSPSADQSLEDSPSKVPKSWSFGDRSRARQAFRIKGAASRQNSEEASLPGEDIVDDKSCPCEFVTEDLTPGLKVSIRAVCVMRFLVSKRKFKESLRPYDVMDVIEQYSAGHLDMLSRIKSLQSRVDQIVGRGPAITDKDRTKGPAEAELPEDPSMMGRLGKVEKQVLSMEKKLDFLVNIYMQRMGIPPTETEAYFGAKEPEPAPPYHSPEDSREHVDRHGCIVKIVRSSSSTGQKNFSAPPAAPPVQCPPSTSWQPQSHPRQGHGTSPVGDHGSLVRIPPPPAHERSLSAYGGGNRASMEFLRQEDTPGCRPPEGNLRDSDTSISIPSVDHEELERSFSGFSISQSKENLDALNSCYAAVAPCAKVRPYIAEGESDTDSDLCTPCGPPPRSATGEGPFGDVGWAGPRK

SEQ ID NO: 248123 - protein, 842 aa, Artificial Sequence
  derived and/or modified sequence
MVQKSRNGGVYPGPSGEKKLKVGFVGLDPGAPDSTRDGALLIAGSEAPKRGSILSKPRAGGAGAGKPPKRNAFYRKLQNFLYNVLERPRGWAFIYHAYVFLLVFSCLVLSVFSTIKEYEKSSEGALYILEIVTIVVFGVEYFVRIWAAGCCCRYRGWRGRLKFARKPFCVIDIMVLIASIAVLAAGSQGNVFATSALRSLRFLQILRMIRMDRRGGTWKLLGSVVYAHSKELVTAWYIGFLCLILASFLVYLAEKGENDHFDTYADALWWGLITLTTIGYGDKYPQTWNGRLLAATFTLIGVSFFALPAGILGSGFALKVQEQHRQKHFEKRRNPAAGLIQSAWRFYATNLSRTDLHSTWQYYERTVTVPMYSSQTQTYGASRLIPPLNQLELLRNLKSKSGLAFRKDPPPEPSPSPRGVAAKGKGSPQAQTVRRSPSADQSLEDSPSKVPKSWSFGDRSRARQAFRIKGAASRQNSEEASLPGEDIVDDKSCPCEFVTEDLTPGLKVSIRAVCVMRFLVSKRKFKESLRPYDVMDVIEQYSAGHLDMLSRIKSLQSRVDQIVGRGPAITDKDRTKGPAEAELPEDPSMMGRLGKVEKQVLSMEKKLDFLVNIYMQRMGIPPTETEAYFGAKEPEPAPPYHSPEDSREHVDRHGCIVKIVRSSSSTGQKNFSAPPAAPPVQCPPSTSWQPQSHPRQGHGTSPVGDHGSLVRIPPPPAHERSLSAYGGGNRASMEFLRQEDTPGCRPPEGNLRDSDTSISIPSVDHEELERSFSGFSISQSKENLDALNSCYAAVAPCAKVRPYIAEGESDTDSDLCTPCGPPPRSATGEGPFGDVGWAGPRK

SEQ ID NO: 248124 - DNA, 3197 bp, Artificial Sequence
  derived and/or modified sequence
cgcggagcgaggtggccgcagcgtctccgcgcgcggcccaagcccggcaggagtgcggaaccgccgcctcggccatgcggctcccggccggggggcctgggctggggcccgcgccgccccccgcgctccgcccccgctgagcctgagcccgacccggggcgcctcccgccaggcaccatggtgcagaagtcgcgcaacggcggcgtataccccggcccgagcggggagaagaagctgaaggtgggcttcgtggggctggaccccggcgcgcccgactccacccgggacggggcgctgctgatcgccggctccgaggcccccaagcgcggcagcatcctcagcaaacctcgcgcgggcggcgcgggcgccgggaagccccccaagcgcaacgccttctaccgcaagctgcagaatttcctctacaacgtgctggagcggccgcgcggctgggcgttcatctaccacgcctacgtgttcctcctggttttctcctgcctcgtgctgtctgtgttttccaccatcaaggagtatgagaagagctcggagggggccctctacatcctggaaatcgtgactatcgtggtgtttggcgtggagtacttcgtgcggatctgggccgcaggctgctgctgccggtaccgtggctggagggggcggctcaagtttgcccggaaaccgttctgtgtgattgacatcatggtgctcatcgcctccattgcggtgctggccgccggctcccagggcaacgtctttgccacatctgcgctccggagcctgcgcttcctgcagattctgcggatgatccgcatggaccggcggggaggcacctggaagctgctgggctctgtggtctatgcccacagcaaggagctggtcactgcctggtacatcggcttcctttgtctcatcctggcctcgttcctggtgtacttggcagagaagggggagaacgaccactttgacacctacgcggatgcactctggtggggcctgatcacgctgaccaccattggctacggggacaagtacccccagacctggaacggcaggctccttgcggcaaccttcaccctcatcggtgtctccttcttcgcgctgcctgcaggcatcttggggtctgggtttgccctgaaggttcaggagcagcacaggcagaagcactttgagaagaggcggaacccggcagcaggcctgatccagtcggcctggagattctacgccaccaacctctcgcgcacagacctgcactccacgtggcagtactacgagcgaacggtcaccgtgcccatgtacagttcgcaaactcaaacctacggggcctccagacttatccccccgctgaaccagctggagctgctgaggaacctcaagagtaaatctggactcgctttcaggaaggaccccccgccggagccgtctccaagccagaaggtcagtttgaaagatcgtgtcttctccagcccccgaggcgtggctgccaaggggaaggggtccccgcaggcccagactgtgaggcggtcacccagcgccgaccagagcctcgaggacagccccagcaaggtgcccaagagctggagcttcggggaccgcagccgggcacgccaggctttccgcatcaagggtgccgcgtcacggcagaactcagaagaagcaagcctccccggagaggacattgtggatgacaagagctgcccctgcgagtttgtgaccgaggacctgaccccgggcctcaaagtcagcatcagagccgtgtgtgtcatgcggttcctggtgtccaagcggaagttcaaggagagcctgcggccctacgacgtgatggacgtcatcgagcagtactcagccggccacctggacatgctgtcccgaattaagagcctgcagtccagagtggaccagatcgtggggcggggcccagcgatcacggacaaggaccgcaccaagggcccggccgaggcggagctgcccgaggaccccagcatgatgggacggctcgggaaggtggagaagcaggtcttgtccatggagaagaagctggacttcctggtgaatatctacatgcagcggatgggcatccccccgacagagaccgaggcctactttggggccaaagagccggagccggcgccgccgtaccacagcccggaagacagccgggagcatgtcgacaggcacggctgcattgtcaagatcgtgcgctccagcagctccacgggccagaagaacttctcggcgcccccggccgcgccccctgtccagtgtccgccctccacctcctggcagccacagagccacccgcgccagggccacggcacctcccccgtgggggaccacggctccctggtgcgcatcccgccgccgcctgcccacgagcggtcgctgtccgcctacggcgggggcaaccgcgccagcatggagttcctgcggcaggaggacaccccgggctgcaggccccccgaggggaacctgcgggacagcgacacgtccatctccatcccgtccgtggaccacgaggagctggagcgttccttcagcggcttcagcatctcccagtccaaggagaacctggatgctctcaacagctgctacgcggccgtggcgccttgtgccaaagtcaggccctacattgcggagggagagtcagacaccgactccgacctctgtaccccgtgcgggcccccgccacgctcggccaccggcgagggtccctttggtgacgtgggctgggccgggcccaggaagtgaggcggcgctgggccagtggacccgcccgcggccctcctcagcacggtgcctccgaggttttgaggcgggaaccctctggggcccttttcttacagtaactgagtgtggcgggaagggtgggccctggaggggcccatgtgggctgaaggatgggggctcctggcagtgaccttttacaaaagttattttccaacaggggctggagggctgggcagggccctgtggctccaggagcagcgtgcaggagcaaggctgccctgtccactctgctcagggccgcggccgacatcagcccggtgtgaggaggggcgggagtgatgacggggtgttgccagcgtggcaacaggcggggggttgtctcagccgagcccaggggaggcacaaagggcaggcctgttccctgaggacctgcgcaaagggcgggcctgtttggtgaggacctgcggccttgggtc

SEQ ID NO: 248125 - DNA, 2565 bp, Artificial Sequence
  derived and/or modified sequence
atggttcagaagagccggaatggtggggtgtatccaggtccatccggagagaagaaactaaaagtgggatttgtgggattggatcctggcgctccagatagcactcgggatggcgcgttgctgatcgccggctcagaagcccctaaacgggggtcgattctgagcaaacctagagccggcggtgctggcgcaggtaaacctccgaagcgaaacgccttctatcgcaaactgcagaatttcttatacaacgtgctagagagaccccgcggatgggctttcatctatcatgcctatgtgttcctgctggtcttttcttgtctggttctaagcgttttctcgaccattaaggagtatgagaaatccagtgaaggtgccctgtacatcctggagatcgtgaccatcgtcgtgttcggggtcgagtacttcgtcaggatctgggccgccggatgctgttgtaggtaccgaggatggcgggggcggctgaagtttgcccgtaagcccttttgcgtgatcgacatcatggtcctgatagcatccatcgctgtgttagctgccggaagtcaaggcaacgtgtttgctacctctgctttgcggtccctccgattccttcagattttgagaatgatccgcatggaccgcaggggaggcacatggaaactcctcggcagcgtagtctacgcacactccaaggagctggtcacagcatggtacattggcttcctctgtttgatcctggcgtcgtttctggtgtacttggccgagaaaggcgagaatgaccacttcgacacctatgcagacgcactgtggtggggtttaatcaccttgaccactatcggatatggggacaaatacccacagacttggaacggacgcttattggcagctacgtttaccctgatcggagtgtctttttttgccctgcccgccgggatactgggctccggttttgcattgaaggtgcaagagcaacatagacagaaacactttgaaaaacgcaggaatcctgctgcaggattgatccagtctgcgtggcgcttttatgctaccaatcttagccgaacagacctgcacagtacttggcagtattatgagcgcaccgtcacagtcccaatgtactcgtcccagacacagacctacggggcaagcagacttatcccgcccctgaatcagctggaactcctaaggaacctcaaaagtaagtccgggctcgcctttagaaaagaccctccgccggaaccttctccttcccagaaagtcagtcttaaagatcgagtttttagcagccctaggggtgtggccgccaaagggaagggatctccccaagcacagactgtcagacgatccccatctgctgatcagtctctggaagatagtccaagcaaggtgcctaagtcatggtcctttggcgaccggagtagagctcggcaagcctttaggatcaaaggtgctgcgtctaggcagaattctgaggaagcctctctgcctggagaagacattgtggatgataaaagttgtccttgtgaatttgttacagaggacctcaccccaggcttgaaggtgagcataagggctgtttgtgtcatgaggtttctggtgtctaagagaaaatttaaggagtctctacgtccttacgacgtcatggatgtgattgagcagtactctgctggccatctagacatgctgtctagaattaagagtctgcaatcccgcgtggatcagattgtgggacgcggcccagctattactgacaaagataggaccaaaggacccgctgaagctgagcttcccgaggacccaagcatgatggggagactcgggaaagtcgaaaagcaggtgctttcaatggagaaaaaactcgactttcttgtcaatatctacatgcaacggatgggaatccccccgacggagactgaagcgtatttcggggccaaagaacccgaacctgccccaccgtaccattctcctgaagattcccgcgaacatgtggacagacacggctgtatagtaaagatcgttagaagtagcagtagcacagggcaaaaaaacttctccgcaccaccagccgcaccccccgtgcaatgccctccctccacaagctggcaacctcagtcacacccacggcaaggacatgggacaagcccagtcggtgaccacgggagcctggtgcgcatccctcccccccccgcacacgagaggtctctctcagcgtacggcggcggaaaccgcgcgagcatggagttcctccgccaggaagacactcctggctgtcgcccacctgaaggtaatctgcgcgactccgacacatcgatttcaatcccctccgtcgaccatgaagagttggagcggagcttttcaggtttttccatttcccagtccaaggagaatctggacgctcttaactcctgttatgctgccgttgccccctgcgccaaggtgcggccatacatagctgaaggcgaaagtgacactgacagcgacctgtgcactccatgtggacccccaccgcgcagcgctactggcgaaggaccttttggcgacgtggggtgggccggcccccgcaagtag

SEQ ID NO: 248126 - DNA, 2565 bp, Artificial Sequence
  derived and/or modified sequence
atggtgcagaagagcagaaatggaggagtgtacccaggccccagcggggagaagaagctgaaggtgggctttgtgggcctggaccccggggccccagacagcaccagagatggagccctgctgattgctggcagcgaggcccccaagaggggcagcatcctgagcaagcccagggctggaggagctggggccggcaagccacccaagagaaatgccttctacaggaagctgcagaacttcctgtacaacgtgctggagcggccccggggctgggccttcatctaccacgcctacgtgttcctgctggtgttcagctgcctggtgctgagcgtcttcagcaccatcaaggagtatgagaagagcagcgagggcgccctgtacatcctggagatcgtgaccatcgtggtgtttggagtggagtactttgtgcgcatctgggccgccggctgctgctgccgctaccggggctggaggggccgcctgaagtttgccaggaagcccttctgtgtgattgacatcatggtgctgattgccagcattgctgtgctggccgccggcagccagggcaatgtgtttgccaccagcgccctgcggagcctgcgcttcctgcagatcctgaggatgatccgcatggacagaagaggaggcacctggaagctgctgggctctgtggtgtatgcccacagcaaggagctggtgacagcctggtacatcggcttcctgtgcctgatcctggccagcttcctggtgtacctggccgagaagggagaaaatgaccactttgacacctatgcagatgccctgtggtggggcctcatcaccctgaccaccatcggctacggggacaagtacccccagacctggaatggccgcctgctggccgccaccttcaccctcatcggcgtgtccttctttgccctgcctgctggcatcctgggcagcggctttgccctgaaggtgcaggagcagcaccggcagaagcactttgagaagagaagaaatcctgctgctggcctcatccagagcgcctggaggttctacgccaccaacctgagcaggacagacctgcacagcacctggcagtactatgaaagaacagtgacagtgcccatgtacagcagccagacccagacctatggagccagccgcctcatcccccccctgaaccagctggagctgctgaggaacctgaagagcaagagcggcctggccttcaggaaggaccccccacctgagcccagccccagccagaaggtgtccctgaaggacagagtcttcagcagcccccggggcgtggccgccaagggcaagggcagcccccaggcccagacagtgcggcgcagccccagcgctgaccagagcctggaggacagccccagcaaggtgcccaagtcctggagctttggagacaggagccgggcccggcaggccttccgcatcaagggagctgccagccggcagaacagcgaggaggccagcctgcctggagaagatattgtggatgacaagagctgcccctgtgaatttgtgacagaggacctgaccccaggcctgaaggtgtccatccgggctgtgtgtgtgatgaggttcctggtgtccaagaggaagttcaaggagagcctgcggccctatgatgtgatggatgtgattgagcagtacagcgctggccacctggacatgctgagccgcatcaagagcctgcagagccgggtggaccagatcgtgggccggggccctgccatcacagacaaggacaggaccaagggccctgctgaggccgagctgcctgaggaccccagcatgatgggccgcctgggcaaggtggagaagcaggtgctgtccatggagaagaagctggacttcctggtgaacatctacatgcagaggatgggcatccccccaacagaaacagaggcctactttggagccaaggagcctgagcccgccccaccctaccacagccctgaggacagccgggagcacgtggacagacatggctgcatcgtgaagatcgtgcgcagcagcagcagcacaggccagaagaacttcagcgcccccccagctgcccctcctgtgcagtgcccccccagcacctcctggcagccccagagccacccccggcagggccacggcaccagccctgtgggggaccacggcagcctggtgcgcatccccccacctccagcccacgagaggagcctgagcgcctatggaggcggcaacagagcctccatggagttcctgcggcaggaggacaccccaggctgccggcccccagagggcaacctgcgggacagcgacaccagcatcagcatccccagcgtggaccacgaggagctggagaggagcttcagcggcttcagcatcagccagagcaaggagaacctggatgccctgaacagctgctacgccgctgtggccccctgtgccaaggtgcggccctacatcgccgagggggagagtgacacagacagcgacctgtgcaccccctgtggccccccacccaggtctgccactggagagggcccctttggagatgtgggctgggccggccccaggaagtag

SEQ ID NO: 248127 - DNA, 2565 bp, Artificial Sequence
  derived and/or modified sequence
atggtgcagaagagccggaacggcggcgtgtaccccggccccagcggcgaaaagaagcttaaggtgggatttgtaggtctggacccaggcgcacccgattcaacacgcgatggcgcacttttgatcgcagggagtgaagcccccaagagaggatctatcctgtcaaagcccagggccggcggggcaggtgcagggaagcctccaaagcggaacgccttctaccgcaagctgcagaatttcctctataacgttctcgagcgaccaagggggtgggccttcatctatcacgcctatgtgtttttgctggtcttctcatgcttagtccttagcgtcttcagtaccatcaaagaatatgagaagtcatccgagggcgctctctatatcttggaaatcgtcactattgtcgtgttcggtgtagaatatttcgttaggatctgggcagcaggttgctgctgccgatacagaggctggcgggggcgcctgaagtttgcaaggaagccattctgcgtgatcgacatcatggtgctcatcgcctcaatcgccgtgcttgctgccggaagccaaggaaatgtcttcgccacctccgccttgcggagcttgaggttcttgcaaattctgcgcatgatccgcatggatagaagaggcgggacctggaagctgctgggaagcgtcgtgtacgcccattccaaggaattggtgaccgcctggtatatcggttttctatgtctgatcttagccagttttctggtgtatttagctgaaaagggcgagaacgatcattttgacacttacgccgatgccctgtggtggggcctgatcaccctaacaacaataggctatggcgataagtacccacagacgtggaacggacgcttgctagccgccacctttacacttataggagtgtcttttttcgccctgcccgccggcatactgggaagcggtttcgcactgaaggtgcaggaacagcataggcagaaacattttgagaagagaaggaaccctgcagccgggctgattcagtcagcttggcgtttttatgccaccaatctgtcccgtacagatctgcactccacttggcaatattacgaaaggactgtcacagtccccatgtacagttcccagacacagacatatggcgcgtcccggctgattcccccactgaatcagcttgaactcttgaggaacttgaagtccaaatctgggctcgccttcagaaaagacccaccccccgagcctagtccctctcaaaaggtgtctctgaaggacagagttttttcatctccaagaggggtggccgccaaaggtaagggatcaccgcaggcccagaccgtcagaaggagtcccagcgccgatcagtcgcttgaagattcccctagtaaggttcctaagagttggtctttcggcgatcgtagcagggctcggcaagccttccgcattaagggggccgctagccggcagaactctgaggaagcctcattacccggggaggacatcgtcgacgataagagttgcccatgcgaatttgtcacagaggatcttacccccgggttgaaggtctctatacgggccgtttgcgttatgcgattcctggtctctaaacgcaaattcaaggagtccctgcgcccatatgacgtgatggatgttatcgaacaatacagtgctgggcacctagacatgctaagcaggatcaagtcgctccagagcagggtagaccagattgtcgggagaggcccagcaatcactgataaagatagaactaagggccctgccgaggccgagctgcccgaggacccctctatgatgggacggctgggcaaggtggagaagcaggtgttgtccatggaaaagaagctggacttcctggtgaatatctacatgcagcgaatgggtatccctccgactgaaaccgaagcctactttggcgctaaagagcccgagccagctcctccataccactcccctgaggatagtagagagcatgtggaccgccacggatgcattgtgaagatagttagaagttccagtagcacaggccaaaagaacttttctgcaccacctgctgcccccccagtccagtgcccaccctctacctcgtggcagccgcagagccatcccagacaaggccacgggacttcaccggtgggagaccacggctctctggtacgtatcccgccccccccagcacacgagagatccctgtctgcctatggtggcggcaaccgagcctcgatggagtttctgaggcaggaggatacgcctggctgccgtcctcccgaagggaacctgcgagactctgatacgagtatcagcatccctagtgtggatcatgaggagcttgaacggagtttctctggattcagcatttcacaatcaaaggaaaatttggatgcccttaattcttgctacgccgctgttgcaccttgcgctaaggtgaggccatatatcgctgagggcgagtcagacacggattccgacctttgcaccccctgcggcccaccaccaaggagcgctacgggggaagggccctttggggacgtgggatgggctggaccccggaaatag

SEQ ID NO: 248128 - DNA, 3195 bp, Artificial Sequence
  derived and/or modified sequence
cggagcgaggtggccgcagcgtctccgcgcgcggcccaagcccggcaggagtgcggaaccgccgcctcggccatgcggctcccggccggggggcctgggctggggcccgcgccgccccccgcgctccgcccccgctgagcctgagcccgacccggggcgcctcccgccaggcaccatggtgcagaagtcgcgcaacggcggcgtataccccggcccgagcggggagaagaagctgaaggtgggcttcgtggggctggaccccggcgcgcccgactccacccgggacggggcgctgctgatcgccggctccgaggcccccaagcgcggcagcatcctcagcaaacctcgcgcgggcggcgcgggcgccgggaagccccccaagcgcaacgccttctaccgcaagctgcagaatttcctctacaacgtgctggagcggccgcgcggctgggcgttcatctaccacgcctacgtgttcctcctggttttctcctgcctcgtgctgtctgtgttttccaccatcaaggagtatgagaagagctcggagggggccctctacatcctggaaatcgtgactatcgtggtgtttggcgtggagtacttcgtgcggatctgggccgcaggctgctgctgccggtaccgtggctggagggggcggctcaagtttgcccggaaaccgttctgtgtgattgacatcatggtgctcatcgcctccattgcggtgctggccgccggctcccagggcaacgtctttgccacatctgcgctccggagcctgcgcttcctgcagattctgcggatgatccgcatggaccggcggggaggcacctggaagctgctgggctctgtggtctatgcccacagcaaggagctggtcactgcctggtacatcggcttcctttgtctcatcctggcctcgttcctggtgtacttggcagagaagggggagaacgaccactttgacacctacgcggatgcactctggtggggcctgatcacgctgaccaccattggctacggggacaagtacccccagacctggaacggcaggctccttgcggcaaccttcaccctcatcggtgtctccttcttcgcgctgcctgcaggcatcttggggtctgggtttgccctgaaggttcaggagcagcacaggcagaagcactttgagaagaggcggaacccggcagcaggcctgatccagtcggcctggagattctacgccaccaacctctcgcgcacagacctgcactccacgtggcagtactacgagcgaacggtcaccgtgcccatgtacagttcgcaaactcaaacctacggggcctccagacttatccccccgctgaaccagctggagctgctgaggaacctcaagagtaaatctggactcgctttcaggaaggaccccccgccggagccgtctccaagccagaaggtcagtttgaaagatcgtgtcttctccagcccccgaggcgtggctgccaaggggaaggggtccccgcaggcccagactgtgaggcggtcacccagcgccgaccagagcctcgaggacagccccagcaaggtgcccaagagctggagcttcggggaccgcagccgggcacgccaggctttccgcatcaagggtgccgcgtcacggcagaactcagaagaagcaagcctccccggagaggacattgtggatgacaagagctgcccctgcgagtttgtgaccgaggacctgaccccgggcctcaaagtcagcatcagagccgtgtgtgtcatgcggttcctggtgtccaagcggaagttcaaggagagcctgcggccctacgacgtgatggacgtcatcgagcagtactcagccggccacctggacatgctgtcccgaattaagagcctgcagtccagagtggaccagatcgtggggcggggcccagcgatcacggacaaggaccgcaccaagggcccggccgaggcggagctgcccgaggaccccagcatgatgggacggctcgggaaggtggagaagcaggtcttgtccatggagaagaagctggacttcctggtgaatatctacatgcagcggatgggcatccccccgacagagaccgaggcctactttggggccaaagagccggagccggcgccgccgtaccacagcccggaagacagccgggagcatgtcgacaggcacggctgcattgtcaagatcgtgcgctccagcagctccacgggccagaagaacttctcggcgcccccggccgcgccccctgtccagtgtccgccctccacctcctggcagccacagagccacccgcgccagggccacggcacctcccccgtgggggaccacggctccctggtgcgcatcccgccgccgcctgcccacgagcggtcgctgtccgcctacggcgggggcaaccgcgccagcatggagttcctgcggcaggaggacaccccgggctgcaggccccccgaggggaacctgcgggacagcgacacgtccatctccatcccgtccgtggaccacgaggagctggagcgttccttcagcggcttcagcatctcccagtccaaggagaacctggatgctctcaacagctgctacgcggccgtggcgccttgtgccaaagtcaggccctacattgcggagggagagtcagacaccgactccgacctctgtaccccgtgcgggcccccgccacgctcggccaccggcgagggtccctttggtgacgtgggctgggccgggcccaggaagtgaggcggcgctgggccagtggacccgcccgcggccctcctcagcacggtgcctccgaggttttgaggcgggaaccctctggggcccttttcttacagtaactgagtgtggcgggaagggtgggccctggaggggcccatgtgggctgaaggatgggggctcctggcagtgaccttttacaaaagttattttccaacaggggctggagggctgggcagggccctgtggctccaggagcagcgtgcaggagcaaggctgccctgtccactctgctcagggccgcggccgacatcagcccggtgtgaggaggggcgggagtgatgacggggtgttgccagcgtggcaacaggcggggggttgtctcagccgagcccaggggaggcacaaagggcaggcctgttccctgaggacctgcgcaaagggcgggcctgtttggtgaggacctgcggccttgggtc

SEQ ID NO: 248129 - DNA, 2565 bp, Artificial Sequence
  derived and/or modified sequence
atggtacagaaatcaagaaatggtggggtttaccctgggccatcaggtgagaagaaactaaaagtgggatttgtaggcctggaccccggagcccctgattccacacgggatggcgctctcctcatcgccggtagcgaggcgcctaagagggggtccatcctgtccaaaccacgcgctgggggagctggcgctgggaaaccgcctaagagaaacgctttttatcggaaactccagaatttcctgtataatgtgttggagagaccgagggggtgggcattcatctaccatgcgtatgtgttcctcctggtgttctcctgcctcgtgcttagtgtgtttagtacaatcaaagagtatgagaagtcctcagaaggggcactctacatactcgaaattgtcacaatcgtggtcttcggtgtggaatacttcgtaagaatttgggcggcaggctgttgttgccgatatcgcggatggcgaggccgactgaagttcgccagaaagcccttttgtgtgattgatatcatggtactgattgctagcatcgccgttctcgcggcagggtcccagggtaatgtgtttgccacaagtgctctgagaagtctccgcttcctgcaaatcttgagaatgattcggatggatcgcagaggaggtacatggaaactactaggctccgtggtctacgcccattcaaaggagctggtcaccgcttggtatataggatttctgtgtctgattcttgcttcctttctagtataccttgcagaaaaaggtgagaacgaccacttcgacacatatgcggacgcactgtggtggggactgattactctgaccacaatcggttatggcgacaagtacccccagacttggaacgggaggctcctcgcagcaacatttaccctgataggggtgtcatttttcgcgttgccagccggtatcctgggtagcggattcgccttaaaggtgcaagagcagcatcgacagaaacacttcgagaaaagaaggaaccccgctgccggactgatccagagcgcttggcgtttttatgctacgaacctgtctcgaaccgatctgcactccacatggcagtactatgagcgcacagtgacagtgcccatgtattcttcgcagactcagacgtacggagcctcaagacttatacctcctcttaaccagctggagttactcagaaatctgaagtctaagagtggacttgccttccgcaaggatccacctcccgagccaagcccatcccagaaggtatccttgaaggaccgggtattttccagcccaaggggcgtcgcagctaagggcaaaggaagccctcaggcacagacggtgcggagatcacctagcgccgaccagtcattggaagactcaccctcgaaggtcccaaagtcctggtcattcggggatcgcagccgggcacgacaggcctttcgcattaagggcgcagcctcaagacagaacagcgaggaagccagtctccccggtgaagatatcgtggatgacaaatcgtgtccatgcgaattcgtaaccgaggatctcactccagggctgaaggtgtctatcagagctgtgtgcgtgatgaggtttctggtgtccaaacgcaagttcaaggagagcttgagaccctatgatgttatggacgtgatagagcagtattccgccggtcacttagacatgctcagcaggattaaatcactccagagcagagtggatcaaatagtcgggagagggccagccattacagacaaggatcgcaccaaagggcctgctgaggctgagctaccggaggacccttcaatgatgggaagactcgggaaggtggaaaaacaggttctttccatggagaaaaagcttgacttcctggtcaatatttacatgcagcggatgggcattccacctacagagactgaggcctattttggggctaaagagccagagccagccccaccctatcattccccagaggactccagggagcacgtggacagacatggttgtattgtgaaaattgtgcgttcgtcctcttctacggggcagaaaaatttttccgcccctcctgctgcgcctcctgtgcagtgcccgcctagcactagctggcaaccccagtcccatcctcgccagggtcacggcacatcccccgtgggagaccatggctctctcgttcgaattcctccaccccctgctcacgagagatccctgtctgcctacggtggcggtaatcgggcaagcatggagttccttcgacaggaggacaccccagggtgtcgccctccggagggtaacctaagagattcagatacgtccattagcataccaagtgttgatcacgaagagctggaaagaagctttagcgggttctcaatctctcagagtaaggaaaacctcgacgccctgaacagttgttacgccgcagtggctccgtgcgccaaagtgcgtccttacattgcagaaggcgagagcgacaccgacagtgatctgtgtactccttgtgggcctcctcctcggtccgctactggagaggggccatttggcgatgtggggtgggccggacccaggaaatag

SEQ ID NO: 248130 - DNA, 2565 bp, Artificial Sequence
  derived and/or modified sequence
atggtgcagaagagcagaaacggcggcgtgtaccccggccccagcggcgagaagaagctgaaggtgggcttcgtgggcctggaccccggcgcccccgacagcaccagagacggcgccctgctgatcgccggcagcgaggcccccaagagaggcagcatcctgagcaagcccagagccggcggcgccggcgccggcaagccccccaagagaaacgccttctacagaaagctgcagaacttcctgtacaacgtgctggagagacccagaggctgggccttcatctaccacgcctacgtgttcctgctggtgttcagctgcctggtgctgagcgtgttcagcaccatcaaggagtacgagaagagcagcgagggcgccctgtacatcctggagatcgtgaccatcgtggtgttcggcgtggagtacttcgtgagaatctgggccgccggctgctgctgcagatacagaggctggagaggcagactgaagttcgccagaaagcccttctgcgtgatcgacatcatggtgctgatcgccagcatcgccgtgctggccgccggcagccagggcaacgtgttcgccaccagcgccctgagaagcctgagattcctgcagatcctgagaatgatcagaatggacagaagaggcggcacctggaagctgctgggcagcgtggtgtacgcccacagcaaggagctggtgaccgcctggtacatcggcttcctgtgcctgatcctggccagcttcctggtgtacctggccgagaagggcgagaacgaccacttcgacacctacgccgacgccctgtggtggggcctgatcaccctgaccaccatcggctacggcgacaagtacccccagacctggaacggcagactgctggccgccaccttcaccctgatcggcgtgagcttcttcgccctgcccgccggcatcctgggcagcggcttcgccctgaaggtgcaggagcagcacagacagaagcacttcgagaagagaagaaaccccgccgccggcctgatccagagcgcctggagattctacgccaccaacctgagcagaaccgacctgcacagcacctggcagtactacgagagaaccgtgaccgtgcccatgtacagcagccagacccagacctacggcgccagcagactgatcccccccctgaaccagctggagctgctgagaaacctgaagagcaagagcggcctggccttcagaaaggaccccccccccgagcccagccccagccagaaggtgagcctgaaggacagagtgttcagcagccccagaggcgtggccgccaagggcaagggcagcccccaggcccagaccgtgagaagaagccccagcgccgaccagagcctggaggacagccccagcaaggtgcccaagagctggagcttcggcgacagaagcagagccagacaggccttcagaatcaagggcgccgccagcagacagaacagcgaggaggccagcctgcccggcgaggacatcgtggacgacaagagctgcccctgcgagttcgtgaccgaggacctgacccccggcctgaaggtgagcatcagagccgtgtgcgtgatgagattcctggtgagcaagagaaagttcaaggagagcctgagaccctacgacgtgatggacgtgatcgagcagtacagcgccggccacctggacatgctgagcagaatcaagagcctgcagagcagagtggaccagatcgtgggcagaggccccgccatcaccgacaaggacagaaccaagggccccgccgaggccgagctgcccgaggaccccagcatgatgggcagactgggcaaggtggagaagcaggtgctgagcatggagaagaagctggacttcctggtgaacatctacatgcagagaatgggcatcccccccaccgagaccgaggcctacttcggcgccaaggagcccgagcccgcccccccctaccacagccccgaggacagcagagagcacgtggacagacacggctgcatcgtgaagatcgtgagaagcagcagcagcaccggccagaagaacttcagcgccccccccgccgccccccccgtgcagtgcccccccagcaccagctggcagccccagagccaccccagacagggccacggcaccagccccgtgggcgaccacggcagcctggtgagaatcccccccccccccgcccacgagagaagcctgagcgcctacggcggcggcaacagagccagcatggagttcctgagacaggaggacacccccggctgcagaccccccgagggcaacctgagagacagcgacaccagcatcagcatccccagcgtggaccacgaggagctggagagaagcttcagcggcttcagcatcagccagagcaaggagaacctggacgccctgaacagctgctacgccgccgtggccccctgcgccaaggtgagaccctacatcgccgagggcgagagcgacaccgacagcgacctgtgcaccccctgcggccccccccccagaagcgccaccggcgagggccccttcggcgacgtgggctgggccggccccagaaagtag

SEQ ID NO: 248131 - protein, 872 aa, Artificial Sequence [sequence omitted]

SEQ ID NO: 248132 - protein, 872 aa, Artificial Sequence
  derived and/or modified sequence
MVQKSRNGGVYPGPSGEKKLKVGFVGLDPGAPDSTRDGALLIAGSEAPKRGSILSKPRAGGAGAGKPPKRNAFYRKLQNFLYNVLERPRGWAFIYHAYVFLLVFSCLVLSVFSTIKEYEKSSEGALYILEIVTIVVFGVEYFVRIWAAGCCCRYRGWRGRLKFARKPFCVIDIMVLIASIAVLAAGSQGNVFATSALRSLRFLQILRMIRMDRRGGTWKLLGSVVYAHSKELVTAWYIGFLCLILASFLVYLAEKGENDHFDTYADALWWGLITLTTIGYGDKYPQTWNGRLLAATFTLIGVSFFALPAGILGSGFALKVQEQHRQKHFEKRRNPAAGLIQSAWRFYATNLSRTDLHSTWQYYERTVTVPMYSSQTQTYGASRLIPPLNQLELLRNLKSKSGLAFRKDPPPEPSPSKGSPCRGPLCGCCPGRSSQKVSLKDRVFSSPRGVAAKGKGSPQAQTVRRSPSADQSLEDSPSKVPKSWSFGDRSRARQAFRIKGAASRQNSEEASLPGEDIVDDKSCPCEFVTEDLTPGLKVSIRAVCVMRFLVSKRKFKESLRPYDVMDVIEQYSAGHLDMLSRIKSLQSQVDQIVGRGPAITDKDRTKGPAEAELPEDPSMMGRLGKVEKQVLSMEKKLDFLVNIYMQRMGIPPTETEAYFGAKEPEPAPPYHSPEDSREHVDRHGCIVKIVRSSSSTGQKNFSAPPAAPPVQCPPSTSWQPQSHPRQGHGTSPVGDHGSLVRIPPPPAHERSLSAYGGGNRASMEFLRQEDTPGCRPPEGNLRDSDTSISIPSVDHEELERSFSGFSISQSKENLDALNSCYAAVAPCAKVRPYIAEGESDTDSDLCTPCGPPPRSATGEGPFGDVGWAGPRK

SEQ ID NO: 248133 - DNA, 3251 bp, Artificial Sequence
  derived and/or modified sequence
cgcggagcgaggtggccgcagcgtctccgcgcgcggcccaagcccggcaggagtgcggaaccgccgcctcggccatgcggctcccggccggggggcctgggctggggcccgcgccgccccccgcgctccgcccccgctgagcctgagcccgacccggggcgcctcccgccaggcaccatggtgcagaagtcgcgcaacggcggcgtataccccggcccgagcggggagaagaagctgaaggtgggcttcgtggggctggaccccggcgcgcccgactccacccgggacggggcgctgctgatcgccggctccgaggcccccaagcgcggcagcatcctcagcaaacctcgcgcgggcggcgcgggcgccgggaagccccccaagcgcaacgccttctaccgcaagctgcagaatttcctctacaacgtgctggagcggccgcgcggctgggcgttcatctaccacgcctacgtgttcctcctggttttctcctgcctcgtgctgtctgtgttttccaccatcaaggagtatgagaagagctcggagggggccctctacatcctggaaatcgtgactatcgtggtgtttggcgtggagtacttcgtgcggatctgggccgcaggctgctgctgccggtaccgtggctggagggggcggctcaagtttgcccggaaaccgttctgtgtgattgacatcatggtgctcatcgcctccattgcggtgctggccgccggctcccagggcaacgtctttgccacatctgcgctccggagcctgcgcttcctgcagattctgcggatgatccgcatggaccggcggggaggcacctggaagctgctgggctctgtggtctatgcccacagcaaggagctggtcactgcctggtacatcggcttcctttgtctcatcctggcctcgttcctggtgtacttggcagagaagggggagaacgaccactttgacacctacgcggatgcactctggtggggcctgatcacgctgaccaccattggctacggggacaagtacccccagacctggaacggcaggctccttgcggcaaccttcaccctcatcggtgtctccttcttcgcgctgcctgcaggcatcttggggtctgggtttgccctgaaggttcaggagcagcacaggcagaagcactttgagaagaggcggaacccggcagcaggcctgatccagtcggcctggagattctacgccaccaacctctcgcgcacagacctgcactccacgtggcagtactacgagcgaacggtcaccgtgcccatgtacagttcgcaaactcaaacctacggggcctccagacttatccccccgctgaaccagctggagctgctgaggaacctcaagagtaaatctggactcgctttcaggaaggaccccccgccggagccgtctccaagtaaaggcagcccgtgcagagggcccctgtgtggatgctgccccggacgctctagccagaaggtcagtttgaaagatcgtgtcttctccagcccccgaggcgtggctgccaaggggaaggggtccccgcaggcccagactgtgaggcggtcacccagcgccgaccagagcctcgaggacagccccagcaaggtgcccaagagctggagcttcggggaccgcagccgggcacgccaggctttccgcatcaagggtgccgcgtcacggcagaactcagaagaagcaagcctccccggagaggacattgtggatgacaagagctgcccctgcgagtttgtgaccgaggacctgaccccgggcctcaaagtcagcatcagagccgtgtgtgtcatgcggttcctggtgtccaagcggaagttcaaggagagcctgcggccctacgacgtgatggacgtcatcgagcagtactcagccggccacctggacatgctgtcccgaattaagagcctgcagtccagagtggaccagatcgtggggcggggcccagcgatcacggacaaggaccgcaccaagggcccggccgaggcggagctgcccgaggaccccagcatgatgggacggctcgggaaggtggagaagcaggtcttgtccatggagaagaagctggacttcctggtgaatatctacatgcagcggatgggcatccccccgacagagaccgaggcctactttggggccaaagagccggagccggcgccgccgtaccacagcccggaagacagccgggagcatgtcgacaggcacggctgcattgtcaagatcgtgcgctccagcagctccacgggccagaagaacttctcggcgcccccggccgcgccccctgtccagtgtccgccctccacctcctggcagccacagagccacccgcgccagggccacggcacctcccccgtgggggaccacggctccctggtgcgcatcccgccgccgcctgcccacgagcggtcgctgtccgcctacggcgggggcaaccgcgccagcatggagttcctgcggcaggaggacaccccgggctgcaggccccccgaggggaacctgcgggacagcgacacgtccatctccatcccgtccgtggaccacgaggagctggagcgttccttcagcggcttcagcatctcccagtccaaggagaacctggatgctctcaacagctgctacgcggccgtggcgccttgtgccaaagtcaggccctacattgcggagggagagtcagacaccgactccgacctctgtaccccgtgcgggcccccgccacgctcggccaccggcgagggtccctttggtgacgtgggctgggccgggcccaggaagtgaggcggcgctgggccagtggacccgcccgcggccctcctcagcacggtgcctccgaggttttgaggcgggaaccctctggggcccttttcttacagtaactgagtgtggcgggaagggtgggccctggaggggcccatgtgggctgaaggatgggggctcctggcagtgaccttttacaaaagttattttccaacaggggctggagggctgggcagggccctgtggctccaggagcagcgtgcaggagcaaggctgccctgtccactctgctcagggccgcggccgacatcagcccggtgtgaggaggggcgggagtgatgacggggtgttgccagcgtggcaacaggcggggggttgtctcagccgagcccaggggaggcacaaagggcaggcctgttccctgaggacctgcgcaaagggcgggcctgtttggtgaggacctgcggccttgggtc

SEQ ID NO: 248134 - DNA, 2619 bp, Artificial Sequence
  derived and/or modified sequence
atggtgcaaaaatcccggaacggcggggtgtatccgggaccatcaggggaaaaaaaattgaaggtgggatttgtggggctggaccctggagctcccgatagcactcgcgacggagccctgctcattgcggggtccgaggcccctaaaaggggctccatactcagcaaaccgagagctggcggagctggtgcaggcaagccgcctaagaggaacgccttctacagaaaactccagaatttcctatacaatgtgctggagcggccacgggggtgggcgttcatttaccatgcctacgtgttcctgctggttttttcctgtcttgtactatctgtgtttagcaccattaaagagtatgagaagtcgagtgagggtgcactatatattttagaaattgtcaccatagtggttttcggcgtagaatacttcgtcaggatttgggccgcagggtgttgctgcagatatcgaggctggcgaggacgcctaaagttcgccaggaaacccttctgtgttattgatattatggtgctcatcgcatcaatcgcagtgctggccgcaggaagccaggggaacgtgtttgccacaagtgcactgagaagtctccgattcctgcagatcctccggatgattcggatggatcgacggggcggcacctggaagcttctgggaagtgtggtgtacgcacactccaaagaactggtcacagcctggtatatcggatttctgtgtctcatattggcctccttccttgtttatctggctgaaaagggagagaatgatcattttgatacttatgctgacgcgctgtggtggggtctcattactttaactactattggttatggggacaaatatccgcagacatggaacggccgactgttagctgccacttttacgttaattggagtcagcttttttgctctgcccgccggcatactgggctccggattcgctctgaaggtgcaagagcagcacaggcagaagcactttgagaagaggcgaaatcctgccgcagggctgatccagtctgcctggaggttttatgcgactaacctcagcaggacagacctacactccacatggcagtattatgagaggacagtgacagtccctatgtacagttcccagactcaaacttatggggcttcaaggctaatccccccccttaaccagctcgaacttctacgcaatctaaagtccaaaagcggactggccttccgtaaagatccccctcctgagccatcaccctctaaaggatcaccatgccgcggaccattatgcggctgctgcccaggtcggtcttcccaaaaagtgagcttgaaggatcgggttttcagttcgcctcgtggcgtggcagccaaaggaaagggatccccacaggcgcagaccgtccgcagaagcccatctgctgaccagtcactggaggatagcccatccaaagtccccaagagctggtccttcggagatcgcagtcgagcaaggcaagcttttcgaatcaagggtgccgcctctcgtcagaacagcgaagaggcctctctcccaggcgaggatattgtcgatgataaaagctgcccgtgtgagtttgttaccgaagatctgacaccagggcttaaagtcagcatcagggccgtgtgcgtcatgcgtttcctggtctcgaagcgtaaattcaaggagtctctccgaccatatgatgtgatggacgtcattgagcagtacagtgccggccacctggatatgctgtctcggatcaagtccttgcagtcccgcgtggatcagattgtgggaagaggccccgcaataaccgacaaggatagaaccaaaggacccgccgaagctgagctgcctgaagacccatcaatgatgggccgactaggcaaagtggagaaacaggtcctgtccatggagaagaagctggacttcctggtgaatatctacatgcagcgcatggggattcccccaactgaaacggaggcatacttcggggctaaggaacctgagcctgcacccccttatcactccccagaggattctcgtgaacatgtggatcggcacggatgcattgttaagatcgttcggtcttctagtagtactggacagaagaattttagcgccccccctgccgcgccaccggttcaatgtcctccctctacctcttggcagcctcagagccacccaaggcagggccatggaacaagcccagtgggcgaccatggcagccttgtgcgtatccctccaccgccagcccatgaacggtcactatcggcttatggcggcggaaaccgggcgagtatggaattcctcagacaggaggacacgccaggctgcaggcctcctgagggaaacctgcgcgactccgacacctccatcagcatcccgtctgtagaccatgaagagctcgagagatcattttccggcttttctatttcacagagtaaggagaatctcgacgcgcttaactcctgttatgctgcagtggctccatgcgcaaaagtccggccatatatcgcagagggtgaatctgatactgactctgatctgtgcaccccatgtgggcctcctccccgcagcgcaactggagaagggcccttcggtgatgtaggctgggcaggccctcgcaagtag

SEQ ID NO: 248135 - DNA, 2619 bp, Artificial Sequence
  derived and/or modified sequence
atggtccaaaagagcagaaacggaggggtctatccaggcccgtccggcgaaaagaaacttaaggtaggctttgtggggctagatccaggtgcgccggactccacgcgagacggcgctctactgatagccggaagcgaggcccccaagaggggatccattctgtccaagccgcgcgctggcggcgccggcgccggcaagccaccaaaacgcaacgctttctatcgaaagctgcagaattttctgtataatgtccttgaacgaccccgaggatgggccttcatctaccacgcctacgttttcctgctcgtgttttcctgtctggtactgtcagtgttttcaactatcaaagagtatgaaaaaagcagcgaaggggccctttatatcctcgagattgttactattgtggttttcggcgttgagtactttgtgcgcatttgggcggctgggtgttgttgcagatacagaggatggcggggcaggcttaaatttgcgagaaaacccttctgcgtgatagacattatggtgttgattgccagcatagcagttctcgcagctggaagccaaggaaatgtttttgcaactagcgccctgcggtcactccgatttctgcagatcctaaggatgatccggatggatagacgtggcggcacctggaaactgcttggatcagtggtctacgcacattctaaggaattggttacggcgtggtacatcggttttctgtgcctcatcctggcctccttcctagtgtacctggcggagaaaggggaaaacgaccactttgatacatatgccgacgcgctgtggtgggggctgattaccctgactaccattggctatggcgacaagtacccccagacctggaacgggagactgctcgcagctacctttaccctgataggggtgtcattcttcgccttacctgctgggatccttggctctgggtttgctctcaaggtgcaggagcaacatagacagaagcatttcgagaagcgcagaaatcctgcagctggactgatccagagtgcatggagattttatgctacaaacttgtcccggacggatctgcattctacatggcaatattatgaaagaactgtcactgtacccatgtactcttcccaaacacagacatacggtgcctcacgactgatcccaccactgaatcagttagagctgctaagaaacttaaaatccaaatccggcctggcatttcgaaaggaccccccacccgaaccctctccctcaaaaggaagtccatgcagaggcccactgtgcggttgctgccctggtagatcctcccaaaaagtgagtttgaaagatcgcgtgttcagttcaccgagaggagtagccgctaagggcaagggctcaccgcaggcacagacagtacggcggtcaccaagtgccgaccaatctctggaggactcccccagcaaagtgcccaaatcctggagctttggagatcggtctcgggctcgtcaagcattccgtatcaagggtgcggcatcacggcagaactcagaggaggccagtcttcccggagaagacatcgtggacgacaagagctgtccctgcgagttcgttacggaggatctgacacctggcctgaaggttagcattcgggccgtgtgcgttatgcgattcctggtgtctaaaaggaagttcaaagaaagccttagaccatacgacgtcatggatgtcattgagcagtacagtgctggccatctggatatgctgtctaggatcaagtctctccagtctcaggtagaccagattgtggggcgtggacccgccatcacagacaaagataggaccaagggtcccgccgaagctgaacttcctgaggacccttcaatgatgggcaggctcggcaaggtcgaaaagcaggtactctctatggaaaaaaaactggatttcttagtcaatatctacatgcagcggatggggataccacctactgagacagaagcctatttcggtgcaaaggaacctgagccagcaccaccctaccacagcccagaagactccagagagcacgttgataggcacggctgtatcgtcaaaattgtgcggtcaagctcgagtaccggacagaagaatttttccgctccacccgccgcccctccagtgcagtgccccccctctacatcatggcaaccacagtctcaccctaggcagggtcatggtacttctccagtcggagatcacggtagtctggtgcggatcccgccaccgccagctcacgagagaagtctttctgcttatggaggaggcaacagggcgagcatggagtttctcagacaagaggatacaccaggctgcaggccccccgagggaaacctcagagacagcgacacctcgataagcattccctctgtggaccacgaggagctggagcgcagcttctcaggctttagcatctcccaatctaaggaaaatctcgatgctttgaacagttgttacgctgccgtagcaccttgcgcaaaggtgcggccgtatattgctgaaggtgagtcagacaccgattcggatctttgcaccccatgcggccctccacccaggtccgctaccggcgaaggtccattcggcgacgtcggctgggctggaccgcgaaagtag

SEQ ID NO: 248136 - DNA, 2619 bp, Artificial Sequence
  derived and/or modified sequence
atggtgcagaagagcagaaatggaggagtgtacccaggccccagcggggagaagaagctgaaggtgggctttgtgggcctggaccccggggccccagacagcaccagagatggagccctgctgattgctggcagcgaggcccccaagaggggcagcatcctgagcaagcccagggctggaggagctggggccggcaagccacccaagagaaatgccttctacaggaagctgcagaacttcctgtacaacgtgctggagcggccccggggctgggccttcatctaccacgcctacgtgttcctgctggtgttcagctgcctggtgctgagcgtcttcagcaccatcaaggagtatgagaagagcagcgagggcgccctgtacatcctggagatcgtgaccatcgtggtgtttggagtggagtactttgtgcgcatctgggccgccggctgctgctgccgctaccggggctggaggggccgcctgaagtttgccaggaagcccttctgtgtgattgacatcatggtgctgattgccagcattgctgtgctggccgccggcagccagggcaatgtgtttgccaccagcgccctgcggagcctgcgcttcctgcagatcctgaggatgatccgcatggacagaagaggaggcacctggaagctgctgggctctgtggtgtatgcccacagcaaggagctggtgacagcctggtacatcggcttcctgtgcctgatcctggccagcttcctggtgtacctggccgagaagggagaaaatgaccactttgacacctatgcagatgccctgtggtggggcctcatcaccctgaccaccatcggctacggggacaagtacccccagacctggaatggccgcctgctggccgccaccttcaccctcatcggcgtgtccttctttgccctgcctgctggcatcctgggcagcggctttgccctgaaggtgcaggagcagcaccggcagaagcactttgagaagagaagaaatcctgctgctggcctcatccagagcgcctggaggttctacgccaccaacctgagcaggacagacctgcacagcacctggcagtactatgaaagaacagtgacagtgcccatgtacagcagccagacccagacctatggagccagccgcctcatcccccccctgaaccagctggagctgctgaggaacctgaagagcaagagcggcctggccttcaggaaggaccccccacctgagcccagccccagcaagggcagcccctgccggggccccctgtgtggctgctgccccggccgcagcagccagaaggtgtccctgaaggacagagtcttcagcagcccccggggcgtggccgccaagggcaagggcagcccccaggcccagacagtgcggcgcagccccagcgctgaccagagcctggaggacagccccagcaaggtgcccaagtcctggagctttggagacaggagccgggcccggcaggccttccgcatcaagggagctgccagccggcagaacagcgaggaggccagcctgcctggagaagatattgtggatgacaagagctgcccctgtgaatttgtgacagaggacctgaccccaggcctgaaggtgtccatccgggctgtgtgtgtgatgaggttcctggtgtccaagaggaagttcaaggagagcctgcggccctatgatgtgatggatgtgattgagcagtacagcgctggccacctggacatgctgagccgcatcaagagcctgcagagccgggtggaccagatcgtgggccggggccctgccatcacagacaaggacaggaccaagggccctgctgaggccgagctgcctgaggaccccagcatgatgggccgcctgggcaaggtggagaagcaggtgctgtccatggagaagaagctggacttcctggtgaacatctacatgcagaggatgggcatccccccaacagaaacagaggcctactttggagccaaggagcctgagcccgccccaccctaccacagccctgaggacagccgggagcacgtggacagacatggctgcatcgtgaagatcgtgcgcagcagcagcagcacaggccagaagaacttcagcgcccccccagctgcccctcctgtgcagtgcccccccagcacctcctggcagccccagagccacccccggcagggccacggcaccagccctgtgggggaccacggcagcctggtgcgcatccccccacctccagcccacgagaggagcctgagcgcctatggaggcggcaacagagcctccatggagttcctgcggcaggaggacaccccaggctgccggcccccagagggcaacctgcgggacagcgacaccagcatcagcatccccagcgtggaccacgaggagctggagaggagcttcagcggcttcagcatcagccagagcaaggagaacctggatgccctgaacagctgctacgccgctgtggccccctgtgccaaggtgcggccctacatcgccgagggggagagtgacacagacagcgacctgtgcaccccctgtggccccccacccaggtctgccactggagagggcccctttggagatgtgggctgggccggccccaggaagtag

SEQ ID NO: 248137 - DNA, 2619 bp, Artificial Sequence
  derived and/or modified sequence
atggtgcagaagagcagaaatggaggagtgtacccaggccccagcggggagaagaagctgaaggtgggctttgtgggcctggaccccggggccccagacagcaccagagatggagccctgctgattgctggcagcgaggcccccaagaggggcagcatcctgagcaagcccagggctggaggagctggggccggcaagccacccaagagaaatgccttctacaggaagctgcagaacttcctgtacaacgtgctggagcggccccggggctgggccttcatctaccacgcctacgtgttcctgctggtgttcagctgcctggtgctgagcgtcttcagcaccatcaaggagtatgagaagagcagcgagggcgccctgtacatcctggagatcgtgaccatcgtggtgtttggagtggagtactttgtgcgcatctgggccgccggctgctgctgccgctaccggggctggaggggccgcctgaagtttgccaggaagcccttctgtgtgattgacatcatggtgctgattgccagcattgctgtgctggccgccggcagccagggcaatgtgtttgccaccagcgccctgcggagcctgcgcttcctgcagatcctgaggatgatccgcatggacagaagaggaggcacctggaagctgctgggctctgtggtgtatgcccacagcaaggagctggtgacagcctggtacatcggcttcctgtgcctgatcctggccagcttcctggtgtacctggccgagaagggagaaaatgaccactttgacacctatgcagatgccctgtggtggggcctcatcaccctgaccaccatcggctacggggacaagtacccccagacctggaatggccgcctgctggccgccaccttcaccctcatcggcgtgtccttctttgccctgcctgctggcatcctgggcagcggctttgccctgaaggtgcaggagcagcaccggcagaagcactttgagaagagaagaaatcctgctgctggcctcatccagagcgcctggaggttctacgccaccaacctgagcaggacagacctgcacagcacctggcagtactatgaaagaacagtgacagtgcccatgtacagcagccagacccagacctatggagccagccgcctcatcccccccctgaaccagctggagctgctgaggaacctgaagagcaagagcggcctggccttcaggaaggaccccccacctgagcccagccccagcaagggcagcccctgccggggccccctgtgtggctgctgccccggccgcagcagccagaaggtgtccctgaaggacagagtcttcagcagcccccggggcgtggccgccaagggcaagggcagcccccaggcccagacagtgcggcgcagccccagcgctgaccagagcctggaggacagccccagcaaggtgcccaagtcctggagctttggagacaggagccgggcccggcaggccttccgcatcaagggagctgccagccggcagaacagcgaggaggccagcctgcctggagaagatattgtggatgacaagagctgcccctgtgaatttgtgacagaggacctgaccccaggcctgaaggtgtccatccgggctgtgtgtgtgatgaggttcctggtgtccaagaggaagttcaaggagagcctgcggccctatgatgtgatggatgtgattgagcagtacagcgctggccacctggacatgctgagccgcatcaagagcctgcagagccaggtggaccagatcgtgggccggggccctgccatcacagacaaggacaggaccaagggccctgctgaggccgagctgcctgaggaccccagcatgatgggccgcctgggcaaggtggagaagcaggtgctgtccatggagaagaagctggacttcctggtgaacatctacatgcagaggatgggcatccccccaacagaaacagaggcctactttggagccaaggagcctgagcccgccccaccctaccacagccctgaggacagccgggagcacgtggacagacatggctgcatcgtgaagatcgtgcgcagcagcagcagcacaggccagaagaacttcagcgcccccccagctgcccctcctgtgcagtgcccccccagcacctcctggcagccccagagccacccccggcagggccacggcaccagccctgtgggggaccacggcagcctggtgcgcatccccccacctccagcccacgagaggagcctgagcgcctatggaggcggcaacagagcctccatggagttcctgcggcaggaggacaccccaggctgccggcccccagagggcaacctgcgggacagcgacaccagcatcagcatccccagcgtggaccacgaggagctggagaggagcttcagcggcttcagcatcagccagagcaaggagaacctggatgccctgaacagctgctacgccgctgtggccccctgtgccaaggtgcggccctacatcgccgagggggagagtgacacagacagcgacctgtgcaccccctgtggccccccacccaggtctgccactggagagggcccctttggagatgtgggctgggccggccccaggaagtag

SEQ ID NO: 248138 - DNA, 2619 bp, Artificial Sequence
  derived and/or modified sequence
atggtgcagaagagccggaacggcggcgtgtaccccggccccagcggggaaaagaagcttaaggtaggctttgtggggctggatccaggggcacctgattccacgagagatggcgcactgctgattgcaggaagcgaggctcccaaacgaggtagtatactaagcaagcctcgcgctggtggggccggcgcagggaaaccacccaaaaggaacgctttctaccgcaagctgcagaattttctctacaacgttttggagagacctaggggctgggcatttatataccacgcgtacgtgttcctcctggtgttttcctgtctggtattgagtgtgtttagcacgatcaaggagtatgaaaagagcagcgagggcgccctgtatatactggaaattgtgacaatagtggtgttcggagttgaatactttgtgcggatttgggcagccgggtgctgttgtaggtatcgggggtggcggggcagattaaagttcgccaggaagcctttttgtgtgatagacattatggtcctgatagcgtccattgccgtgctggctgctggtagtcagggcaacgtcttcgcaactagcgcgctgagaagcttaaggtttctccaaatcctcaggatgatcaggatggatagacggggtggaacttggaaactgctgggaagcgtagtgtatgcccattcgaaagaactggttaccgcttggtatatcgggttcctgtgtctgattctggccagttttctggtgtacctcgcagaaaagggtgagaacgatcacttcgatacgtacgctgacgctctttggtggggactgattactctgactacaatcggttatggcgacaaataccctcagacctggaacggtagactgctcgcagcaactttcaccctgattggggtctccttcttcgcacttcccgcaggcattctcggctcagggttcgcactcaaggtgcaggaacaacatagacagaagcacttcgaaaaaagaaggaatccagcagctgggcttatccagtcggcctggcggttctacgcaactaacctctctcggaccgatctccattctacatggcagtattacgaacggacggtaaccgtaccaatgtatagctcccagacccagacgtatggggcatccagattaatcccgcctctcaatcagttagaactcctccgaaaccttaagagcaagtcaggactggcgtttcgcaaagatccacccccagagcccagtccatcgaaagggtccccatgccgggggccattatgtggatgctgcccaggtcgtagttcacagaaggttagcttaaaggatagggttttttcatccccacggggagtagcggcaaagggaaagggaagcccacaggcccagactgttcggcggtccccgtcagccgatcaatccctggaggattcaccctccaaggtgcctaaatcctggagcttcggcgatagatccagggctaggcaggcctttcgcattaagggcgctgcctcgagacagaactctgaggaggcttccttaccaggggaagacatcgtcgacgataaatcgtgcccgtgcgaattcgtgaccgaggatctgacccccgggctgaaagtgagtatccgggccgtgtgcgtaatgcgcttcctggtgtctaagcggaagttcaaggagtctcttaggccatatgatgtgatggatgtcatcgaacagtatagcgctgggcatttagacatgctcagccgtataaagtctctgcagagtagggtcgaccagattgtggggaggggcccggcaatcacagacaaggatagaacaaaggggccggctgaggctgaacttcccgaagaccccagcatgatggggagattaggcaaggttgagaagcaggtcctttcgatggaaaagaagttggattttctggtgaatatatacatgcagcggatgggaattccccctacggaaactgaggcatacttcggagctaaggagccggagccagctccaccataccatagtccagaggattctcgcgaacacgtcgacagacacggatgcattgtcaagatcgtgcgcagcagcagtagcacgggtcagaagaatttcagcgcaccgccggccgctcccccggtgcagtgtcctccgtccacttcatggcagccccagagccaccctcgccagggacacggaacatccccagtcggggaccacggctccctggttcgaattcctcctccaccggcgcatgagagatccctcagtgcatacggcggtggcaaccgcgccagcatggagttcctgcggcaggaggacacgcctggctgtagaccacctgagggcaacctcagagatagcgacacttccatctctattcctagcgtggaccacgaagagttggagcgatctttcagtggattcagcatttctcagtcaaaggaaaatctggatgcattgaacagctgttacgccgctgtagctccatgcgctaaggtgcgaccatacatcgctgaaggagagtccgataccgattctgacttatgcacgccatgcgggcctcctcctcgctctgctacgggggagggaccctttggagacgtgggttgggctggaccccgtaaatag

SEQ ID NO: 248139 - DNA, 2619 bp, Artificial Sequence
  derived and/or modified sequence
atggtgcagaagagccggaacggcggcgtgtaccccggccccagcggtgaaaagaagctgaaggtgggatttgtaggcctcgatcccggggctcccgattccactagggacggagccttgctcatcgcaggtagcgaagctccaaagcgaggaagtattctcagtaaacctcgcgcgggaggtgcgggagccggaaaacctcctaagcgtaacgcattctacaggaaactgcaaaacttcctgtacaacgtgttagaaagaccacgcggctgggcattcatctaccacgcgtacgtgttccttttggtgttctcctgcctagttctctccgtgttctccactatcaaagagtacgagaagagcagtgagggagccctctacatcctagagatcgtgactatcgtggtgttcggcgtggagtactttgtgcggatatgggccgccggttgctgctgtcgctaccggggctggcgggggaggctgaagttcgcgagaaagcccttctgcgtaattgacattatggtgcttatagctagcatcgccgtactggccgccggctcacaggggaacgtgtttgccacttcagcccttagatccctgagattcctgcagattctccgcatgattaggatggataggcgaggagggacgtggaaactccttggctctgtcgtatatgcgcactcaaaggagctagtcacagcctggtatattggatttttatgccttatcctagccagcttcctggtctacctggctgagaagggcgagaacgatcactttgacacatacgccgacgccctgtggtggggtctgattacgctgacaactattggctacggagataaataccctcagacctggaatggccggcttttggcagcaaccttcactcttattggggtctccttcttcgcgctgccagcaggtatcctgggcagtggcttcgctctcaaggtgcaggagcagcataggcaaaaacactttgagaagagaagaaaccccgccgccggcctgatccagtcagcgtggcgtttttacgccactaacctgtcaagaaccgatttgcattctacctggcagtactatgagaggaccgtgacagttcctatgtactctagccagacacaaacatacggcgccagtagactgattcccccactgaatcaactcgagctgcttagaaacctgaaatcaaagtctggacttgctttccggaaagatcctcctcccgaaccctccccctcaaaagggtcgccttgtcggggccccctttgtggatgttgtcccggacgcagttcacagaaggtcagcttgaaggacagggtgttttcttcgccacggggagtggctgctaaaggcaaaggcagtccccaggcgcaaactgttagacgatccccatccgcagatcagtctttggaagactcccctagtaaggtaccaaagtcttggtcgtttggagacagatcacgggctagacaggcttttcgcatcaaaggcgcagccagcagacagaactctgaggaagcgtctctgcccggagaggatattgtggatgataaatcttgcccttgcgagtttgtgacggaagatctgaccccgggcctaaaagtctcaatccgcgcagtttgcgtgatgagatttctggtgagcaagcgaaagtttaaggaatccctgcgcccatatgacgtgatggacgtcatagaacaatactcggccgggcacctcgacatgctctcacggattaagtctctgcagtcacaagttgatcagatcgttggacgaggaccagcgatcacagataaagaccgcactaaggggccagccgaagcagagctgcctgaagatcctagcatgatggggagactgggcaaggtggaaaaacaggtgctgagtatggaaaaaaagttggattttctggtaaacatctatatgcagcggatgggaatccctcccacagagacggaggcttactttggcgccaaggaacccgaacccgcacctccatatcacagcccggaagattcccgcgagcacgtggatcgccacgggtgcattgtgaagatagtgcggtcctcctctagtaccggccagaagaattttagcgcccctcccgctgcgccgcccgtgcaatgtcctccctccacgagttggcagccccagagccacccgagacagggacatggcacatctccagtaggagaccacggttccttggtgcgcatcccgccgcctcccgcccacgagcgcagcttgagcgcatatgggggagggaacagggcaagcatggagtttctgaggcaagaggacacccccgggtgccgcccgccggaaggaaacctgcgagacagtgacactagcatatctattccctcggtggaccatgaagagcttgagcggtctttttctgggttctccatttctcaatcaaaggaaaatttagatgcccttaacagctgttacgcagcagtggctccctgcgcaaaagttcgcccctacatcgccgaaggtgagagtgacactgattcagacttgtgcactccttgtggtcccccacctcgaagcgctaccggtgagggtcccttcggcgatgtgggctgggccggaccacgtaaatag

SEQ ID NO: 248140 - DNA, 3249 bp, Artificial Sequence
  derived and/or modified sequence
cggagcgaggtggccgcagcgtctccgcgcgcggcccaagcccggcaggagtgcggaaccgccgcctcggccatgcggctcccggccggggggcctgggctggggcccgcgccgccccccgcgctccgcccccgctgagcctgagcccgacccggggcgcctcccgccaggcaccatggtgcagaagtcgcgcaacggcggcgtataccccggcccgagcggggagaagaagctgaaggtgggcttcgtggggctggaccccggcgcgcccgactccacccgggacggggcgctgctgatcgccggctccgaggcccccaagcgcggcagcatcctcagcaaacctcgcgcgggcggcgcgggcgccgggaagccccccaagcgcaacgccttctaccgcaagctgcagaatttcctctacaacgtgctggagcggccgcgcggctgggcgttcatctaccacgcctacgtgttcctcctggttttctcctgcctcgtgctgtctgtgttttccaccatcaaggagtatgagaagagctcggagggggccctctacatcctggaaatcgtgactatcgtggtgtttggcgtggagtacttcgtgcggatctgggccgcaggctgctgctgccggtaccgtggctggagggggcggctcaagtttgcccggaaaccgttctgtgtgattgacatcatggtgctcatcgcctccattgcggtgctggccgccggctcccagggcaacgtctttgccacatctgcgctccggagcctgcgcttcctgcagattctgcggatgatccgcatggaccggcggggaggcacctggaagctgctgggctctgtggtctatgcccacagcaaggagctggtcactgcctggtacatcggcttcctttgtctcatcctggcctcgttcctggtgtacttggcagagaagggggagaacgaccactttgacacctacgcggatgcactctggtggggcctgatcacgctgaccaccattggctacggggacaagtacccccagacctggaacggcaggctccttgcggcaaccttcaccctcatcggtgtctccttcttcgcgctgcctgcaggcatcttggggtctgggtttgccctgaaggttcaggagcagcacaggcagaagcactttgagaagaggcggaacccggcagcaggcctgatccagtcggcctggagattctacgccaccaacctctcgcgcacagacctgcactccacgtggcagtactacgagcgaacggtcaccgtgcccatgtacagttcgcaaactcaaacctacggggcctccagacttatccccccgctgaaccagctggagctgctgaggaacctcaagagtaaatctggactcgctttcaggaaggaccccccgccggagccgtctccaagtaaaggcagcccgtgcagagggcccctgtgtggatgctgccccggacgctctagccagaaggtcagtttgaaagatcgtgtcttctccagcccccgaggcgtggctgccaaggggaaggggtccccgcaggcccagactgtgaggcggtcacccagcgccgaccagagcctcgaggacagccccagcaaggtgcccaagagctggagcttcggggaccgcagccgggcacgccaggctttccgcatcaagggtgccgcgtcacggcagaactcagaagaagcaagcctccccggagaggacattgtggatgacaagagctgcccctgcgagtttgtgaccgaggacctgaccccgggcctcaaagtcagcatcagagccgtgtgtgtcatgcggttcctggtgtccaagcggaagttcaaggagagcctgcggccctacgacgtgatggacgtcatcgagcagtactcagccggccacctggacatgctgtcccgaattaagagcctgcagtccagagtggaccagatcgtggggcggggcccagcgatcacggacaaggaccgcaccaagggcccggccgaggcggagctgcccgaggaccccagcatgatgggacggctcgggaaggtggagaagcaggtcttgtccatggagaagaagctggacttcctggtgaatatctacatgcagcggatgggcatccccccgacagagaccgaggcctactttggggccaaagagccggagccggcgccgccgtaccacagcccggaagacagccgggagcatgtcgacaggcacggctgcattgtcaagatcgtgcgctccagcagctccacgggccagaagaacttctcggcgcccccggccgcgccccctgtccagtgtccgccctccacctcctggcagccacagagccacccgcgccagggccacggcacctcccccgtgggggaccacggctccctggtgcgcatcccgccgccgcctgcccacgagcggtcgctgtccgcctacggcgggggcaaccgcgccagcatggagttcctgcggcaggaggacaccccgggctgcaggccccccgaggggaacctgcgggacagcgacacgtccatctccatcccgtccgtggaccacgaggagctggagcgttccttcagcggcttcagcatctcccagtccaaggagaacctggatgctctcaacagctgctacgcggccgtggcgccttgtgccaaagtcaggccctacattgcggagggagagtcagacaccgactccgacctctgtaccccgtgcgggcccccgccacgctcggccaccggcgagggtccctttggtgacgtgggctgggccgggcccaggaagtgaggcggcgctgggccagtggacccgcccgcggccctcctcagcacggtgcctccgaggttttgaggcgggaaccctctggggcccttttcttacagtaactgagtgtggcgggaagggtgggccctggaggggcccatgtgggctgaaggatgggggctcctggcagtgaccttttacaaaagttattttccaacaggggctggagggctgggcagggccctgtggctccaggagcagcgtgcaggagcaaggctgccctgtccactctgctcagggccgcggccgacatcagcccggtgtgaggaggggcgggagtgatgacggggtgttgccagcgtggcaacaggcggggggttgtctcagccgagcccaggggaggcacaaagggcaggcctgttccctgaggacctgcgcaaagggcgggcctgtttggtgaggacctgcggccttgggtc

SEQ ID NO: 248141 - DNA, 3251 bp, Artificial Sequence
  derived and/or modified sequence
cgcggagcgaggtggccgcagcgtctccgcgcgcggcccaagcccggcaggagtgcggaaccgccgcctcggccatgcggctcccggccggggggcctgggctggggcccgcgccgccccccgcgctccgcccccgctgagcctgagcccgacccggggcgcctcccgccaggcaccatggtgcagaagtcgcgcaacggcggcgtataccccggcccgagcggggagaagaagctgaaggtgggcttcgtggggctggaccccggcgcgcccgactccacccgggacggggcgctgctgatcgccggctccgaggcccccaagcgcggcagcatcctcagcaaacctcgcgcgggcggcgcgggcgccgggaagccccccaagcgcaacgccttctaccgcaagctgcagaatttcctctacaacgtgctggagcggccgcgcggctgggcgttcatctaccacgcctacgtgttcctcctggttttctcctgcctcgtgctgtctgtgttttccaccatcaaggagtatgagaagagctcggagggggccctctacatcctggaaatcgtgactatcgtggtgtttggcgtggagtacttcgtgcggatctgggccgcaggctgctgctgccggtaccgtggctggagggggcggctcaagtttgcccggaaaccgttctgtgtgattgacatcatggtgctcatcgcctccattgcggtgctggccgccggctcccagggcaacgtctttgccacatctgcgctccggagcctgcgcttcctgcagattctgcggatgatccgcatggaccggcggggaggcacctggaagctgctgggctctgtggtctatgcccacagcaaggagctggtcactgcctggtacatcggcttcctttgtctcatcctggcctcgttcctggtgtacttggcagagaagggggagaacgaccactttgacacctacgcggatgcactctggtggggcctgatcacgctgaccaccattggctacggggacaagtacccccagacctggaacggcaggctccttgcggcaaccttcaccctcatcggtgtctccttcttcgcgctgcctgcaggcatcttggggtctgggtttgccctgaaggttcaggagcagcacaggcagaagcactttgagaagaggcggaacccggcagcaggcctgatccagtcggcctggagattctacgccaccaacctctcgcgcacagacctgcactccacgtggcagtactacgagcgaacggtcaccgtgcccatgtacagttcgcaaactcaaacctacggggcctccagacttatccccccgctgaaccagctggagctgctgaggaacctcaagagtaaatctggactcgctttcaggaaggaccccccgccggagccgtctccaagtaaaggcagcccgtgcagagggcccctgtgtggatgctgccccggacgctctagccagaaggtcagtttgaaagatcgtgtcttctccagcccccgaggcgtggctgccaaggggaaggggtccccgcaggcccagactgtgaggcggtcacccagcgccgaccagagcctcgaggacagccccagcaaggtgcccaagagctggagcttcggggaccgcagccgggcacgccaggctttccgcatcaagggtgccgcgtcacggcagaactcagaagaagcaagcctccccggagaggacattgtggatgacaagagctgcccctgcgagtttgtgaccgaggacctgaccccgggcctcaaagtcagcatcagagccgtgtgtgtcatgcggttcctggtgtccaagcggaagttcaaggagagcctgcggccctacgacgtgatggacgtcatcgagcagtactcagccggccacctggacatgctgtcccgaattaagagcctgcaaagccaagtggaccagatcgtggggcggggcccagcgatcacggacaaggaccgcaccaagggcccggccgaggcggagctgcccgaggaccccagcatgatgggacggctcgggaaggtggagaagcaggtcttgtccatggagaagaagctggacttcctggtgaatatctacatgcagcggatgggcatccccccgacagagaccgaggcctactttggggccaaagagccggagccggcgccgccgtaccacagcccggaagacagccgggagcatgtcgacaggcacggctgcattgtcaagatcgtgcgctccagcagctccacgggccagaagaacttctcggcgcccccggccgcgccccctgtccagtgtccgccctccacctcctggcagccacagagccacccgcgccagggccacggcacctcccccgtgggggaccacggctccctggtgcgcatcccgccgccgcctgcccacgagcggtcgctgtccgcctacggcgggggcaaccgcgccagcatggagttcctgcggcaggaggacaccccgggctgcaggccccccgaggggaacctgcgggacagcgacacgtccatctccatcccgtccgtggaccacgaggagctggagcgttccttcagcggcttcagcatctcccagtccaaggagaacctggatgctctcaacagctgctacgcggccgtggcgccttgtgccaaagtcaggccctacattgcggagggagagtcagacaccgactccgacctctgtaccccgtgcgggcccccgccacgctcggccaccggcgagggtccctttggtgacgtgggctgggccgggcccaggaagtgaggcggcgctgggccagtggacccgcccgcggccctcctcagcacggtgcctccgaggttttgaggcgggaaccctctggggcccttttcttacagtaactgagtgtggcgggaagggtgggccctggaggggcccatgtgggctgaaggatgggggctcctggcagtgaccttttacaaaagttattttccaacaggggctggagggctgggcagggccctgtggctccaggagcagcgtgcaggagcaaggctgccctgtccactctgctcagggccgcggccgacatcagcccggtgtgaggaggggcgggagtgatgacggggtgttgccagcgtggcaacaggcggggggttgtctcagccgagcccaggggaggcacaaagggcaggcctgttccctgaggacctgcgcaaagggcgggcctgtttggtgaggacctgcggccttgggtc

SEQ ID NO: 248142 - DNA, 2619 bp, Artificial Sequence
  derived and/or modified sequence
atggttcaaaagagtcggaacggcggtgtgtacccgggaccatcaggcgaaaagaagctaaaggtaggctttgttgggctagatcccggagcgccagattctacaagagatggggctctgctgatcgctgggagcgaagccccaaagcgcggtagtattctgtcaaaaccacgagctgggggtgctggggctggaaagcctccgaaacgcaatgccttctatcgaaaattacagaatttcctgtacaacgtcctggaacggccacgaggatgggctttcatataccacgcatatgtgttcttgttagtcttctcttgcctcgtcttgtctgtcttctctacaattaaggaatatgaaaagtcctctgaaggggctctgtacatcctggaaattgtcactatcgttgtcttcggggtggaatattttgtacgtatttgggctgccggttgttgttgcagatatagaggatggagaggtcgcttgaaatttgctagaaagccattttgcgtgatcgacattatggtgctgatcgcctccattgctgtgttggccgctggttcccagggcaatgtgtttgcaacctcagctctgaggtccttgcgatttctccaaattttgcgaatgattaggatggaccgacgcggtggcacttggaagctactgggaagtgtcgtgtacgcccattcaaaagagctcgtcacagcatggtatatcgggttcctgtgtcttatcttagcctctttcctggtctaccttgccgagaagggggaaaatgatcacttcgatacatatgcggatgccctttggtggggactgatcacactcaccaccatagggtatggagacaagtatccacagacctggaacggccgactgctggccgcaaccttcacactgatcggagtctccttctttgctcttccagccggaatcttgggatcaggtttcgctttgaaagttcaggaacagcacagacaaaaacacttcgaaaagcgaaggaacccagccgctggccttatccagagcgcctggcgcttctatgccacaaacctatcacgcaccgacctgcattctacgtggcagtattatgaacgcactgtgacagtgccaatgtacagcagccagactcagacctacggcgcatcgcgcttgatcccccctttgaatcagctggagctgcttagaaacctgaagagcaaaagtggccttgcctttcggaaagaccctccaccagaaccttctcccagtaaaggttctccttgcagaggccctctttgtgggtgttgccctggcaggtcctctcagaaggtgagcctgaaggaccgcgtcttcagctcccctcggggagtggctgccaaaggcaaaggcagcccccaggctcagaccgtaaggcgctcaccatcggccgaccagtccctggaggattccccaagcaaggttcccaagagctggagcttcggagacagatcgagggcacggcaagcctttcgcattaagggcgcagctagtcggcagaattccgaagaggccagtctgcctggagaggacatagtggacgacaagtcctgtccctgcgaattcgttacagaggatctcacaccgggtctaaaagtgtccatccgcgctgtgtgcgtgatgagatttttggtgtcaaagagaaagtttaaggaatctctgaggccctacgacgtgatggacgtgattgaacagtactctgccggacatttggacatgctatctaggattaagtccctacagtccagggtggaccagatcgtcggacgaggtccagctataacagacaaagatagaactaaggggccagcagaggccgaattacctgaggatccatccatgatgggtaggttgggtaaagtggagaagcaagtcctgtcaatggagaaaaaactagacttcctggtgaatatttacatgcagaggatgggtatcccacccaccgagaccgaggcctactttggggcaaaagagcctgagcctgctcccccttatcattccccagaagacagcagagagcatgtagaccggcacggttgcatcgtgaaaatcgtgcgaagttcctccagcaccgggcaaaaaaatttctctgctcccccagcagcaccaccagtgcagtgtccaccaagcacaagctggcagccccaaagccaccctcgtcagggccacggtacgtcacctgtcggcgaccacggtagtctggtaagaatccctccgccacctgcacacgaaagatcactatctgcatatgggggaggaaaccgggctagcatggaattccttcgccaggaggacacacccggttgccggcctcctgagggaaatctgcgagatagcgatacatcaatctctatccccagtgtcgatcacgaggagcttgagcggagctttagcgggttctccattagccagtctaaagagaatcttgatgcgctgaattcatgttatgccgcagtggcgccttgcgctaaagtaagaccctatatcgccgagggcgagtccgatactgatagcgatctttgcactccatgtggacctcctcctagatcggccacaggcgaggggccatttggggatgtgggctgggcgggtccacggaagtag

SEQ ID NO: 248143 - DNA, 2619 bp, Artificial Sequence
  derived and/or modified sequence
atggtacaaaagtctagaaatggcggtgtgtaccccggaccctccggcgaaaagaaacttaaagtcggcttcgtaggcctcgaccccggtgcacccgacagtacccgcgacggagctctgctcattgctggcagcgaagcgccaaagcgaggctctatcctcagtaagcccagggcaggcggagcaggcgctggcaaaccaccaaagagaaatgcattttaccgcaagctgcaaaactttttgtacaacgtcctcgagcgcccacgaggctgggccttcatatatcatgcctatgtcttccttctcgtgttcagttgcttagtgctttccgtattctcaacgatcaaggagtacgagaagagcagcgagggggcactgtacatcctggaaatcgtgaccatcgtggtgtttggagttgaatacttcgtgaggatctgggccgcaggttgctgttgtcggtatcggggttggaggggacggctgaagtttgcccgaaagccattctgtgtgattgacattatggtgcttatcgcctctatcgctgtgttggcagctggttcccagggcaatgtctttgccaccagtgcactgcgcagtctccggtttttacagatcttacggatgataaggatggatagacgcggaggcacttggaaactgctggggagcgtggtctacgcgcacagtaaggagttagtgacagcctggtatattgggttcctgtgcctgatcctagcctcgttcttagtgtacctcgcagaaaagggtgagaatgaccactttgatacttatgcggacgccctatggtggggactgataacactaaccacgattgggtacggcgataaatatccacaaacctggaatgggaggcttctcgccgctacctttacgcttatcggtgtgagtttttttgccttgcctgccggtattttgggaagcggtttcgccttgaaggttcaggaacagcacaggcagaagcattttgaaaaaaggcgcaaccccgctgccggtttgatccaaagcgcgtggcggttctacgctacaaacctgtctcgcacggaccttcattccacatggcagtattacgagagaaccgtgacggtccccatgtatagtagccagacccagacatacggagctagcagacttattccccctctgaatcagttggaactactgcgcaaccttaaatctaaatctgggctcgcgtttcggaaagaccctcctcccgagccatcgccatctaagggttctccatgcagaggacctttgtgtggttgttgccccggacgttcgagtcagaaggtttctctcaaggacagagtatttagcagtcctcggggagtggctgccaagggcaagggatctccccaggcccaaactgtccgcaggtctcccagcgccgatcagtcactggaggatagcccttctaaagtacctaagagctggtctttcggagaccgatcacgtgcaagacaggcgttcaggattaaaggcgctgcgagcagacaaaattcagaggaagcctcactgcccggtgaagatatagtggacgacaagtcgtgtccgtgtgaattcgttaccgaggatctgacaccgggactcaaagtcagcatacgagccgtgtgcgtcatgcgcttcctcgtctccaaaagaaaattcaaggagtcgctgcgaccttacgacgtgatggacgtgatagagcaatattccgcgggacacttggatatgctgtctagaatcaaatcattgcaatctcaggtggaccaaatagtcggtagaggccctgcaattacggataaagataggacaaaagggccagccgaagccgagctgcccgaggaccccagtatgatgggcaggctcggcaaagtggaaaaacaggtcttatccatggagaaaaaactggatttcctggtgaacatctacatgcagcggatgggaatcccaccaaccgagaccgaggcctactttggtgccaaggagccagagcctgctcctccatatcattcgcctgaggacagtagggagcatgtggatcggcatggatgtatagttaaaattgtgcgaagttcctcgtcgacagggcagaaaaatttcagcgccccacccgctgctcccccagttcagtgccccccaagcactagctggcaaccacagtcccaccccagacagggccacgggacctcccccgtgggggaccacggatctctcgtccgcatcccccctccacctgcacacgagagaagcctgagcgcatacgggggagggaatcgcgcttccatggagttcctgcgccaggaagacacccccggttgccggccacccgagggcaacctgagggatagcgatacatcaattagcattccgtccgtcgaccacgaggagctggagcgttctttcagcgggttttcaatctcccagtccaaagaaaacctagacgcccttaactcctgctatgctgctgtagcaccctgtgccaaggtcagaccttatatcgccgaaggggagagcgacaccgacagtgacctctgcactccttgcggacctccaccacggagcgccaccggggagggacctttcggggacgtgggatgggccggtcccaggaaatag

SEQ ID NO: 248144 - DNA, 2619 bp, Artificial Sequence
  derived and/or modified sequence
atggtgcagaagagcagaaacggcggcgtgtaccccggccccagcggcgagaagaagctgaaggtgggcttcgtgggcctggaccccggcgcccccgacagcaccagagacggcgccctgctgatcgccggcagcgaggcccccaagagaggcagcatcctgagcaagcccagagccggcggcgccggcgccggcaagccccccaagagaaacgccttctacagaaagctgcagaacttcctgtacaacgtgctggagagacccagaggctgggccttcatctaccacgcctacgtgttcctgctggtgttcagctgcctggtgctgagcgtgttcagcaccatcaaggagtacgagaagagcagcgagggcgccctgtacatcctggagatcgtgaccatcgtggtgttcggcgtggagtacttcgtgagaatctgggccgccggctgctgctgcagatacagaggctggagaggcagactgaagttcgccagaaagcccttctgcgtgatcgacatcatggtgctgatcgccagcatcgccgtgctggccgccggcagccagggcaacgtgttcgccaccagcgccctgagaagcctgagattcctgcagatcctgagaatgatcagaatggacagaagaggcggcacctggaagctgctgggcagcgtggtgtacgcccacagcaaggagctggtgaccgcctggtacatcggcttcctgtgcctgatcctggccagcttcctggtgtacctggccgagaagggcgagaacgaccacttcgacacctacgccgacgccctgtggtggggcctgatcaccctgaccaccatcggctacggcgacaagtacccccagacctggaacggcagactgctggccgccaccttcaccctgatcggcgtgagcttcttcgccctgcccgccggcatcctgggcagcggcttcgccctgaaggtgcaggagcagcacagacagaagcacttcgagaagagaagaaaccccgccgccggcctgatccagagcgcctggagattctacgccaccaacctgagcagaaccgacctgcacagcacctggcagtactacgagagaaccgtgaccgtgcccatgtacagcagccagacccagacctacggcgccagcagactgatcccccccctgaaccagctggagctgctgagaaacctgaagagcaagagcggcctggccttcagaaaggaccccccccccgagcccagccccagcaagggcagcccctgcagaggccccctgtgcggctgctgccccggcagaagcagccagaaggtgagcctgaaggacagagtgttcagcagccccagaggcgtggccgccaagggcaagggcagcccccaggcccagaccgtgagaagaagccccagcgccgaccagagcctggaggacagccccagcaaggtgcccaagagctggagcttcggcgacagaagcagagccagacaggccttcagaatcaagggcgccgccagcagacagaacagcgaggaggccagcctgcccggcgaggacatcgtggacgacaagagctgcccctgcgagttcgtgaccgaggacctgacccccggcctgaaggtgagcatcagagccgtgtgcgtgatgagattcctggtgagcaagagaaagttcaaggagagcctgagaccctacgacgtgatggacgtgatcgagcagtacagcgccggccacctggacatgctgagcagaatcaagagcctgcagagcagagtggaccagatcgtgggcagaggccccgccatcaccgacaaggacagaaccaagggccccgccgaggccgagctgcccgaggaccccagcatgatgggcagactgggcaaggtggagaagcaggtgctgagcatggagaagaagctggacttcctggtgaacatctacatgcagagaatgggcatcccccccaccgagaccgaggcctacttcggcgccaaggagcccgagcccgcccccccctaccacagccccgaggacagcagagagcacgtggacagacacggctgcatcgtgaagatcgtgagaagcagcagcagcaccggccagaagaacttcagcgccccccccgccgccccccccgtgcagtgcccccccagcaccagctggcagccccagagccaccccagacagggccacggcaccagccccgtgggcgaccacggcagcctggtgagaatcccccccccccccgcccacgagagaagcctgagcgcctacggcggcggcaacagagccagcatggagttcctgagacaggaggacacccccggctgcagaccccccgagggcaacctgagagacagcgacaccagcatcagcatccccagcgtggaccacgaggagctggagagaagcttcagcggcttcagcatcagccagagcaaggagaacctggacgccctgaacagctgctacgccgccgtggccccctgcgccaaggtgagaccctacatcgccgagggcgagagcgacaccgacagcgacctgtgcaccccctgcggccccccccccagaagcgccaccggcgagggccccttcggcgacgtgggctgggccggccccagaaagtag

SEQ ID NO: 248145 - DNA, 2619 bp, Artificial Sequence
  derived and/or modified sequence
atggtgcagaagagcagaaacggcggcgtgtaccccggccccagcggcgagaagaagctgaaggtgggcttcgtgggcctggaccccggcgcccccgacagcaccagagacggcgccctgctgatcgccggcagcgaggcccccaagagaggcagcatcctgagcaagcccagagccggcggcgccggcgccggcaagccccccaagagaaacgccttctacagaaagctgcagaacttcctgtacaacgtgctggagagacccagaggctgggccttcatctaccacgcctacgtgttcctgctggtgttcagctgcctggtgctgagcgtgttcagcaccatcaaggagtacgagaagagcagcgagggcgccctgtacatcctggagatcgtgaccatcgtggtgttcggcgtggagtacttcgtgagaatctgggccgccggctgctgctgcagatacagaggctggagaggcagactgaagttcgccagaaagcccttctgcgtgatcgacatcatggtgctgatcgccagcatcgccgtgctggccgccggcagccagggcaacgtgttcgccaccagcgccctgagaagcctgagattcctgcagatcctgagaatgatcagaatggacagaagaggcggcacctggaagctgctgggcagcgtggtgtacgcccacagcaaggagctggtgaccgcctggtacatcggcttcctgtgcctgatcctggccagcttcctggtgtacctggccgagaagggcgagaacgaccacttcgacacctacgccgacgccctgtggtggggcctgatcaccctgaccaccatcggctacggcgacaagtacccccagacctggaacggcagactgctggccgccaccttcaccctgatcggcgtgagcttcttcgccctgcccgccggcatcctgggcagcggcttcgccctgaaggtgcaggagcagcacagacagaagcacttcgagaagagaagaaaccccgccgccggcctgatccagagcgcctggagattctacgccaccaacctgagcagaaccgacctgcacagcacctggcagtactacgagagaaccgtgaccgtgcccatgtacagcagccagacccagacctacggcgccagcagactgatcccccccctgaaccagctggagctgctgagaaacctgaagagcaagagcggcctggccttcagaaaggaccccccccccgagcccagccccagcaagggcagcccctgcagaggccccctgtgcggctgctgccccggcagaagcagccagaaggtgagcctgaaggacagagtgttcagcagccccagaggcgtggccgccaagggcaagggcagcccccaggcccagaccgtgagaagaagccccagcgccgaccagagcctggaggacagccccagcaaggtgcccaagagctggagcttcggcgacagaagcagagccagacaggccttcagaatcaagggcgccgccagcagacagaacagcgaggaggccagcctgcccggcgaggacatcgtggacgacaagagctgcccctgcgagttcgtgaccgaggacctgacccccggcctgaaggtgagcatcagagccgtgtgcgtgatgagattcctggtgagcaagagaaagttcaaggagagcctgagaccctacgacgtgatggacgtgatcgagcagtacagcgccggccacctggacatgctgagcagaatcaagagcctgcagagccaggtggaccagatcgtgggcagaggccccgccatcaccgacaaggacagaaccaagggccccgccgaggccgagctgcccgaggaccccagcatgatgggcagactgggcaaggtggagaagcaggtgctgagcatggagaagaagctggacttcctggtgaacatctacatgcagagaatgggcatcccccccaccgagaccgaggcctacttcggcgccaaggagcccgagcccgcccccccctaccacagccccgaggacagcagagagcacgtggacagacacggctgcatcgtgaagatcgtgagaagcagcagcagcaccggccagaagaacttcagcgccccccccgccgccccccccgtgcagtgcccccccagcaccagctggcagccccagagccaccccagacagggccacggcaccagccccgtgggcgaccacggcagcctggtgagaatcccccccccccccgcccacgagagaagcctgagcgcctacggcggcggcaacagagccagcatggagttcctgagacaggaggacacccccggctgcagaccccccgagggcaacctgagagacagcgacaccagcatcagcatccccagcgtggaccacgaggagctggagagaagcttcagcggcttcagcatcagccagagcaaggagaacctggacgccctgaacagctgctacgccgccgtggccccctgcgccaaggtgagaccctacatcgccgagggcgagagcgacaccgacagcgacctgtgcaccccctgcggccccccccccagaagcgccaccggcgagggccccttcggcgacgtgggctgggccggccccagaaagtag

SEQ ID NO: 248146 - protein, 841 aa, Artificial Sequence
  derived and/or modified sequence
MVQKSRNGGVYPGPSGEKKLKVGFVGLDPGAPDSTRDGALLIAGSEAPKRGSILSKPRAGGAGAGKPPKRNAFYRKLQNFLYNVLERPRGWAFIYHAYVFLLVFSCLVLSVFSTIKEYEKSSEGALYILEIVTIVVFGVEYFVRIWAAGCCCRYRGWRGRLKFARKPFCVIDIMVLIASIAVLAAGSQGNVFATSALRSLRFLQILRMIRMDRRGGTWKLLGSVVYAHSKELVTAWYIGFLCLILASFLVYLAEKGENDHFDTYADALWWGLITLTTIGYGDKYPQTWNGRLLAATFTLIGVSFFALPAGILGSGFALKVQEQHRQKHFEKRRNPAAGLIQSAWRFYATNLSRTDLHSTWQYYERTVTVPMYSSQTQTYGASRLIPPLNQLELLRNLKSKSGLAFRKDPPPEPSPSPRGVAAKGKGSPQAQTVRRSPSADQSLEDSPSKVPKSWSFGDRSRARQAFRIKGAASRQNSEASLPGEDIVDDKSCPCEFVTEDLTPGLKVSIRAVCVMRFLVSKRKFKESLRPYDVMDVIEQYSAGHLDMLSRIKSLQSRVDQIVGRGPAITDKDRTKGPAEAELPEDPSMMGRLGKVEKQVLSMEKKLDFLVNIYMQRMGIPPTETEAYFGAKEPEPAPPYHSPEDSREHVDRHGCIVKIVRSSSSTGQKNFSAPPAAPPVQCPPSTSWQPQSHPRQGHGTSPVGDHGSLVRIPPPPAHERSLSAYGGGNRASMEFLRQEDTPGCRPPEGNLRDSDTSISIPSVDHEELERSFSGFSISQSKENLDALNSCYAAVAPCAKVRPYIAEGESDTDSDLCTPCGPPPRSATGEGPFGDVGWAGPRK

SEQ ID NO: 248147 - DNA, 3158 bp, Artificial Sequence
  derived and/or modified sequence
cgcggagcgaggtggccgcagcgtctccgcgcgcggcccaagcccggcaggagtgcggaaccgccgcctcggccatgcggctcccggccggggggcctgggctggggcccgcgccgccccccgcgctccgcccccgctgagcctgagcccgacccggggcgcctcccgccaggcaccatggtgcagaagtcgcgcaacggcggcgtataccccggcccgagcggggagaagaagctgaaggtgggcttcgtggggctggaccccggcgcgcccgactccacccgggacggggcgctgctgatcgccggctccgaggcccccaagcgcggcagcatcctcagcaaacctcgcgcgggcggcgcgggcgccgggaagccccccaagcgcaacgccttctaccgcaagctgcagaatttcctctacaacgtgctggagcggccgcgcggctgggcgttcatctaccacgcctacgtgttcctcctggttttctcctgcctcgtgctgtctgtgttttccaccatcaaggagtatgagaagagctcggagggggccctctacatcctggaaatcgtgactatcgtggtgtttggcgtggagtacttcgtgcggatctgggccgcaggctgctgctgccggtaccgtggctggagggggcggctcaagtttgcccggaaaccgttctgtgtgattgacatcatggtgctcatcgcctccattgcggtgctggccgccggctcccagggcaacgtctttgccacatctgcgctccggagcctgcgcttcctgcagattctgcggatgatccgcatggaccggcggggaggcacctggaagctgctgggctctgtggtctatgcccacagcaaggagctggtcactgcctggtacatcggcttcctttgtctcatcctggcctcgttcctggtgtacttggcagagaagggggagaacgaccactttgacacctacgcggatgcactctggtggggcctgatcacgctgaccaccattggctacggggacaagtacccccagacctggaacggcaggctccttgcggcaaccttcaccctcatcggtgtctccttcttcgcgctgcctgcaggcatcttggggtctgggtttgccctgaaggttcaggagcagcacaggcagaagcactttgagaagaggcggaacccggcagcaggcctgatccagtcggcctggagattctacgccaccaacctctcgcgcacagacctgcactccacgtggcagtactacgagcgaacggtcaccgtgcccatgtacagttcgcaaactcaaacctacggggcctccagacttatccccccgctgaaccagctggagctgctgaggaacctcaagagtaaatctggactcgctttcaggaaggaccccccgccggagccgtctccaagcccccgaggcgtggctgccaaggggaaggggtccccgcaggcccagactgtgaggcggtcacccagcgccgaccagagcctcgaggacagccccagcaaggtgcccaagagctggagcttcggggaccgcagccgggcacgccaggctttccgcatcaagggtgccgcgtcacggcagaactcagaagcaagcctccccggagaggacattgtggatgacaagagctgcccctgcgagtttgtgaccgaggacctgaccccgggcctcaaagtcagcatcagagccgtgtgtgtcatgcggttcctggtgtccaagcggaagttcaaggagagcctgcggccctacgacgtgatggacgtcatcgagcagtactcagccggccacctggacatgctgtcccgaattaagagcctgcagtccagagtggaccagatcgtggggcggggcccagcgatcacggacaaggaccgcaccaagggcccggccgaggcggagctgcccgaggaccccagcatgatgggacggctcgggaaggtggagaagcaggtcttgtccatggagaagaagctggacttcctggtgaatatctacatgcagcggatgggcatccccccgacagagaccgaggcctactttggggccaaagagccggagccggcgccgccgtaccacagcccggaagacagccgggagcatgtcgacaggcacggctgcattgtcaagatcgtgcgctccagcagctccacgggccagaagaacttctcggcgcccccggccgcgccccctgtccagtgtccgccctccacctcctggcagccacagagccacccgcgccagggccacggcacctcccccgtgggggaccacggctccctggtgcgcatcccgccgccgcctgcccacgagcggtcgctgtccgcctacggcgggggcaaccgcgccagcatggagttcctgcggcaggaggacaccccgggctgcaggccccccgaggggaacctgcgggacagcgacacgtccatctccatcccgtccgtggaccacgaggagctggagcgttccttcagcggcttcagcatctcccagtccaaggagaacctggatgctctcaacagctgctacgcggccgtggcgccttgtgccaaagtcaggccctacattgcggagggagagtcagacaccgactccgacctctgtaccccgtgcgggcccccgccacgctcggccaccggcgagggtccctttggtgacgtgggctgggccgggcccaggaagtgaggcggcgctgggccagtggacccgcccgcggccctcctcagcacggtgcctccgaggttttgaggcgggaaccctctggggcccttttcttacagtaactgagtgtggcgggaagggtgggccctggaggggcccatgtgggctgaaggatgggggctcctggcagtgaccttttacaaaagttattttccaacaggggctggagggctgggcagggccctgtggctccaggagcagcgtgcaggagcaaggctgccctgtccactctgctcagggccgcggccgacatcagcccggtgtgaggaggggcgggagtgatgacggggtgttgccagcgtggcaacaggcggggggttgtctcagccgagcccaggggaggcacaaagggcaggcctgttccctgaggacctgcgcaaagggcgggcctgtttggtgaggacctgcggccttgggtc

SEQ ID NO: 248148 - DNA, 2529 bp, Artificial Sequence
  derived and/or modified sequence
atggtccagaaatcccggaacggaggagtatacccgggacccagtggcgaaaaaaagttaaaggttggtttcgtgggactggatcccggagcacctgactccactcgagatggcgcccttttgattgccggaagtgaagctccaaagcggggtagcattctcagcaagccaagggccggaggcgcgggagccggaaaacctcctaagcgaaacgcattttatagaaaattacagaattttttgtataacgtccttgaacgccctcggggctgggcttttatatatcatgcctatgtcttcttgctcgtgttctcatgcctggtactctctgtctttagcactatcaaggagtatgaaaagagcagcgagggtgccttatatatcctcgagatcgtaacaatcgtcgtttttggcgtggagtactttgtgcgaatctgggcagcaggctgctgctgtcgatatcggggctggcgggggagactcaagttcgccagaaaacccttctgtgtcattgatatcatggtcctcatcgcgtcaattgctgtgctggccgcgggctcccagggcaacgtgttcgctacatctgctctgcgctcactgagattcctacagattcttcgcatgataaggatggataggagggggggcacctggaaactgctggggtccgtggtgtatgcccactcaaaagaactggtaaccgcctggtacatcggcttcttgtgcttaatcctggcctccttcctcgtgtatctcgccgagaagggcgaaaatgatcactttgacacatacgccgatgctttgtggtggggactgattaccttaacaacaattggatacggcgacaaatacccacaaacttggaacgggcggctacttgccgccacctttacacttatcggcgtatcgtttttcgccctgcctgccggcatactgggcagtggtttcgcattgaaagtgcaggaacagcacaggcaaaagcactttgagaagcgccgcaacccagccgcaggcctgatacaatctgcctggcgtttctatgccaccaatctgagtagaactgatcttcacagcacttggcagtactacgaacggactgtcactgtgcctatgtacagttcccagacccagacatatggggcgtctaggcttatccctcccctgaaccagttagagcttctgagaaacctcaagtcaaagtctggccttgcgttccggaaggacccccccccagaaccctccccctctcctcgaggagtggctgcaaaaggcaaggggtctccccaagcacagaccgtgaggagatcaccatctgccgaccagtctctggaagacagtcctagcaaagttccaaagagttggtcattcggagataggagtagagcccggcaggcctttaggatcaaaggggccgcaagtaggcagaactcagaagaagcatcgctgccaggcgaagatattgtggatgataagtcttgcccctgtgaattcgtgaccgaggaccttacaccaggactgaaagtgagtatccgggccgtatgcgtgatgaggttcctcgtgtcgaagaggaagttcaaggaaagcctgcgcccttacgacgttatggatgtcatcgagcagtactctgctggccacttagatatgctcagccgcataaaatcgcttcagtcaagagtggaccagattgtgggtcgaggtcccgccattacagataaagataggaccaaggggcctgccgaggctgagttacctgaagatccttcgatgatgggtcgactaggtaaagtagagaagcaggtactcagcatggagaaaaaactggattttcttgtcaacatttatatgcagcggatggggattccccccaccgaaacagaggcctatttcggagccaaagaacctgaaccggcgcccccttaccattctccggaagattcccgtgagcatgtcgataggcacggctgcattgtcaagatcgtgagaagtagctcatccaccggccaaaagaattttagcgcaccgcccgccgctcctcctgtgcagtgcccaccttccacctcgtggcagcctcagtcgcaccctcggcagggtcatggcaccagcccagtcggtgaccatgggtcccttgtgcggattcctccacctcccgcccacgagcggagcctgtctgcttatggcggcggcaacagggcctctatggagttcctgcgtcaagaagatacacccggttgcaggccccctgagggcaacttacgggactccgacacctcaatcagcatcccgtccgtggatcatgaggaacttgagcgctccttcagcggcttctcaattagccagagcaaagagaatctggacgccttaaatagttgttacgctgcagttgccccatgcgcaaaagtgcgcccctacattgcggaaggggaatctgataccgattctgacttgtgtaccccctgcggcccccctcctcgatcagctactggcgaaggccccttcggtgacgtaggctgggctggaccgagaaaatag

SEQ ID NO: 248149 - DNA, 2526 bp, Artificial Sequence
  derived and/or modified sequence
atggtgcagaaatctaggaacggcggcgtttaccccggaccatccggcgagaaaaagttgaaagtaggttttgtagggctggatcctggtgctcccgatagcaccagggatggcgctcttctgattgccggttcagaggccccaaagcgcggatcgattttgagcaaaccacgagcagggggcgccggcgcaggcaaacccccaaagagaaacgccttctacaggaagttgcagaacttcttatataatgtactggagcgtcctcggggatgggctttcatttatcacgcctacgtgttcctcctggtgttcagctgcttagtgttatcagtcttttctactatcaaagaatacgagaagtccagtgagggtgctctgtacatcctggaaattgtgactattgtagtgttcggtgtggaatattttgtccggatatgggcagctggatgttgctgtcgctaccgtgggtggaggggtaggttaaaattcgcccgaaagcctttctgtgtgatagacataatggtgctgattgcaagtatcgccgtgctcgctgccggttcccaggggaacgtattcgctacgtctgctcttcgcagtctacgatttctccagattctgcgcatgattcggatggacaggagaggcgggacatggaaactcctcggctccgtggtgtacgctcacagcaaggagctggtgacagcttggtacattggcttcctttgcctgatcctggcctcattcctcgtgtacttggccgaaaaaggcgagaacgaccacttcgacacttacgcagatgctctatggtgggggctgatcactctgacaacaatcggatatggagacaagtatccacagacgtggaacggcagactcttggcggccacctttaccctaattggggtaagttttttcgctctacctgccggcatactaggaagcggatttgccctcaaggttcaggagcagcataggcagaagcatttcgagaaacggaggaaccccgccgccggattgatccaaagtgcatggcgattttacgcaacgaacctgtctagaaccgatctccactccacatggcagtactacgagcgtactgttaccgttcccatgtacagctcacagacacagacatacggcgctagccgacttattcctcccctaaaccagttggaacttctgcgaaatctgaaaagtaagagcggcttggcattccgcaaggacccacctcctgagcccagcccgtccccacgcggggtcgctgcaaagggcaagggctccccccaggctcagaccgtccggcgaagcccatcggcagatcagagcctggaagattcaccaagtaaggtgccaaaatcttggtccttcggcgaccgaagccgggcacggcaggccttccggatcaaaggcgccgcaagccggcagaattccgaggctagcctccccggtgaggacattgtcgatgacaaatcatgtccttgtgagttcgtaactgaggacctgactcccggactcaaagtctctatcagagcagtttgcgtgatgcggttcctcgtgtctaagcgcaagttcaaagagtcactcagaccctacgacgtgatggatgtcatcgaacagtattccgctgggcatctcgacatgctgtcacgtattaagtcattacagtctagagtggaccaaatcgtagggagaggccccgctatcacagacaaagacaggacaaaaggcccggcagaggcagaacttcctgaggaccctagcatgatgggtcgattgggtaaagtggagaagcaggtattgagcatggagaagaagctagattttttggttaacatctatatgcagcgcatgggaatccctcctactgagacagaggcatattttggtgccaaagagcctgagcccgccccaccttatcattccccagaagactcgagggagcacgtggatagacatggctgcatcgtcaagatcgtgcgatcctcctcctcaactggtcagaagaacttttcagcccctcctgccgcgccgcccgtgcagtgtccaccatctacatcatggcagccacaaagccatccccgacaggggcatggaacctcaccagtgggagaccatgggagtttagtgcgcatccctccccctcccgctcatgagagaagtctttccgcgtatggtggcggcaatcgagcaagcatggagttcctgagacaggaagacaccccggggtgtagaccacccgaggggaacctgagggattctgacacctctatcagcatacctagtgtcgatcacgaagaactggagcgttcttttagcggtttttccattagtcagagtaaagaaaacttggatgcgcttaattcctgctatgcagctgtggccccatgcgctaaagtgcggccctatattgccgagggggagtctgatacagatagcgatctctgcactccctgtggacctcctcctagatcagccacaggggaaggtccttttggcgacgtgggctgggccggcccccgcaaatag

SEQ ID NO: 248150 - DNA, 2529 bp, Artificial Sequence
  derived and/or modified sequence
atggtgcagaagagcagaaatggaggagtgtacccaggccccagcggggagaagaagctgaaggtgggctttgtgggcctggaccccggggccccagacagcaccagagatggagccctgctgattgctggcagcgaggcccccaagaggggcagcatcctgagcaagcccagggctggaggagctggggccggcaagccacccaagagaaatgccttctacaggaagctgcagaacttcctgtacaacgtgctggagcggccccggggctgggccttcatctaccacgcctacgtgttcctgctggtgttcagctgcctggtgctgagcgtcttcagcaccatcaaggagtatgagaagagcagcgagggcgccctgtacatcctggagatcgtgaccatcgtggtgtttggagtggagtactttgtgcgcatctgggccgccggctgctgctgccgctaccggggctggaggggccgcctgaagtttgccaggaagcccttctgtgtgattgacatcatggtgctgattgccagcattgctgtgctggccgccggcagccagggcaatgtgtttgccaccagcgccctgcggagcctgcgcttcctgcagatcctgaggatgatccgcatggacagaagaggaggcacctggaagctgctgggctctgtggtgtatgcccacagcaaggagctggtgacagcctggtacatcggcttcctgtgcctgatcctggccagcttcctggtgtacctggccgagaagggagaaaatgaccactttgacacctatgcagatgccctgtggtggggcctcatcaccctgaccaccatcggctacggggacaagtacccccagacctggaatggccgcctgctggccgccaccttcaccctcatcggcgtgtccttctttgccctgcctgctggcatcctgggcagcggctttgccctgaaggtgcaggagcagcaccggcagaagcactttgagaagagaagaaatcctgctgctggcctcatccagagcgcctggaggttctacgccaccaacctgagcaggacagacctgcacagcacctggcagtactatgaaagaacagtgacagtgcccatgtacagcagccagacccagacctatggagccagccgcctcatcccccccctgaaccagctggagctgctgaggaacctgaagagcaagagcggcctggccttcaggaaggaccccccacctgagcccagccccagcccccggggcgtggccgccaagggcaagggcagcccccaggcccagacagtgcggcgcagccccagcgctgaccagagcctggaggacagccccagcaaggtgcccaagtcctggagctttggagacaggagccgggcccggcaggccttccgcatcaagggagctgccagccggcagaacagcgaggaggccagcctgcctggagaagatattgtggatgacaagagctgcccctgtgaatttgtgacagaggacctgaccccaggcctgaaggtgtccatccgggctgtgtgtgtgatgaggttcctggtgtccaagaggaagttcaaggagagcctgcggccctatgatgtgatggatgtgattgagcagtacagcgctggccacctggacatgctgagccgcatcaagagcctgcagagccgggtggaccagatcgtgggccggggccctgccatcacagacaaggacaggaccaagggccctgctgaggccgagctgcctgaggaccccagcatgatgggccgcctgggcaaggtggagaagcaggtgctgtccatggagaagaagctggacttcctggtgaacatctacatgcagaggatgggcatccccccaacagaaacagaggcctactttggagccaaggagcctgagcccgccccaccctaccacagccctgaggacagccgggagcacgtggacagacatggctgcatcgtgaagatcgtgcgcagcagcagcagcacaggccagaagaacttcagcgcccccccagctgcccctcctgtgcagtgcccccccagcacctcctggcagccccagagccacccccggcagggccacggcaccagccctgtgggggaccacggcagcctggtgcgcatccccccacctccagcccacgagaggagcctgagcgcctatggaggcggcaacagagcctccatggagttcctgcggcaggaggacaccccaggctgccggcccccagagggcaacctgcgggacagcgacaccagcatcagcatccccagcgtggaccacgaggagctggagaggagcttcagcggcttcagcatcagccagagcaaggagaacctggatgccctgaacagctgctacgccgctgtggccccctgtgccaaggtgcggccctacatcgccgagggggagagtgacacagacagcgacctgtgcaccccctgtggccccccacccaggtctgccactggagagggcccctttggagatgtgggctgggccggccccaggaagtag

SEQ ID NO: 248151 - DNA, 2526 bp, Artificial Sequence
  derived and/or modified sequence
atggtgcagaagagcagaaatggaggagtgtacccaggccccagcggggagaagaagctgaaggtgggctttgtgggcctggaccccggggccccagacagcaccagagatggagccctgctgattgctggcagcgaggcccccaagaggggcagcatcctgagcaagcccagggctggaggagctggggccggcaagccacccaagagaaatgccttctacaggaagctgcagaacttcctgtacaacgtgctggagcggccccggggctgggccttcatctaccacgcctacgtgttcctgctggtgttcagctgcctggtgctgagcgtcttcagcaccatcaaggagtatgagaagagcagcgagggcgccctgtacatcctggagatcgtgaccatcgtggtgtttggagtggagtactttgtgcgcatctgggccgccggctgctgctgccgctaccggggctggaggggccgcctgaagtttgccaggaagcccttctgtgtgattgacatcatggtgctgattgccagcattgctgtgctggccgccggcagccagggcaatgtgtttgccaccagcgccctgcggagcctgcgcttcctgcagatcctgaggatgatccgcatggacagaagaggaggcacctggaagctgctgggctctgtggtgtatgcccacagcaaggagctggtgacagcctggtacatcggcttcctgtgcctgatcctggccagcttcctggtgtacctggccgagaagggagaaaatgaccactttgacacctatgcagatgccctgtggtggggcctcatcaccctgaccaccatcggctacggggacaagtacccccagacctggaatggccgcctgctggccgccaccttcaccctcatcggcgtgtccttctttgccctgcctgctggcatcctgggcagcggctttgccctgaaggtgcaggagcagcaccggcagaagcactttgagaagagaagaaatcctgctgctggcctcatccagagcgcctggaggttctacgccaccaacctgagcaggacagacctgcacagcacctggcagtactatgaaagaacagtgacagtgcccatgtacagcagccagacccagacctatggagccagccgcctcatcccccccctgaaccagctggagctgctgaggaacctgaagagcaagagcggcctggccttcaggaaggaccccccacctgagcccagccccagcccccggggcgtggccgccaagggcaagggcagcccccaggcccagacagtgcggcgcagccccagcgctgaccagagcctggaggacagccccagcaaggtgcccaagtcctggagctttggagacaggagccgggcccggcaggccttccgcatcaagggagctgccagccggcagaacagcgaggccagcctgcccggggaggacatcgtggatgacaagagctgcccctgtgaatttgtgacagaggacctgaccccaggcctgaaggtgtccatccgggctgtgtgtgtgatgaggttcctggtgtccaagaggaagttcaaggagagcctgcggccctatgatgtgatggatgtgattgagcagtacagcgctggccacctggacatgctgagccgcatcaagagcctgcagagccgggtggaccagatcgtgggccggggccctgccatcacagacaaggacaggaccaagggccctgctgaggccgagctgcctgaggaccccagcatgatgggccgcctgggcaaggtggagaagcaggtgctgtccatggagaagaagctggacttcctggtgaacatctacatgcagaggatgggcatccccccaacagaaacagaggcctactttggagccaaggagcctgagcccgccccaccctaccacagccctgaggacagccgggagcacgtggacagacatggctgcatcgtgaagatcgtgcgcagcagcagcagcacaggccagaagaacttcagcgcccctcctgctgcccctcctgtgcagtgcccccccagcacctcctggcagccccagagccacccccggcagggccacggcaccagccctgtgggggaccacggcagcctggtgcgcatccccccacctccagcccacgagaggagcctgagcgcctacggcggcggcaacagagcctccatggagttcctgcggcaggaggacaccccaggctgcaggcctcctgagggcaacctgcgggacagcgacaccagcatcagcatccccagcgtggaccacgaggagctggagaggagcttcagcggcttcagcatcagccagagcaaagaaaacctggatgccctgaacagctgctatgctgctgtggccccctgtgccaaggtgcggccctacatcgccgagggggagagtgacacagacagcgacctgtgcaccccctgtggccccccacccaggtctgccaccggggagggcccctttggagatgtgggctgggccggccccaggaagtag

SEQ ID NO: 248152 - DNA, 2529 bp, Artificial Sequence
  derived and/or modified sequence
atggtgcagaagagccggaacggcggcgtgtaccccggccccagcggtgaaaaaaagcttaaggtaggattcgtggggctagaccctggcgcgcccgactctacacgggatggcgctcttctcatagccgggtctgaggccccaaagagaggaagcatcctgagcaaacccagagccggaggcgcgggcgccggtaaaccacctaagaggaatgccttctaccgcaagctccagaacttcctatacaatgtcttagagcggcctagaggctgggccttcatttatcacgcctatgtgtttctgcttgtgttctcctgcctggtgctgagcgtgttcagcacaatcaaagaatacgagaaaagcagtgaaggagccctttacattctggaaattgtgactatcgtggtcttcggagtggaatattttgtcaggatttgggctgccggatgttgctgtcggtaccgtggatggcgcggacgtctcaaatttgcgagaaagcccttttgcgtaattgatataatggtcttaattgcatcaatcgcagttttggcggccggttcacagggcaacgtgtttgctaccagtgcactcaggtctttaagattcctgcagatcctgcgaatgattaggatggaccgaagaggggggacttggaagttacttggctctgtggtgtacgcacacagcaaggagctcgtgactgcgtggtacattgggttcctctgcctaattctagccagttttctggtttacctagccgaaaagggtgagaacgaccatttcgacacgtacgctgacgcactatggtgggggctgatcacacttactactatcggatatggtgacaaatatccacagacatggaacggaagactgcttgccgccaccttcaccttaatcggagtgtccttttttgctctgccagcgggtattttgggatcaggctttgctttaaaggtgcaggaacaacaccggcaaaaacatttcgagaagaggcgcaatcctgctgctggccttatccagtcagcctggcgattctacgcaactaatctcagtagaaccgacctgcacagcacttggcagtattacgagcgcacggtcacagttcccatgtacagctcccagacacagacctacggtgcatccagactcatcccacctttgaatcagctagaattgcttcgcaacctcaaaagcaaatctgggttagctttccgtaaagatccccctcctgagccgtcaccgagtcctaggggggtggcagccaaaggcaaagggagccctcaggctcagaccgttcgaagaagcccttccgccgaccagtctcttgaggactcaccaagtaaggtgcccaaaagttggtcatttggagatcgatcgcgggctaggcaggctttcaggataaaaggcgcagcgtctcggcagaatagtgaggaggcgtcattaccaggcgaggatatagttgacgataagagttgtccctgcgaattcgtgactgaagacttaacccctggcctgaaggtgtccatccgggccgtgtgcgttatgcgcttcctcgtctccaagcgaaaatttaaggagagtctgcggccatacgacgtaatggacgtgatcgagcaatattccgctggtcaccttgatatgctctcaagaataaaatcactccagtccagagtggaccagatcgtaggtagggggcctgcaattactgataaagacagaaccaaagggcccgccgaggctgagctgcctgaagatcccagcatgatgggaagactgggcaaagtcgaaaagcaggtcctctccatggagaagaagctggacttcctcgttaacatatacatgcaaaggatgggaattccacccacagagacggaggcttattttggcgcgaaagagcccgaacccgctccaccttatcactccccagaggattcacgcgaacacgtcgatagacatggatgcattgtgaagattgttcgtagttcgagtagcaccggacagaaaaacttttctgccccacccgctgccccgccggtgcagtgccctccctccactagctggcagccccagagccatccccgccagggtcatggaacaagccccgtcggtgatcacgggagcctggtgcggattccaccaccccccgcccacgagagaagcctctctgcatacggcggaggcaacagggctagtatggaattcctgcggcaggaggacacacctggatgcaggcctccagagggcaatctgcgcgattccgatacttctattagcataccaagcgtggatcacgaagaacttgaacgctcatttagtgggttttcaatctctcagtcgaaggagaacctggacgcactcaatagctgctacgctgccgtcgccccatgtgctaaggtcagaccatacattgcggaaggcgaatctgacacggactccgacctttgcactccatgcgggccccccccccggtctgccactggagagggacccttcggcgacgttggctgggccggcccgaggaaatag

SEQ ID NO: 248153 - DNA, 2526 bp, Artificial Sequence
  derived and/or modified sequence
atggtgcagaagagccggaacggcggcgtgtaccccggccccagcggcgagaagaagttaaaggtaggtttcgtaggcctggaccctggagcccctgatagcacaagagatggcgctctgctgatagcaggtagcgaagctccaaaaagaggatctatcctgtcgaagccgagagctggaggcgctggggctgggaaaccccccaaacgaaatgccttctataggaagctccagaactttttatacaacgttcttgaaagaccaaggggatgggccttcatctaccacgcatacgttttcctcctcgtttttagctgcctagtcctctccgttttctccacaattaaggaatacgagaagagttcggagggagccctgtatattctcgaaattgttacgattgtagtgttcggtgtcgagtactttgtgaggatatgggccgccggctgttgctgtagataccgtggttggaggggccggctgaagtttgcccgcaagcctttctgcgtgattgatatcatggtactcattgccagtatcgccgtattagctgccggaagccaaggtaacgtgttcgcgacttctgctctgaggagcctgaggttcctgcagatcttaagaatgatccgaatggaccgtcggggtggcacatggaaattgctcggctctgtggtgtatgcccactcgaaagagctggtgacagcctggtatattggatttctgtgtctgatcctggcctctttcctggtgtacctggctgaaaagggcgaaaatgatcacttcgacacgtatgcagatgctctgtggtgggggcttattacacttactacaatcgggtatggcgataagtacccccaaacttggaacggccggcttctcgccgcaacctttacattaattggggtgagcttcttcgcactgcccgcaggcatccttggcagtggtttcgcactgaaggtccaggagcagcacaggcagaaacatttcgagaaacgtaggaatcctgccgcgggactgattcagtcagcatggcgtttttatgcgacgaacctgagtaggaccgacctgcattctacctggcagtattacgagaggactgtgactgtgcctatgtattcctcacaaacccagacttatggggcgtcccgattaattcctccgctgaaccagctcgaattgcttcggaatttaaaaagtaaaagtggcctggccttccggaaagatcccccacccgaaccgagtccctcaccgaggggagtcgccgctaagggcaaaggatctccccaagcccagacggtcagacggagcccaagcgcggatcagagtctggaagatagtccatccaaagtgccaaaatcttggtcctttggcgaccggagtcgcgccagacaggcttttaggatcaagggggcagccagtaggcagaactccgaagcctccctccccggcgaagacattgtggatgacaagtcttgcccatgtgaattcgtgacggaagacctgacccccggcctcaaggtgtccataagggctgtttgcgtgatgcgtttcttagtatccaaaaggaaattcaaagagtcgctaaggccctatgacgttatggacgtcatcgagcaatatagcgccggacatttggatatgctgagccgcatcaaaagtcttcagagcagagtcgaccagatagtagggcgtggcccggctattaccgacaaggatcggacaaaaggcccagccgaggcagaactgcctgaagatcccagcatgatgggacgcctgggtaaagttgagaagcaggtgttgtccatggaaaaaaaactagattttctggtcaacatatacatgcagcgaatgggaatcccgcccaccgagactgaggcgtacttcggcgccaaggagccagaacccgccccgccctaccattcgcccgaagacagtcgggagcacgtagacagacatggctgcattgttaagatcgtcaggtcatccagcagcactggccagaagaatttctctgctccccccgccgccccccccgtccagtgcccgccatcaacgagctggcagcctcagtctcaccctcgccaaggtcacggcactagccccgtcggggaccacggctctttggtgcgcatccctcccccaccagctcacgagagaagtctgagcgcctacggggggggcaaccgcgcatctatggagttcctgcggcaggaagatactcccgggtgccgccctccagagggaaatctcagagactccgacacctcaatctcaatcccatcagttgatcatgaggagcttgagcggtccttctcaggcttctccatttcacagtctaaagagaacctggacgcgctcaattcgtgctatgccgccgtcgccccttgcgccaaggtgcgaccatatatcgctgaaggggagtccgacacagacagcgacctctgcaccccatgcggacctccacccaggagcgccacaggagagggccctttcggcgatgtggggtgggccggtccccggaagtag

SEQ ID NO: 248154 - DNA, 3159 bp, Artificial Sequence
  derived and/or modified sequence
cggagcgaggtggccgcagcgtctccgcgcgcggcccaagcccggcaggagtgcggaaccgccgcctcggccatgcggctcccggccggggggcctgggctggggcccgcgccgccccccgcgctccgcccccgctgagcctgagcccgacccggggcgcctcccgccaggcaccatggtgcagaagtcgcgcaacggcggcgtataccccggcccgagcggggagaagaagctgaaggtgggcttcgtggggctggaccccggcgcgcccgactccacccgggacggggcgctgctgatcgccggctccgaggcccccaagcgcggcagcatcctcagcaaacctcgcgcgggcggcgcgggcgccgggaagccccccaagcgcaacgccttctaccgcaagctgcagaatttcctctacaacgtgctggagcggccgcgcggctgggcgttcatctaccacgcctacgtgttcctcctggttttctcctgcctcgtgctgtctgtgttttccaccatcaaggagtatgagaagagctcggagggggccctctacatcctggaaatcgtgactatcgtggtgtttggcgtggagtacttcgtgcggatctgggccgcaggctgctgctgccggtaccgtggctggagggggcggctcaagtttgcccggaaaccgttctgtgtgattgacatcatggtgctcatcgcctccattgcggtgctggccgccggctcccagggcaacgtctttgccacatctgcgctccggagcctgcgcttcctgcagattctgcggatgatccgcatggaccggcggggaggcacctggaagctgctgggctctgtggtctatgcccacagcaaggagctggtcactgcctggtacatcggcttcctttgtctcatcctggcctcgttcctggtgtacttggcagagaagggggagaacgaccactttgacacctacgcggatgcactctggtggggcctgatcacgctgaccaccattggctacggggacaagtacccccagacctggaacggcaggctccttgcggcaaccttcaccctcatcggtgtctccttcttcgcgctgcctgcaggcatcttggggtctgggtttgccctgaaggttcaggagcagcacaggcagaagcactttgagaagaggcggaacccggcagcaggcctgatccagtcggcctggagattctacgccaccaacctctcgcgcacagacctgcactccacgtggcagtactacgagcgaacggtcaccgtgcccatgtacagttcgcaaactcaaacctacggggcctccagacttatccccccgctgaaccagctggagctgctgaggaacctcaagagtaaatctggactcgctttcaggaaggaccccccgccggagccgtctccaagcccccgaggcgtggctgccaaggggaaggggtccccgcaggcccagactgtgaggcggtcacccagcgccgaccagagcctcgaggacagccccagcaaggtgcccaagagctggagcttcggggaccgcagccgggcacgccaggctttccgcatcaagggtgccgcgtcacggcagaactcagaagaagcaagcctccccggagaggacattgtggatgacaagagctgcccctgcgagtttgtgaccgaggacctgaccccgggcctcaaagtcagcatcagagccgtgtgtgtcatgcggttcctggtgtccaagcggaagttcaaggagagcctgcggccctacgacgtgatggacgtcatcgagcagtactcagccggccacctggacatgctgtcccgaattaagagcctgcagtccagagtggaccagatcgtggggcggggcccagcgatcacggacaaggaccgcaccaagggcccggccgaggcggagctgcccgaggaccccagcatgatgggacggctcgggaaggtggagaagcaggtcttgtccatggagaagaagctggacttcctggtgaatatctacatgcagcggatgggcatccccccgacagagaccgaggcctactttggggccaaagagccggagccggcgccgccgtaccacagcccggaagacagccgggagcatgtcgacaggcacggctgcattgtcaagatcgtgcgctccagcagctccacgggccagaagaacttctcggcgcccccggccgcgccccctgtccagtgtccgccctccacctcctggcagccacagagccacccgcgccagggccacggcacctcccccgtgggggaccacggctccctggtgcgcatcccgccgccgcctgcccacgagcggtcgctgtccgcctacggcgggggcaaccgcgccagcatggagttcctgcggcaggaggacaccccgggctgcaggccccccgaggggaacctgcgggacagcgacacgtccatctccatcccgtccgtggaccacgaggagctggagcgttccttcagcggcttcagcatctcccagtccaaggagaacctggatgctctcaacagctgctacgcggccgtggcgccttgtgccaaagtcaggccctacattgcggagggagagtcagacaccgactccgacctctgtaccccgtgcgggcccccgccacgctcggccaccggcgagggtccctttggtgacgtgggctgggccgggcccaggaagtgaggcggcgctgggccagtggacccgcccgcggccctcctcagcacggtgcctccgaggttttgaggcgggaaccctctggggcccttttcttacagtaactgagtgtggcgggaagggtgggccctggaggggcccatgtgggctgaaggatgggggctcctggcagtgaccttttacaaaagttattttccaacaggggctggagggctgggcagggccctgtggctccaggagcagcgtgcaggagcaaggctgccctgtccactctgctcagggccgcggccgacatcagcccggtgtgaggaggggcgggagtgatgacggggtgttgccagcgtggcaacaggcggggggttgtctcagccgagcccaggggaggcacaaagggcaggcctgttccctgaggacctgcgcaaagggcgggcctgtttggtgaggacctgcggccttgggtc

SEQ ID NO: 248155 - DNA, 2529 bp, Artificial Sequence
  derived and/or modified sequence
atggtgcagaagtcccgaaacggtggtgtatatcccggtcctagcggggagaagaaactcaaggtgggattcgttggattggacccaggcgctcctgacagcactagggacggtgccctgctgattgccggatcagaagcgcctaagcgcggaagtatcctttccaaacctagagctggcggtgctggcgctggtaagcccccaaagcgaaacgccttttatagaaaactgcagaattttctgtataatgtccttgagagacctcgcggatgggccttcatttatcacgcttatgtgtttctgctggtgtttagttgtctggtgttatccgtgtttagtactataaaggagtacgagaagagttccgagggggctctctatattttggagatcgtcacgatcgtggtcttcggcgtcgagtactttgtcagaatctgggctgcaggatgctgttgtcgctatcgcggatggaggggtaggctcaaatttgctcgaaaacccttctgcgttatagacattatggtgctgatcgcttcaattgctgttctggccgcaggctcacaaggcaatgtatttgctaccagtgctttgaggtctctgaggttcctgcagatacttagaatgatccgcatggatcgccgaggcggaacatggaaactgcttggctcagtagtgtatgcgcatagcaaagaactggtcacggcttggtatatcgggttcctgtgcctgatcctcgcttccttcctggtgtacctggccgagaagggagagaacgatcattttgatacttacgctgatgccctgtggtggggcctgataacccttacgacaatcggttatggggacaagtacccccaaacatggaatgggaggctgctcgccgctaccttcactctaataggtgtgtcattttttgccctccccgctgggatcctcggcagcggtttcgccttaaaggtgcaggagcagcatcgccagaaacatttcgaaaagcggcgaaatcctgcagcgggactcattcagagcgcttggcgtttctatgccacaaatctgagcaggactgacctgcactccacctggcagtattacgaacgtactgtgactgtgccaatgtactcctcccagacacagacctatggggcttccagactgattccccctctgaatcagctggagcttcttcgaaacctgaaatcaaaatctggactggccttccgcaaggaccccccaccggaaccctccccgagcccgcgtggagtggctgccaaaggtaagggcagcccgcaggcgcagacagtcagacggagcccatcggctgatcagtcgctggaggacagcccgagcaaagtgccaaaatcttggagcttcggggatcgcagtcgcgcacggcaggctttcagaataaagggagccgcatcaaggcagaacagcgaagaggcctccctgcccggtgaagatatcgtagatgataagagctgtccctgtgaattcgtcacggaggatttgacccctggcctgaaggtgagcatcagggccgtttgcgtgatgcgatttctggtgtcaaagcggaaattcaaggagtccctccggccatacgatgtgatggacgtaatcgaacagtactcagctggtcatttggatatgttgagtcgcattaaatccttgcaatcgcgggtggatcagatcgtaggcaggggccctgctattaccgacaaggatagaactaagggcccagccgaagcagagcttccagaagacccttccatgatgggccgactgggtaaggtcgagaaacaggtattgtcgatggagaaaaagctggatttcttagttaacatctatatgcagcgcatgggaatccccccaactgagaccgaggcttatttcggcgcaaaagagcccgagccggctccaccatatcacagtcccgaagatagtagggagcatgtggaccgccacggctgcattgtgaagattgtgaggtctagttcttctaccggccagaaaaatttcagcgctcccccagcagctccacccgtgcagtgtcccccttctaccagttggcaaccgcagagtcaccctcgacaaggtcacggcacctctcccgtcggagaccatggatcccttgtgaggattccaccgccacctgcccacgagaggagcttgtctgcttacggcggaggcaatcgggcatctatggagtttcttcggcaggaggatactccaggctgccgcccacctgaggggaacctgagagactcggacacctccatctctatccccagtgtagatcatgaggagttagagcgaagcttcagcggcttctcaatcagccaaagcaaagagaacctggatgcacttaactcttgttacgcggcagtggccccatgtgcaaaggtgcgtccgtacatagcggaaggcgagtcagacactgacagcgatctctgcacaccctgtggtccccctcctaggtccgccaccggcgaagggcctttcggggacgtgggatgggcaggccctaggaaatag

SEQ ID NO: 248156 - DNA, 2526 bp, Artificial Sequence
  derived and/or modified sequence
atggtccagaagtctcgcaatggaggagtgtatccaggaccgtcaggtgagaagaaactcaaggtaggattcgtcggtctagatccaggcgcacctgatagcactagggatggggcacttctcatagcaggatcagaagcacccaaaaggggatctatactgtctaagcctcgggctggtggggctggggctggaaagccgcctaagcgtaacgctttctatcgtaaactgcagaattttctgtacaacgtcttagagcggcctagagggtgggcttttatttatcatgcctatgttttcctgctggtgttctcttgcttagtactgagcgtgttttccactatcaaagaatacgaaaagtcatcagagggtgctctgtacatactcgagattgtgaccatcgtggtattcggagttgaatatttcgtgcggatctgggctgctggctgctgttgtcgttatcggggatggcgcggaaggttaaagtttgcacggaagcccttctgcgtcatagatattatggtactgattgccagcattgccgttcttgccgctggtagccagggaaatgttttcgccacttcggccctgcgctccctccggttcctgcagatcctcaggatgattaggatggataggcggggtgggacctggaagttattaggctccgtggtgtacgcccattcgaaggagctggtgacggcgtggtatatcgggttcctctgtctgatcctggcctccttcctggtttatctggccgaaaagggcgagaacgatcacttcgatacatacgccgatgccctgtggtggggtttgatcactctgacgaccatcggctacggcgacaagtacccccaaacttggaatggacggctgttagccgctacttttactctgatcggcgtgagctttttcgcactcccagccggaatactggggagcgggttcgcactcaaggtacaagagcagcaccgacagaaacattttgaaaaaaggcggaaccccgctgccggtttgatccagtctgcctggcgcttctacgcaacaaatctgagcagaaccgatcttcattcaacatggcagtactacgagcgcaccgtgacggtgccaatgtactcctcacaaacccagacgtacggcgcttcaagactcataccacccctgaatcagctggaattgctgcgaaatctgaaatcaaagtcaggtctggcatttaggaaagacccgccaccagagccttcaccatcccctcgaggcgtggccgctaagggcaaaggcagccctcaggcacaaaccgtgcgtaggagcccctcagcagatcagtctttagaggattccccgtcaaaggtgcccaagagttggtccttcggtgaccgcagtcgcgctcgccaagcctttaggatcaagggtgccgcaagccgtcagaactcagaagcttcccttccaggcgaggatattgtagatgacaagagctgcccgtgcgagtttgtcactgaagatcttacgcccggactgaaggtgtcaattagagctgtgtgcgtgatgcggttccttgtgtcaaagcggaaattcaaggaatccctaagaccatatgacgtcatggacgtcattgagcaatatagcgccggacacctggacatgctctctcggatcaagagcctacaatctcgcgtcgatcagatcgtgggaagaggccctgctattacggacaaagataggaccaagggccctgccgaagccgagctgccagaggacccttcaatgatggggagactggggaaagttgaaaagcaggtgctatcgatggagaagaagctagattttctcgtgaatatctacatgcagaggatgggaatccctccgacggaaaccgaggcttacttcggtgccaaagagcctgagcctgcgccaccttaccacagtcccgaggatagtagagagcacgtggacaggcacggctgtattgtcaagatcgttcggtcatcctcctccacaggacaaaagaatttcagtgcaccgccagccgcaccgccagttcaatgtccccctagtacctcctggcagccgcagtctcatcctcgtcaggggcatggaaccagtcccgtcggggaccatggaagcctcgtgaggatccccccacctccagctcatgaacggtcactttcagcatacgggggaggcaatcgcgcatccatggagttcctgaggcaggaagacacaccgggttgccgcccaccagaagggaatctgcgagattcggatactagcatctctattcctagtgtcgatcacgaggagctcgaaaggtcatttagtggattctcaatctcgcagagcaaggagaatcttgacgcattaaattcctgctacgccgctgtagccccatgtgctaaggtaagaccctatattgccgagggtgagagcgacactgatagcgatctgtgtaccccttgcggaccccctccgaggtcggcaacaggcgaggggccatttggggacgtggggtgggctggcccaaggaagtag

SEQ ID NO: 248157 - DNA, 2529 bp, Artificial Sequence
  derived and/or modified sequence
atggtgcagaagagcagaaacggcggcgtgtaccccggccccagcggcgagaagaagctgaaggtgggcttcgtgggcctggaccccggcgcccccgacagcaccagagacggcgccctgctgatcgccggcagcgaggcccccaagagaggcagcatcctgagcaagcccagagccggcggcgccggcgccggcaagccccccaagagaaacgccttctacagaaagctgcagaacttcctgtacaacgtgctggagagacccagaggctgggccttcatctaccacgcctacgtgttcctgctggtgttcagctgcctggtgctgagcgtgttcagcaccatcaaggagtacgagaagagcagcgagggcgccctgtacatcctggagatcgtgaccatcgtggtgttcggcgtggagtacttcgtgagaatctgggccgccggctgctgctgcagatacagaggctggagaggcagactgaagttcgccagaaagcccttctgcgtgatcgacatcatggtgctgatcgccagcatcgccgtgctggccgccggcagccagggcaacgtgttcgccaccagcgccctgagaagcctgagattcctgcagatcctgagaatgatcagaatggacagaagaggcggcacctggaagctgctgggcagcgtggtgtacgcccacagcaaggagctggtgaccgcctggtacatcggcttcctgtgcctgatcctggccagcttcctggtgtacctggccgagaagggcgagaacgaccacttcgacacctacgccgacgccctgtggtggggcctgatcaccctgaccaccatcggctacggcgacaagtacccccagacctggaacggcagactgctggccgccaccttcaccctgatcggcgtgagcttcttcgccctgcccgccggcatcctgggcagcggcttcgccctgaaggtgcaggagcagcacagacagaagcacttcgagaagagaagaaaccccgccgccggcctgatccagagcgcctggagattctacgccaccaacctgagcagaaccgacctgcacagcacctggcagtactacgagagaaccgtgaccgtgcccatgtacagcagccagacccagacctacggcgccagcagactgatcccccccctgaaccagctggagctgctgagaaacctgaagagcaagagcggcctggccttcagaaaggaccccccccccgagcccagccccagccccagaggcgtggccgccaagggcaagggcagcccccaggcccagaccgtgagaagaagccccagcgccgaccagagcctggaggacagccccagcaaggtgcccaagagctggagcttcggcgacagaagcagagccagacaggccttcagaatcaagggcgccgccagcagacagaacagcgaggaggccagcctgcccggcgaggacatcgtggacgacaagagctgcccctgcgagttcgtgaccgaggacctgacccccggcctgaaggtgagcatcagagccgtgtgcgtgatgagattcctggtgagcaagagaaagttcaaggagagcctgagaccctacgacgtgatggacgtgatcgagcagtacagcgccggccacctggacatgctgagcagaatcaagagcctgcagagcagagtggaccagatcgtgggcagaggccccgccatcaccgacaaggacagaaccaagggccccgccgaggccgagctgcccgaggaccccagcatgatgggcagactgggcaaggtggagaagcaggtgctgagcatggagaagaagctggacttcctggtgaacatctacatgcagagaatgggcatcccccccaccgagaccgaggcctacttcggcgccaaggagcccgagcccgcccccccctaccacagccccgaggacagcagagagcacgtggacagacacggctgcatcgtgaagatcgtgagaagcagcagcagcaccggccagaagaacttcagcgccccccccgccgccccccccgtgcagtgcccccccagcaccagctggcagccccagagccaccccagacagggccacggcaccagccccgtgggcgaccacggcagcctggtgagaatcccccccccccccgcccacgagagaagcctgagcgcctacggcggcggcaacagagccagcatggagttcctgagacaggaggacacccccggctgcagaccccccgagggcaacctgagagacagcgacaccagcatcagcatccccagcgtggaccacgaggagctggagagaagcttcagcggcttcagcatcagccagagcaaggagaacctggacgccctgaacagctgctacgccgccgtggccccctgcgccaaggtgagaccctacatcgccgagggcgagagcgacaccgacagcgacctgtgcaccccctgcggccccccccccagaagcgccaccggcgagggccccttcggcgacgtgggctgggccggccccagaaagtag

SEQ ID NO: 248158 - DNA, 2526 bp, Artificial Sequence
  derived and/or modified sequence
atggtgcagaagagcagaaacggcggcgtgtaccccggccccagcggcgagaagaagctgaaggtgggcttcgtgggcctggaccccggcgcccccgacagcaccagagacggcgccctgctgatcgccggcagcgaggcccccaagagaggcagcatcctgagcaagcccagagccggcggcgccggcgccggcaagccccccaagagaaacgccttctacagaaagctgcagaacttcctgtacaacgtgctggagagacccagaggctgggccttcatctaccacgcctacgtgttcctgctggtgttcagctgcctggtgctgagcgtgttcagcaccatcaaggagtacgagaagagcagcgagggcgccctgtacatcctggagatcgtgaccatcgtggtgttcggcgtggagtacttcgtgagaatctgggccgccggctgctgctgcagatacagaggctggagaggcagactgaagttcgccagaaagcccttctgcgtgatcgacatcatggtgctgatcgccagcatcgccgtgctggccgccggcagccagggcaacgtgttcgccaccagcgccctgagaagcctgagattcctgcagatcctgagaatgatcagaatggacagaagaggcggcacctggaagctgctgggcagcgtggtgtacgcccacagcaaggagctggtgaccgcctggtacatcggcttcctgtgcctgatcctggccagcttcctggtgtacctggccgagaagggcgagaacgaccacttcgacacctacgccgacgccctgtggtggggcctgatcaccctgaccaccatcggctacggcgacaagtacccccagacctggaacggcagactgctggccgccaccttcaccctgatcggcgtgagcttcttcgccctgcccgccggcatcctgggcagcggcttcgccctgaaggtgcaggagcagcacagacagaagcacttcgagaagagaagaaaccccgccgccggcctgatccagagcgcctggagattctacgccaccaacctgagcagaaccgacctgcacagcacctggcagtactacgagagaaccgtgaccgtgcccatgtacagcagccagacccagacctacggcgccagcagactgatcccccccctgaaccagctggagctgctgagaaacctgaagagcaagagcggcctggccttcagaaaggaccccccccccgagcccagccccagccccagaggcgtggccgccaagggcaagggcagcccccaggcccagaccgtgagaagaagccccagcgccgaccagagcctggaggacagccccagcaaggtgcccaagagctggagcttcggcgacagaagcagagccagacaggccttcagaatcaagggcgccgccagcagacagaacagcgaggccagcctgcccggcgaggacatcgtggacgacaagagctgcccctgcgagttcgtgaccgaggacctgacccccggcctgaaggtgagcatcagagccgtgtgcgtgatgagattcctggtgagcaagagaaagttcaaggagagcctgagaccctacgacgtgatggacgtgatcgagcagtacagcgccggccacctggacatgctgagcagaatcaagagcctgcagagcagagtggaccagatcgtgggcagaggccccgccatcaccgacaaggacagaaccaagggccccgccgaggccgagctgcccgaggaccccagcatgatgggcagactgggcaaggtggagaagcaggtgctgagcatggagaagaagctggacttcctggtgaacatctacatgcagagaatgggcatcccccccaccgagaccgaggcctacttcggcgccaaggagcccgagcccgcccccccctaccacagccccgaggacagcagagagcacgtggacagacacggctgcatcgtgaagatcgtgagaagcagcagcagcaccggccagaagaacttcagcgccccccccgccgccccccccgtgcagtgcccccccagcaccagctggcagccccagagccaccccagacagggccacggcaccagccccgtgggcgaccacggcagcctggtgagaatcccccccccccccgcccacgagagaagcctgagcgcctacggcggcggcaacagagccagcatggagttcctgagacaggaggacacccccggctgcagaccccccgagggcaacctgagagacagcgacaccagcatcagcatccccagcgtggaccacgaggagctggagagaagcttcagcggcttcagcatcagccagagcaaggagaacctggacgccctgaacagctgctacgccgccgtggccccctgcgccaaggtgagaccctacatcgccgagggcgagagcgacaccgacagcgacctgtgcaccccctgcggccccccccccagaagcgccaccggcgagggccccttcggcgacgtgggctgggccggccccagaaagtag

SEQ ID NO: 248159 - protein, 393 aa, Artificial Sequence
  derived and/or modified sequence
MVQKSRNGGVYPGPSGEKKLKVGFVGLDPGAPDSTRDGALLIAGSEAPKRGSILSKPRAGGAGAGKPPKRNAFYRKLQNFLYNVLERPRGWAFIYHAYVFLLVFSCLVLSVFSTIKEYEKSSEGALYILEIVTIVVFGVEYFVRIWAAGCCCRYRGWRGRLKFARKPFCVIDIMVLIASIAVLAAGSQGNVFATSALRSLRFLQILRMIRMDRRGGTWKLLGSVVYAHSKELVTAWYIGFLCLILASFLVYLAEKGENDHFDTYADALWWGLITLTTIGYGDKYPQTWNGRLLAATFTLIGVSFFALPAGILGSGFALKVQEQHRQKHFEKRRNPAAGLIQSAWRFYATNLSRTDLHSTWQYYERTVTVPMYRYRRRAPATKQLFHFLFSICS

SEQ ID NO: 248160 - DNA, 1425 bp, Artificial Sequence
  derived and/or modified sequence
cgcggagcgaggtggccgcagcgtctccgcgcgcggcccaagcccggcaggagtgcggaaccgccgcctcggccatgcggctcccggccggggggcctgggctggggcccgcgccgccccccgcgctccgcccccgctgagcctgagcccgacccggggcgcctcccgccaggcaccatggtgcagaagtcgcgcaacggcggcgtataccccggcccgagcggggagaagaagctgaaggtgggcttcgtggggctggaccccggcgcgcccgactccacccgggacggggcgctgctgatcgccggctccgaggcccccaagcgcggcagcatcctcagcaaacctcgcgcgggcggcgcgggcgccgggaagccccccaagcgcaacgccttctaccgcaagctgcagaatttcctctacaacgtgctggagcggccgcgcggctgggcgttcatctaccacgcctacgtgttcctcctggttttctcctgcctcgtgctgtctgtgttttccaccatcaaggagtatgagaagagctcggagggggccctctacatcctggaaatcgtgactatcgtggtgtttggcgtggagtacttcgtgcggatctgggccgcaggctgctgctgccggtaccgtggctggagggggcggctcaagtttgcccggaaaccgttctgtgtgattgacatcatggtgctcatcgcctccattgcggtgctggccgccggctcccagggcaacgtctttgccacatctgcgctccggagcctgcgcttcctgcagattctgcggatgatccgcatggaccggcggggaggcacctggaagctgctgggctctgtggtctatgcccacagcaaggagctggtcactgcctggtacatcggcttcctttgtctcatcctggcctcgttcctggtgtacttggcagagaagggggagaacgaccactttgacacctacgcggatgcactctggtggggcctgatcacgctgaccaccattggctacggggacaagtacccccagacctggaacggcaggctccttgcggcaaccttcaccctcatcggtgtctccttcttcgcgctgcctgcaggcatcttggggtctgggtttgccctgaaggttcaggagcagcacaggcagaagcactttgagaagaggcggaacccggcagcaggcctgatccagtcggcctggagattctacgccaccaacctctcgcgcacagacctgcactccacgtggcagtactacgagcgaacggtcaccgtgcccatgtacaggtaccgccgccgggcacctgccaccaagcaactgtttcattttttattttccatttgttcttaaaccccactttttgttgttcattattttgattgattttttttctttaaaatgtatttttcacaaagg

SEQ ID NO: 248161 - DNA, 1182 bp, Artificial Sequence
  derived and/or modified sequence
atggtccaaaaatccaggaatggtggtgtataccctggcccatcaggggaaaaaaagctaaaagtgggatttgtggggcttgatccgggcgcacccgatagcacaagagatggcgctctgctcattgccggctctgaagcccccaagaggggctctatactgtccaagccaagggcaggaggtgccggtgcagggaagccacccaagcgcaatgccttctacaggaagctacagaactttctgtataacgttctagaacgacctagggggtgggcatttatctaccacgcctacgttttcctcctggtcttctcatgccttgtgctcagcgtattcagcacgataaaggaatacgagaaatccagcgagggtgcgctgtacatcctggagatagtgaccatcgttgtgttcggggttgaatactttgtaaggatttgggcagccggctgctgctgtcgttaccgcgggtggcggggcaggctgaaattcgcacgcaaacccttctgcgtgatcgatatcatggttttaattgctagcattgcagttcttgccgccggaagccagggcaatgtgtttgccacctcagctcttagatcactccgctttctgcagattctccgaatgatacgcatggatcgacggggtggtacctggaagctgctagggtctgtggtgtacgcacacagcaaagagttagtgaccgcttggtacatcgggttcctttgcttgatactcgccagtttcctggtctacttagccgagaagggcgaaaatgatcacttcgacacgtatgccgacgcactttggtggggtctaataaccctgactacgattggctacggtgacaagtatccacagacatggaacggtagattattggccgccaccttcaccctcattggagtaagtttttttgccttacccgcgggtattctcggctccgggttcgccctgaaggttcaggaacaacacagacagaagcacttcgaaaaaaggcgaaatcctgccgcgggacttatccaaagtgcttggaggttctacgcgacaaacctgtctcgaacagacctgcactccacctggcagtattatgaacggaccgtcactgtgcccatgtacagataccgtagaagagctccagccactaaacagcttttccattttctgttctccatctgttcgtag

SEQ ID NO: 248162 - DNA, 1182 bp, Artificial Sequence
  derived and/or modified sequence
atggtgcagaagagcagaaatggaggagtgtacccaggccccagcggggagaagaagctgaaggtgggctttgtgggcctggaccccggggccccagacagcaccagagatggagccctgctgattgctggcagcgaggcccccaagaggggcagcatcctgagcaagcccagggctggaggagctggggccggcaagccacccaagagaaatgccttctacaggaagctgcagaacttcctgtacaacgtgctggagcggccccggggctgggccttcatctaccacgcctacgtgttcctgctggtgttcagctgcctggtgctgagcgtcttcagcaccatcaaggagtatgagaagagcagcgagggcgccctgtacatcctggagatcgtgaccatcgtggtgtttggagtggagtactttgtgcgcatctgggccgccggctgctgctgccgctaccggggctggaggggccgcctgaagtttgccaggaagcccttctgtgtgattgacatcatggtgctgattgccagcattgctgtgctggccgccggcagccagggcaatgtgtttgccaccagcgccctgcggagcctgcgcttcctgcagatcctgaggatgatccgcatggacagaagaggaggcacctggaagctgctgggctctgtggtgtatgcccacagcaaggagctggtgacagcctggtacatcggcttcctgtgcctgatcctggccagcttcctggtgtacctggccgagaagggagaaaatgaccactttgacacctatgcagatgccctgtggtggggcctcatcaccctgaccaccatcggctacggggacaagtacccccagacctggaatggccgcctgctggccgccaccttcaccctcatcggcgtgtccttctttgccctgcctgctggcatcctgggcagcggctttgccctgaaggtgcaggagcagcaccggcagaagcactttgagaagagaagaaatcctgctgctggcctcatccagagcgcctggaggttctacgccaccaacctgagcaggacagacctgcacagcacctggcagtactatgaaagaacagtgacagtgcccatgtaccgctacagaagaagagccccagccaccaagcagctgttccacttcctgttcagcatctgcagctag

SEQ ID NO: 248163 - DNA, 1182 bp, Artificial Sequence
  derived and/or modified sequence
atggtgcagaagagccggaacggcggcgtgtaccccggccccagcggggagaagaagctgaaggtgggattcgttgggttagaccctggagctcccgatagtacacgagatggcgctttgctcattgccgggtctgaggctccaaaaagaggcagtatcctgagcaaaccaagggccggcggtgccggggcgggcaagccacctaaacgtaatgcgttttacaggaagttacagaatttcctgtacaacgtgctggagaggccccgaggctgggcttttatttaccacgcctacgtttttctgctggttttctcgtgccttgtgctctcggtgttctctaccataaaagagtacgaaaagtcctctgagggggccctgtacatcctggaaatcgttacaattgttgtcttcggggtcgaatacttcgttcgcatttgggcagccggatgctgctgcaggtatcgaggctggaggggtcgcctgaaatttgcacgcaagcccttttgcgtgattgatattatggtgttaatagctagtattgccgtgctggcagctgggtcccagggcaatgtttttgctacatctgctcttcgcagcttgaggtttttgcagatcctgcggatgatccgcatggacagacgaggcggtacctggaagcttctcgggtccgtggtgtatgctcatagcaaggagctggtgaccgcatggtacattggcttcctctgcctaatcctcgcgagctttttagtttatcttgccgaaaagggggaaaacgatcattttgacacctatgcagacgcactctggtgggggctgatcacactcaccactatcggctatggcgacaagtacccacagacctggaatggtcgcctgctcgctgcaacgttcactctgattggcgtttcattcttcgccctgccagcagggatcctcggctcaggattcgcactaaaggttcaggagcagcacagacaaaagcacttcgagaaacgtcgcaaccctgccgctggccttatccagagtgcctggagattctacgctactaacctttccagaaccgatctccacagtacatggcagtactacgagcgcaccgtaacggtacccatgtacaggtaccggcgcagggctcctgccacaaagcaacttttccatttcctcttttccatctgtagttag

SEQ ID NO: 248164 - DNA, 1423 bp, Artificial Sequence
  derived and/or modified sequence
cggagcgaggtggccgcagcgtctccgcgcgcggcccaagcccggcaggagtgcggaaccgccgcctcggccatgcggctcccggccggggggcctgggctggggcccgcgccgccccccgcgctccgcccccgctgagcctgagcccgacccggggcgcctcccgccaggcaccatggtgcagaagtcgcgcaacggcggcgtataccccggcccgagcggggagaagaagctgaaggtgggcttcgtggggctggaccccggcgcgcccgactccacccgggacggggcgctgctgatcgccggctccgaggcccccaagcgcggcagcatcctcagcaaacctcgcgcgggcggcgcgggcgccgggaagccccccaagcgcaacgccttctaccgcaagctgcagaatttcctctacaacgtgctggagcggccgcgcggctgggcgttcatctaccacgcctacgtgttcctcctggttttctcctgcctcgtgctgtctgtgttttccaccatcaaggagtatgagaagagctcggagggggccctctacatcctggaaatcgtgactatcgtggtgtttggcgtggagtacttcgtgcggatctgggccgcaggctgctgctgccggtaccgtggctggagggggcggctcaagtttgcccggaaaccgttctgtgtgattgacatcatggtgctcatcgcctccattgcggtgctggccgccggctcccagggcaacgtctttgccacatctgcgctccggagcctgcgcttcctgcagattctgcggatgatccgcatggaccggcggggaggcacctggaagctgctgggctctgtggtctatgcccacagcaaggagctggtcactgcctggtacatcggcttcctttgtctcatcctggcctcgttcctggtgtacttggcagagaagggggagaacgaccactttgacacctacgcggatgcactctggtggggcctgatcacgctgaccaccattggctacggggacaagtacccccagacctggaacggcaggctccttgcggcaaccttcaccctcatcggtgtctccttcttcgcgctgcctgcaggcatcttggggtctgggtttgccctgaaggttcaggagcagcacaggcagaagcactttgagaagaggcggaacccggcagcaggcctgatccagtcggcctggagattctacgccaccaacctctcgcgcacagacctgcactccacgtggcagtactacgagcgaacggtcaccgtgcccatgtacaggtaccgccgccgggcacctgccaccaagcaactgtttcattttttattttccatttgttcttaaaccccactttttgttgttcattattttgattgattttttttctttaaaatgtatttttcacaaagg

SEQ ID NO: 248165 - DNA, 1182 bp, Artificial Sequence
  derived and/or modified sequence
atggtacaaaagtcccgtaacggcggagtttaccccggaccatcaggggaaaaaaagctgaaagtggggtttgtgggtctcgatcccggagccccagattctacccgtgacggtgcgctgctgatcgccggttccgaagccccaaaaaggggttcaatcttgagcaagccacgggcagggggagctggtgccggtaaaccccctaaacgcaacgccttctatcggaagctgcaaaatttcctgtataacgtactcgaaaggcctcggggttgggcctttatctaccatgcatatgtgtttctgctcgttttcagctgtctggtacttagtgtgtttagcaccattaaggaatacgaaaagagctctgagggagctctatacatccttgagatcgtgaccattgtggtttttggagtggaatacttcgtgcgaatctgggccgcaggctgttgttgccggtaccggggttggcgcggacgccttaagttcgccagaaagccattttgtgttatcgacattatggtgttgattgcaagtatcgccgtcctcgctgccggatcgcaaggcaacgtctttgcgacgtctgctttgcgcagtctgcgtttcctccagatcctgcgtatgatccgcatggacaggcgcggtggcacatggaagttgttaggatccgtcgtgtatgcccactccaaggagctagtcactgcatggtacattggatttctgtgtctgatcctggcttctttcctcgtgtatctggccgagaagggggaaaatgaccacttcgacacttatgccgacgccctctggtggggactgattacactaacgaccatagggtatggcgataagtacccccagacgtggaacgggaggctgctggccgctacttttactctcatcggggtaagcttcttcgctctgcccgctggaattctcggcagcggattcgctctcaaggtgcaagagcagcacaggcagaagcacttcgagaagcggcgaaaccctgccgcaggtctgattcagagtgcttggagattctacgcaacgaacctttcaagaaccgacctacacagcacgtggcaatactatgaaagaaccgttacagttcccatgtacagatacaggaggagggcccctgccaccaaacaactgtttcacttcctctttagcatttgctcctag

SEQ ID NO: 248166 - DNA, 1182 bp, Artificial Sequence
  derived and/or modified sequence
atggtgcagaagagcagaaacggcggcgtgtaccccggccccagcggcgagaagaagctgaaggtgggcttcgtgggcctggaccccggcgcccccgacagcaccagagacggcgccctgctgatcgccggcagcgaggcccccaagagaggcagcatcctgagcaagcccagagccggcggcgccggcgccggcaagccccccaagagaaacgccttctacagaaagctgcagaacttcctgtacaacgtgctggagagacccagaggctgggccttcatctaccacgcctacgtgttcctgctggtgttcagctgcctggtgctgagcgtgttcagcaccatcaaggagtacgagaagagcagcgagggcgccctgtacatcctggagatcgtgaccatcgtggtgttcggcgtggagtacttcgtgagaatctgggccgccggctgctgctgcagatacagaggctggagaggcagactgaagttcgccagaaagcccttctgcgtgatcgacatcatggtgctgatcgccagcatcgccgtgctggccgccggcagccagggcaacgtgttcgccaccagcgccctgagaagcctgagattcctgcagatcctgagaatgatcagaatggacagaagaggcggcacctggaagctgctgggcagcgtggtgtacgcccacagcaaggagctggtgaccgcctggtacatcggcttcctgtgcctgatcctggccagcttcctggtgtacctggccgagaagggcgagaacgaccacttcgacacctacgccgacgccctgtggtggggcctgatcaccctgaccaccatcggctacggcgacaagtacccccagacctggaacggcagactgctggccgccaccttcaccctgatcggcgtgagcttcttcgccctgcccgccggcatcctgggcagcggcttcgccctgaaggtgcaggagcagcacagacagaagcacttcgagaagagaagaaaccccgccgccggcctgatccagagcgcctggagattctacgccaccaacctgagcagaaccgacctgcacagcacctggcagtactacgagagaaccgtgaccgtgcccatgtacagatacagaagaagagcccccgccaccaagcagctgttccacttcctgttcagcatctgcagctag

SEQ ID NO: 248167 - protein, 459 aa, Artificial Sequence
  derived and/or modified sequence
MVELVISPSLTVNSDCLDKLKFNRADAAVWTLSDRQGITKSAPLRVSQLFSRSCPRVLPRQPSTAMAAYGQTQYSAGIQQATPYTAYPPPAQAYGIPSYSIKTEDSLNHSPGQSGFLSYGSSFSTSPTGQSPYTYQMHGTTGFYQGGNGLGNAAGFGSVHQDYPSYPGFPQSQYPQYYGSSYNPPYVPASSICPSPLSTSTYVLQEASHNVPNQSSESLAGEYNTHNGPSTPAKEGDTDRPHRASDGKLRGRSKRSSDPSPAGDNEIERVFVWDLDETIIIFHSLLTGTFASRYGKDTTTSVRIGLMMEEMIFNLADTHLFFNDLEDCDQIHVDDVSSDDNGQDLSTYNFSADGFHSSAPGANLCLGSGVHGGVDWMRKLAFRYRRVKEMYNTYKNNVGGKESCFERIMQRFGRKAVYVVIGDGVEEEQGAKKHNMPFWRISCHADLEALRHALELEYL

SEQ ID NO: 248168 - DNA, 2465 bp, Artificial Sequence
  derived and/or modified sequence
gcgcgctctgctcggctgcaggctcaggaagcggcgcggcggcacgtgctgggccagagccccgcgccctgcgtccagccgccgggtgtgtgcgcccgcgtagcccagcgtcgcgcctcggcgcccccacgcgcccacgcagcggcgcggggacccgggcgggggcagagggagggcccggcccagggaggagaaggggccggtcctcccggcgcaggcagcagccgcggcagcccaggaggcggaggcagcggcaacggcagagacagcaacgtgcccgccgcagtcagcccggcctcgtcggacccgcaccggcccgcccgcccgcccgcaccgcgtcggggcgccctctccactgcgcgcggtacaaggaaatggtagaactagtgatctcacccagcctcactgtaaacagcgattgtctggataaactgaagtttaaccgtgctgacgctgctgtgtggactctgagtgacagacaaggcatcaccaaatcggcccccctgagagtgtcccagctcttctccagatcttgcccacgtgtcctcccccgccagccttccacagccatggcagcctacggccagacgcagtacagtgcggggatccagcaggctaccccctatacagcttacccacctccagcacaagcctatggaatcccttcctacagcatcaagacagaagacagcttgaaccattcccctggccagagtggattcctcagctatggctccagcttcagcacctcacccactggacagagcccatacacctaccagatgcacggcacaacagggttctatcaaggaggaaatggactgggcaacgcagccggtttcgggagtgtgcaccaggactatccttcctaccccggcttcccccagagccagtacccccagtattacggctcatcctacaaccctccctacgtcccggccagcagcatctgcccttcgcccctctccacgtccacctacgtcctccaggaggcatctcacaacgtccccaaccagagttccgagtcacttgctggtgaatacaacacacacaatggaccttccacaccagcgaaagagggagacacagacaggccgcaccgggcctccgacgggaagctccgaggccggtctaagaggagcagtgacccgtccccggcaggggacaatgagattgagcgtgtgttcgtgtgggacttggatgagacaataattatttttcactccttactcacggggacatttgcatccagatacgggaaggacaccacgacgtccgtgcgcattggccttatgatggaagagatgatcttcaaccttgcagatacacatctgttcttcaatgacctggaggattgtgaccagatccacgttgatgacgtctcatcagatgacaatggccaagatttaagcacatacaacttctccgctgacggcttccacagttcggccccaggagccaacctgtgcctgggctctggcgtgcacggcggcgtggactggatgaggaagctggccttccgctaccggcgggtgaaggagatgtacaatacctacaagaacaacgttggtgggaaggagagctgcttcgagaggataatgcagagattcggcagaaaagctgtctacgtggtgatcggtgatggtgtggaagaggagcaaggagcgaaaaagcacaacatgcctttctggcggatatcctgccacgcagacctggaggcactgaggcacgccctggagctggagtatttatagcaggatcagcagcatctccacctgccatctcaccctcagaccccctcgccttccccacctccccaccgagaactccagagacccagatgttggacaccaggaaggggccccacagccgagacgacgtgtccagtgaccatctcagaagccgtccatcagtccaaatgggggttctgagaaggaaagtacccaacattggcttcggagtatttgactttggggaaaagggctggctcggagtctagactcttctgtaagactcacagaacaaaagcaaggaattgctgatttggggggtgcctggtgatgaggaggggatgggtttgtcttgtcttctttttaatttatggactagtctcattactccggaattatgctcttgtacctgtgtggctgggtttcttagtcgttggtttggtttggttttttgaactggtatgtggggtggttcacagttctaatgtaagcactctattctccaagttgtgctttgtggggacaatcattctttgaacattagagaggaaggcagttcaagctgttgaaaagactattgcttatttttgtttttaaagacctacttgacgtcatgtggacagtgcacgtgccttacgctacatcttgttttctaggaagagggggatgctgggaaggaatgggtgctttgtgatggataaaaggcattaaataaaaccacgtttacattttgaa

SEQ ID NO: 248169 - DNA, 1380 bp, Artificial Sequence
  derived and/or modified sequence
atggtcgagctcgtgatatcccctagtctgaccgtgaactcggactgtctggataaattgaagttcaacagagcagacgcggccgtctggacactatcagacaggcagggtatcactaagagcgccccactgagggtttcacagttgttctctagatcctgtcctcgcgtgctcccgaggcagccttctaccgccatggccgcatacggacagacacaatacagtgccggcatccagcaagcaacaccctacactgcctacccacccccagcgcaggcctacggaatcccctcttattccattaaaacagaggactccctgaaccactcaccagggcagagtggcttcctgagctacgggagctcattttctacttctccgacaggtcagagtccctatacctatcagatgcatggaactacaggattttaccagggagggaatggcctgggtaatgccgcagggttcggttcagtccatcaggactaccctagttatccaggctttccacagagtcaatatccccagtactacggctcctcctataaccctccttacgtgcccgctagttcaatttgtccctctcctttgtcaacatcaacttatgtactacaagaggcaagccataacgtgcccaaccagagttctgaatcgcttgccggggaatacaacacacacaacgggccctctactcccgcaaaggaaggcgataccgaccggccccatcgcgcttccgatggaaaactccggggcaggagcaaacgttcaagcgatccatcacctgctggagataatgaaattgaacgggtgttcgtgtgggacttggatgaaacaataatcatctttcattcgttactgaccggaactttcgcaagcaggtatggaaaggacacaactacaagcgtacgcatcggcctcatgatggaggaaatgattttcaacttggccgatacacacttgttcttcaatgacttggaagattgtgatcaaatccacgtagatgacgtgagctcagatgataacggccaggatctctctacttataacttctcagccgacgggttccatagcagtgctcccggcgctaacttgtgcttgggctctggcgtccacggtggagtcgattggatgcgaaagctggcctttagatatcgtagggtcaaagagatgtacaatacctataaaaacaacgtggggggcaaagagagctgcttcgagaggattatgcagcggtttggaagaaaggcagtttatgtggtgatcggcgacggggtcgaggaggaacagggggctaaaaaacataatatgcctttctggaggatcagctgccatgccgatctggaggccctcaggcatgcactagaattggaatacctgtag

SEQ ID NO: 248170 - DNA, 1380 bp, Artificial Sequence
  derived and/or modified sequence
atggtggagctggtgatcagccccagcctgactgtgaacagcgactgcctggacaagctgaagttcaacagagcagatgctgctgtgtggaccctgagtgaccggcagggcatcaccaagagcgcccccctgcgggtgtcccagctgttcagccgcagctgcccccgggtgctgccccggcagcccagcacagccatggccgcctacggccagacccagtacagcgctggcatccagcaggccaccccctacacagcctacccacctccagcccaggcctacggcatccccagctacagcatcaagacagaggacagcctgaaccacagccctggccagagcggcttcctgtcctatggcagcagcttcagcaccagccccaccggccagagcccctacacctaccagatgcacggcaccaccggcttctaccagggcggcaatggcctgggcaatgctgctggcttcggctctgtgcaccaggactaccccagctacccaggcttcccccagagccagtacccccagtactacggcagcagctacaaccccccctacgtgcctgccagcagcatctgccccagccccctgagcaccagcacctacgtgctgcaggaggccagccacaacgtgcccaaccagagcagcgagagcctggccggggagtacaacacccacaacggccccagcaccccagccaaggagggggacacagaccggccccaccgggccagtgatggcaagctgcggggccgcagcaagaggagcagtgaccccagccctgctggggacaatgaaattgagcgggtgtttgtgtgggacctggatgagaccatcatcatcttccacagcctgctgaccggcacctttgccagccgctatggcaaggacaccaccacctctgtgcgcatcggcctgatgatggaggagatgatcttcaacctggccgacacccacctgttcttcaatgacctggaggactgtgaccagatccacgtggatgatgtgtccagtgatgacaatggccaggacctgagcacctacaacttcagcgcagatggcttccacagcagcgcccctggggccaacctgtgcctgggcagcggcgtgcatggaggagtggactggatgaggaagctggccttccgctacagaagagtgaaggagatgtacaacacctacaagaacaacgtgggcggcaaggagagctgctttgagcgcatcatgcagcgcttcggcaggaaggctgtgtatgtggtgattggagatggagtggaggaggagcagggcgccaagaagcacaacatgcccttctggaggatcagctgccacgccgacctggaggccctgcggcatgccctggagctggagtacctgtag

SEQ ID NO: 248171 - DNA, 1380 bp, Artificial Sequence
  derived and/or modified sequence
atggtggagctggtgatcagccccagcctgaccgtgaacagcgactgtctcgataaattaaagttcaacagggcagacgctgccgtgtggacactgtctgacaggcaagggattaccaagtccgcccctctgagagtctctcagttgttcagtcgaagttgtccacgcgtacttccacggcaaccatcaactgctatggctgcctatggtcagacgcagtattccgccgggatccagcaggctacgccttatactgcataccctcccccagcgcaggcttatggcatcccatcatacagcatcaaaaccgaggactccctgaatcatagtccgggccagtccgggttcctgtcctacgggagttctttctcaaccagcccgaccggacagtcaccctatacctaccagatgcacgggacaactggcttctatcaggggggaaatgggctggggaatgcagccgggttcggctccgttcatcaggactatccgtcttatccgggcttcccgcagtcacaatacccacaatattacggtagctcttacaatcccccatacgtgccagcaagctccatttgtcccagcccgctcagtacgagtacctacgtgttgcaagaggccagccacaatgttccaaatcagtcgtcagagtctctcgcgggagagtataacacacacaatggacccagcactcctgccaaagagggcgataccgacaggccacatagggctagtgatgggaagctgagggggcgaagcaagcgttcctctgacccctcaccggctggtgataacgaaatcgagcgcgtgttcgtttgggatctagatgaaacaatcataatctttcactccctgttaacggggacattcgcttctaggtacggaaaagataccactactagcgtgaggatcggattaatgatggaagagatgatctttaatctggcagatacccacctgttctttaacgacctggaagactgtgaccagattcacgtggacgatgtatcttccgatgacaatgggcaggacctttcaacgtacaacttttcagctgacggttttcacagctctgccccaggggccaacctgtgtctcgggtccggagtacatggcggcgtggattggatgcgtaagctcgcttttcggtacagacgtgtcaaagagatgtacaatacctacaagaacaacgttggaggcaaagagtcctgtttcgagcgtattatgcagcgctttggacgcaaagccgtctacgtcgttataggggatggggtggaagaagaacagggcgccaagaaacacaacatgcccttttggagaatttcatgtcatgcagaccttgaggctctgcgccatgccctcgaactggagtacttatag

SEQ ID NO: 248172 - DNA, 1380 bp, Artificial Sequence
  derived and/or modified sequence
atggtggagctggtaattagcccaagtctcaccgttaatagtgactgtctagataagctgaagtttaatcgcgcagatgcagcggtgtggacattgtccgatagacaggggataacgaagtcagccccactcagagtatcccagctcttttctcggtcctgcccccgtgtcctgcctcgacagcccagtacagcgatggcagcctacgggcaaacacagtatagcgccggaatacagcaggctactccatatacagcatatcctccacctgctcaggcttatggaattccctcctactcgattaagactgaagatagcctcaatcattcgcccggacaatccggctttctgagctacggctcctcattttcaaccagccctactgggcaatcaccctacacctaccagatgcatgggaccacgggcttttaccaagggggtaatggcctcggaaacgctgctggctttggtagtgtccatcaagactatcccagttatcccggattcccacagtcgcaatatccacagtactatggctcctcctacaacccgccatacgtcccagcctccagcatttgtccttccccgcttagcacttccacatacgttctgcaagaggcctctcataacgtacctaatcaaagttctgaatcgctggctggggagtacaacacccacaatgggccttccacccccgctaaggagggcgacaccgatagaccgcaccgtgcctccgacggaaagttgcggggtcggagtaagagatctagcgacccatctcctgctggtgacaacgagatagagcgcgtgttcgtttgggacctcgatgagactatcattatctttcacagtttactgacgggaacatttgcatccaggtacggcaaggacactactacatccgtccgcattggcctcatgatggaggaaatgatttttaatctagccgatacacacctgttcttcaatgacctggaggattgcgaccagatccatgtggacgacgtctcatctgatgacaacggtcaggacctctcaacttacaatttttccgctgacggtttccacagctctgctccaggggctaacttgtgtttaggatctggcgtgcatggtggcgtggactggatgcggaagttggcctttagatatagaagggtgaaggaaatgtataacacttacaaaaataacgtgggcggtaaggagagttgtttcgagcgtattatgcagcgattcggtaggaaagccgtctacgttgtcattggcgacggtgtggaggaggagcaaggcgcaaaaaaacacaatatgcctttttggaggatctcttgccacgccgacctcgaggcactcagacacgctcttgagcttgagtatttgtag

SEQ ID NO: 248173 - DNA, 1380 bp, Artificial Sequence
  derived and/or modified sequence
atggtggagctggtgatcagccccagcctgaccgtgaacagcgactgcctggacaagctgaagttcaacagagccgacgccgccgtgtggaccctgagcgacagacagggcatcaccaagagcgcccccctgagagtgagccagctgttcagcagaagctgccccagagtgctgcccagacagcccagcaccgccatggccgcctacggccagacccagtacagcgccggcatccagcaggccaccccctacaccgcctaccccccccccgcccaggcctacggcatccccagctacagcatcaagaccgaggacagcctgaaccacagccccggccagagcggcttcctgagctacggcagcagcttcagcaccagccccaccggccagagcccctacacctaccagatgcacggcaccaccggcttctaccagggcggcaacggcctgggcaacgccgccggcttcggcagcgtgcaccaggactaccccagctaccccggcttcccccagagccagtacccccagtactacggcagcagctacaaccccccctacgtgcccgccagcagcatctgccccagccccctgagcaccagcacctacgtgctgcaggaggccagccacaacgtgcccaaccagagcagcgagagcctggccggcgagtacaacacccacaacggccccagcacccccgccaaggagggcgacaccgacagaccccacagagccagcgacggcaagctgagaggcagaagcaagagaagcagcgaccccagccccgccggcgacaacgagatcgagagagtgttcgtgtgggacctggacgagaccatcatcatcttccacagcctgctgaccggcaccttcgccagcagatacggcaaggacaccaccaccagcgtgagaatcggcctgatgatggaggagatgatcttcaacctggccgacacccacctgttcttcaacgacctggaggactgcgaccagatccacgtggacgacgtgagcagcgacgacaacggccaggacctgagcacctacaacttcagcgccgacggcttccacagcagcgcccccggcgccaacctgtgcctgggcagcggcgtgcacggcggcgtggactggatgagaaagctggccttcagatacagaagagtgaaggagatgtacaacacctacaagaacaacgtgggcggcaaggagagctgcttcgagagaatcatgcagagattcggcagaaaggccgtgtacgtggtgatcggcgacggcgtggaggaggagcagggcgccaagaagcacaacatgcccttctggagaatcagctgccacgccgacctggaggccctgagacacgccctggagctggagtacctgtag

SEQ ID NO: 248174 - protein, 492 aa, Artificial Sequence
  derived and/or modified sequence
MASTTTCTRFTDEYQLFEELGKGAFSVVRRCMKIPTGQEYAAKIINTKKLSARDHQKLEREARICRLLKHPNIVRLHDSISEEGFHYLVFDLVTGGELFEDIVAREYYSEADASHCIQQILESVNHCHLNGIVHRDLKPENLLLASKSKGAAVKLADFGLAIEVQGDQQAWFGFAGTPGYLSPEVLRKDPYGKPVDMWACGVILYILLVGYPPFWDEDQHRLYQQIKAGAYDFPSPEWDTVTPEAKDLINKMLTINPAKRITASEALKHPWICQRSTVASMMHRQETVDCLKKFNARRKLKGAILTTMLATRNFSAAKSLLKKPDGVKEPQTTVIHNPDGNKESTESSNTTIEDEDVKARKQEIIKVTEQLIEAINNGDFEAYTKICDPGLTAFEPEALGNLVEGMDFHRFYFENALSKSNKPIHTIILNPHVHLVGDDAACIAYIRLTQYMDGSGMPKTMQSEETRVWHRRDGKWQNVHFHRSGSPTVPIK

SEQ ID NO: 248175 - DNA, 1479 bp, Artificial Sequence
  derived and/or modified sequence
atggcctctaccaccacttgtacacgcttcaccgatgaataccagttgtttgaggaactcggtaagggagccttcagcgttgtacgtcgctgcatgaagattcccacgggtcaggaatatgccgctaaaatcatcaacaccaagaagctgtctgccagggatcaccagaagctcgaacgggaagcccggatatgtcgtttactgaagcaccctaacatcgtccgactgcatgacagtatctctgaagagggcttccactacttagtttttgacctggttaccggaggagagctttttgaggacatagtcgcgagagagtattacagcgaggctgatgcctcccattgtatccagcagattctggagtccgtgaaccattgccatcttaacggcatagttcaccgggacctaaagcctgaaaacctgcttctggcctccaagagtaagggcgcagcagtgaaactggcagactttgggcttgcaatcgaggttcagggtgatcagcaggcctggtttggtttcgccggtactcccggttacttgagtcccgaagtattaaggaaagatccatatggcaagcccgtggacatgtgggcgtgcggggtgatactgtacatcctgctggttggctatccgccattttgggacgaggaccagcacaggctgtaccagcagatcaaagctggcgcttatgattttccaagcccggaatgggacacggtcacacctgaagctaaagatctgataaacaaaatgcttactatcaacccggcaaaaaggatcactgcctctgaggccttgaagcacccatggatctgccagcgctctactgttgcgtcgatgatgcacaggcaggagacagtggattgcttgaaaaaatttaacgcccgccgaaagttaaagggtgcgattctcaccaccatgctggcaaccagaaacttcagtgctgcaaaaagccttctgaaaaaacccgatggtgtgaaggagcctcaaacgactgtgattcacaaccctgatggcaataaagagtctactgaatcatcaaacaccacaatcgaagatgaggatgtgaaggcaagaaagcaagagattataaaagtcacggagcaactaatcgaagccatcaataacggggattttgaggcctacacgaaaatttgcgatccgggcctgactgcattcgagccagaggccctcggtaatctggtcgagggaatggacttccatcggttttactttgaaaacgcgctgagtaaaagtaataagccaattcacaccattatcttgaatccacacgtccacctcgtgggcgacgacgctgcgtgcatcgcctacattcggctcacacaatacatggatggcagcggaatgcccaagaccatgcagtctgaggagacacgggtatggcataggcgcgatggaaagtggcaaaatgtccacttccacaggtcagggagtcctactgtacccatcaagtag

SEQ ID NO: 248176 - DNA, 1479 bp, Artificial Sequence
  derived and/or modified sequence
atggccagcaccaccacctgcacccgcttcacagatgagtaccagctgtttgaggagctgggcaagggggccttctctgtggtgcggcgctgcatgaagatccccaccggccaggagtatgctgccaagatcatcaacaccaagaagctgagcgcccgggaccaccagaagctggagcgggaggcccgcatctgccgcctgctgaagcaccccaacatcgtgcggctgcatgacagcatcagcgaggagggcttccactacctggtgtttgacctggtgactggaggagagctgtttgaggacatcgtggcccgggagtactacagcgaggctgatgccagccactgcatccagcagatcctggagagcgtgaaccactgccacctgaatggcatcgtgcaccgggacctgaagccagagaacctgctgctggccagcaagagcaaaggagctgctgtgaagctggccgactttggcctggccatcgaggtgcagggcgaccagcaggcctggtttggatttgctggcaccccaggctacctgagccctgaggtgctgaggaaggacccctacggcaagcctgtggacatgtgggcctgtggggtcatcctgtacatcctgctggtgggctacccacccttctgggatgaggaccagcaccggctgtaccagcagatcaaggccggggcctatgacttccccagccctgagtgggacacagtgaccccagaggccaaggacctgatcaacaagatgctgaccatcaacccagccaagaggatcacagccagcgaggccctgaagcacccctggatctgccagaggagcacagtggcctccatgatgcaccggcaggagaccgtggactgcctgaagaagttcaatgcccggaggaagctgaagggggccatcctgaccaccatgctggccaccaggaacttctctgctgccaagagcctgctgaagaagccagatggagtgaaggagccccagaccaccgtcatccacaacccagatggcaacaaggagagcacagagagcagcaacaccaccattgaagatgaagatgtgaaggccaggaagcaggagatcatcaaggtgacagagcagctgattgaggccatcaacaatggagactttgaggcctacaccaagatctgtgaccccggcctgacagcctttgagcctgaggccctgggcaacctggtggagggcatggacttccaccgcttctactttgaaaatgccctgagcaagagcaacaagcccatccacaccatcatcctgaacccccacgtgcacctggtgggagatgatgctgcctgcatcgcctacatccggctgacccagtacatggatggcagcggcatgcccaagaccatgcagagcgaggagaccagggtgtggcacagaagagatggcaagtggcagaatgtgcacttccacaggagcggcagccccaccgtgcccatcaagtag

SEQ ID NO: 248177 - DNA, 1479 bp, Artificial Sequence
  derived and/or modified sequence
atggccagcaccaccacctgcacccggttcaccgacgagtaccagctctttgaagagctgggtaagggcgctttttcagtggtgcgtcggtgcatgaagatccccaccggccaagagtacgctgcaaagattatcaacaccaagaaactgtccgcaagggatcaccagaaactggaacgcgaagcaaggatctgccgactgttgaagcatccaaacatcgttaggctacatgactcaatcagcgaggaaggctttcattatctggtctttgacttagtcaccggcggcgaactctttgaggacattgtggcgcgggagtattactcggaggcagatgcaagccactgcatccagcagattctcgagagtgtgaaccactgccaccttaatggcatcgtccatcgggatctgaaaccagagaacttactgctcgccagtaagtctaaaggagccgctgttaagttggcagactttgggctggcaatcgaggtgcagggggaccaacaggcatggttcggattcgcagggacaccagggtatctgtcaccagaagtcttacgcaaagacccttacggcaaacctgtggatatgtgggcatgcggcgtaatcctttatatcttgctggtaggctatccaccgttttgggacgaggaccagcaccgcctgtaccaacagattaaggccggagcgtatgattttccctcaccagagtgggacactgtaactcctgaggctaaagatcttatcaataaaatgctgaccattaatcccgccaaacgcatcaccgcgtctgaggccttgaaacacccatggatctgccagcgctccacagtcgcttctatgatgcatagacaggaaactgttgactgtctgaagaaattcaatgccaggcggaagctgaagggagcaatcctgactactatgttagcaacgcggaatttcagtgccgccaagtccctcctcaagaaaccggacggcgtgaaggaaccccagaccactgtgatccataaccccgatggcaacaaggaatccactgaatcttctaatactacgatcgaagacgaggacgtgaaagctcgtaaacaggaaatcatcaaagtgacagagcagctcatcgaggccattaataatggagacttcgaggcttacaccaagatctgtgaccctggactgacagcgtttgagcccgaggccttaggaaatctcgtggaggggatggactttcaccgattctactttgagaatgcactttcaaaatcaaataaacccatccatacaatcatcctgaatccacatgtacacctggttggggatgatgccgcttgtattgcctacataaggctaacccaatatatggacggtagtggcatgcctaagactatgcagtccgaggagacacgggtttggcaccgtagagacggcaaatggcaaaatgtgcacttccatagaagcggcagccccactgtgcccatcaagtag

SEQ ID NO: 248178 - DNA, 1479 bp, Artificial Sequence
  derived and/or modified sequence
atggccagcactaccacatgcactcggtttacggatgaataccagctgtttgaagagttgggtaaaggcgctttcagcgtggtccgcagatgcatgaaaattccaaccgggcaggaatatgccgcaaagatcattaacacgaaaaagctaagcgcacgggaccaccagaaactcgaaagggaagcgcgaatctgtcgcctgttaaaacacccaaacatcgttcgccttcacgactctatttcagaagaaggatttcattatctagtgttcgatctcgtgacagggggtgaattgtttgaagatattgtggccagggagtactacagcgaagctgatgcatctcattgcatacagcagattttggaaagcgtgaatcattgccacctcaacggcattgtgcacagggacctgaaaccggaaaacctgctgctggcttccaaatctaagggggcagcagtgaaactcgctgatttcggactggctatcgaagtccagggcgaccagcaggcctggtttggattcgccggaacacctggttatctcagccctgaggtgttgcggaaagacccctatggcaagcctgttgatatgtgggcctgcggggtgatattgtacatcctgctcgtgggttatcccccattttgggacgaggatcaacacagactgtaccagcaaattaaggctggtgcatatgactttccctcaccagaatgggataccgtcacccccgaagctaaagatcttataaataaaatgctgactatcaatccagcaaaacgcataaccgcttctgaagcactcaagcatccctggatttgccagagaagcacagttgcctctatgatgcatcggcaggagacagtggactgcctgaaaaagtttaatgccaggcgcaaactcaaaggtgcgattctgactacgatgctggctacaaggaattttagcgctgctaaatcactgttgaagaaacccgatggcgtgaaagagccacaaaccaccgtaatccacaacccggatggcaataaagaaagcacggagtcttcaaataccacaattgaggacgaggacgtgaaggctaggaagcaggagatcataaaagttactgaacagttgattgaggcgattaataatggtgacttcgaggcttatactaagatctgcgatccaggacttaccgcgttcgaacctgaagcgcttggaaatttagtcgaaggaatggatttccatcgcttttactttgaaaacgccctttcgaagtccaataagccaatacacaccatcatcctgaatccacacgtgcacctggtgggagacgacgccgcttgtattgcatatatccgcctgacccagtacatggacggctccgggatgccgaaaaccatgcagagcgaggagacgcgtgtctggcaccgtagagatggcaaatggcagaatgtgcactttcaccggagcggctctccaaccgttcctatcaagtag

SEQ ID NO: 248179 - DNA, 2696 bp, Artificial Sequence
  derived and/or modified sequence
gggctcaggctgtccgctctgggctccgcggcctcggccccgctgcactccacctccgccccctcggactccctcccctctgcttctactcctcctgctccagtgcggatcgtttcgcaactgcttgccactcgtcccgtgcctggctgtttttccatttcccggccccctcttcttgagtactttaccccctgcatttggggacagggactggaaaaggggcgggtggagcgtccagtggagaagaaggaagcgaggcccgcaggaggaggaggatcggcggactgtggggaggagaccccacgccaccctttctggtcatctcccctcccgccccgcccctgcgcacactccctcgcgggcgagctactttcggaccaggaaagtaagagcggccctgggtgacagcgccgcggggccagtcccggggttagccgcgcgtctgctcgcttctggtccgtcgcgctcccagccagggcacagcccggaccgaggatggcttcgaccacaacctgcaccaggttcacggacgagtatcagcttttcgaggagcttggaaagggggcattctcagtggtgagaagatgtatgaaaattcctactggacaagaatatgctgccaaaattatcaacaccaaaaagctttctgctagggatcatcagaaactagaaagagaagctagaatctgccgtcttttgaagcaccctaatattgtgcgacttcatgatagcatatcagaagagggctttcactacttggtgtttgatttagttactggaggtgaactgtttgaagacatagtggcaagagaatactacagtgaagctgatgccagtcattgtatacagcagattctagaaagtgttaatcattgtcacctaaatggcatagttcacagggacctgaagcctgagaatttgcttttagctagcaaatccaagggagcagctgtgaaattggcagactttggcttagccatagaagttcaaggggaccagcaggcgtggtttggttttgctggcacacctggatatctttctccagaagttttacgtaaagatccttatggaaagccagtggatatgtgggcatgtggtgtcattctctatattctacttgtggggtatccacccttctgggatgaagaccaacacagactctatcagcagatcaaggctggagcttatgattttccatcaccagaatgggacacggtgactcctgaagccaaagacctcatcaataaaatgcttactatcaaccctgccaaacgcatcacagcctcagaggcactgaagcacccatggatctgtcaacgttctactgttgcttccatgatgcacagacaggagactgtagactgcttgaagaaatttaatgctagaagaaaactaaagggtgccatcttgacaactatgctggctacaaggaatttctcagcagccaagagtttgttgaagaaaccagatggagtaaaggagccccaaactactgtaatccacaaccctgatggaaacaaggagtcaactgagagttcaaatacaacaattgaggatgaagatgtgaaagcacgaaagcaagagattatcaaagtcactgaacaactgatcgaagctatcaacaatggggactttgaagcctacacaaaaatctgtgacccaggccttactgcttttgaacctgaagctttgggtaatttagtggaagggatggattttcaccgattctactttgaaaatgctttgtccaaaagcaataaaccaatccacactattattctaaaccctcatgtacatctggtaggggatgatgccgcctgcatagcatatattaggctcacacagtacatggatggcagtggaatgccaaagacaatgcagtcagaagagactcgtgtgtggcaccgccgggatggaaagtggcagaatgttcattttcatcgctcggggtcaccaacagtacccatcaagtaaatatttccaggctgtcagcttctttgttaatacacccatggtcagctccttctacttattccattgttaatagcatggtatatgttatttaacgctagtagttggttacactgatgaaaataaatgccttcacgggaaaggtttatgattctctggaaagatcaatcagatcagccatttgtgggttgaaacttgctatagagcagtatatgataggtttagacaggacgagagactacgtgatcaaaatctcacagggttaaatctagaggacttgtataataaggcaaaatatttgtgacttcatcttctcaattgacagaagaaggggatatcagaggaaaacatagggaggagtttctaaaatggccaatatattatcaggagtttcatttcatagatgatcccctaaagctcagttagagagacagcatttaaaaggccattgtcaggtagtgcaatgtcattctcacctcaccactctacctcagatatcatttgcttttccagtcagcgattaggcacatatttattgtgaatcacctaggtgcttaatctgtgccagattcaacacaaagtacaagatattgctttcaagaaacatgtattctcatttagccaatcattgattctaaagaaaaaaatgatataataaagtttatcatcaacttcagaatacagtagagttaatgaacagtgtagtaaactgtttataacagttt

SEQ ID NO: 248180 - DNA, 1479 bp, Artificial Sequence
  derived and/or modified sequence
atggccagcaccaccacctgcaccagattcaccgacgagtaccagctgttcgaggagctgggcaagggcgccttcagcgtggtgagaagatgcatgaagatccccaccggccaggagtacgccgccaagatcatcaacaccaagaagctgagcgccagagaccaccagaagctggagagagaggccagaatctgcagactgctgaagcaccccaacatcgtgagactgcacgacagcatcagcgaggagggcttccactacctggtgttcgacctggtgaccggcggcgagctgttcgaggacatcgtggccagagagtactacagcgaggccgacgccagccactgcatccagcagatcctggagagcgtgaaccactgccacctgaacggcatcgtgcacagagacctgaagcccgagaacctgctgctggccagcaagagcaagggcgccgccgtgaagctggccgacttcggcctggccatcgaggtgcagggcgaccagcaggcctggttcggcttcgccggcacccccggctacctgagccccgaggtgctgagaaaggacccctacggcaagcccgtggacatgtgggcctgcggcgtgatcctgtacatcctgctggtgggctacccccccttctgggacgaggaccagcacagactgtaccagcagatcaaggccggcgcctacgacttccccagccccgagtgggacaccgtgacccccgaggccaaggacctgatcaacaagatgctgaccatcaaccccgccaagagaatcaccgccagcgaggccctgaagcacccctggatctgccagagaagcaccgtggccagcatgatgcacagacaggagaccgtggactgcctgaagaagttcaacgccagaagaaagctgaagggcgccatcctgaccaccatgctggccaccagaaacttcagcgccgccaagagcctgctgaagaagcccgacggcgtgaaggagccccagaccaccgtgatccacaaccccgacggcaacaaggagagcaccgagagcagcaacaccaccatcgaggacgaggacgtgaaggccagaaagcaggagatcatcaaggtgaccgagcagctgatcgaggccatcaacaacggcgacttcgaggcctacaccaagatctgcgaccccggcctgaccgccttcgagcccgaggccctgggcaacctggtggagggcatggacttccacagattctacttcgagaacgccctgagcaagagcaacaagcccatccacaccatcatcctgaacccccacgtgcacctggtgggcgacgacgccgcctgcatcgcctacatcagactgacccagtacatggacggcagcggcatgcccaagaccatgcagagcgaggagaccagagtgtggcacagaagagacggcaagtggcagaacgtgcacttccacagaagcggcagccccaccgtgcccatcaagtag

SEQ ID NO: 248181 - protein, 478 aa, Artificial Sequence
  derived and/or modified sequence
MASTTTCTRFTDEYQLFEELGKGAFSVVRRCMKIPTGQEYAAKIINTKKLSARDHQKLEREARICRLLKHPNIVRLHDSISEEGFHYLVFDLVTGGELFEDIVAREYYSEADASHCIQQILESVNHCHLNGIVHRDLKPENLLLASKSKGAAVKLADFGLAIEVQGDQQAWFGFAGTPGYLSPEVLRKDPYGKPVDMWACGVILYILLVGYPPFWDEDQHRLYQQIKAGAYDFPSPEWDTVTPEAKDLINKMLTINPAKRITASEALKHPWICQRSTVASMMHRQETVDCLKKFNARRKLKGAILTTMLATRNFSAAKSLLKKPDGVKESTESSNTTIEDEDVKARKQEIIKVTEQLIEAINNGDFEAYTKICDPGLTAFEPEALGNLVEGMDFHRFYFENALSKSNKPIHTIILNPHVHLVGDDAACIAYIRLTQYMDGSGMPKTMQSEETRVWHRRDGKWQNVHFHRSGSPTVPIK

SEQ ID NO: 248182 - DNA, 1437 bp, Artificial Sequence
  derived and/or modified sequence
atggcgtctacaactacctgcacgcgctttactgatgagtatcaattgttcgaggaattgggtaagggagcattctcagtggttcgccgatgcatgaagatacccactgggcaggaatacgcggctaagattataaatacaaagaagctttctgctagggaccaccagaagctcgagagagaagcccgtatctgtagactgttgaagcatcccaatatcgttagattacatgattctatctcagaagaaggattccattacctagtctttgacctggtcactggcggggagctctttgaggatatcgtggcccgcgagtattacagtgaggccgatgccagccactgtatccagcagatactcgagagcgtcaatcattgtcacctgaacggcatagtgcacagggacctgaaacctgagaatcttttactggcgagtaagagtaagggcgctgctgtcaagcttgctgacttcgggctcgccattgaagtgcaaggagatcagcaggcatggttcggtttcgctggaactccaggatatttatcccctgaggtacttaggaaggacccctacggcaaacctgtggacatgtgggcatgtggcgtgatcctgtacattcttctggtgggttatcccccattttgggacgaggaccagcacaggctgtatcagcagataaaggcaggcgcctacgacttcccaagcccggagtgggacacagttacacctgaggcaaaagatctgataaataaaatgctcaccataaaccccgccaaacgtattaccgcttccgaggccctgaaacacccttggatctgtcagcgcagcacggtcgcctccatgatgcatcgacaggagacagtggactgtctcaaaaaatttaatgcccggcgtaagcttaaaggcgcgatcctcaccacaatgctggccacgcggaatttcagtgccgcaaaatctcttctaaagaaaccagatggcgtcaaggaatctaccgagagtagtaacacaactatcgaagacgaggacgtgaaggctaggaagcaggaaattatcaaggttaccgagcagctgatcgaagccataaacaacggagacttcgaagcttatacgaagatatgcgatccaggacttaccgcatttgagcctgaggctctcggtaatttggtggaagggatggattttcatagattctatttcgagaacgctctcagcaaatctaataaacctatccacaccataatcctcaatccccacgttcacctcgtgggggatgacgccgcctgtatcgcctacatacgtctgacccagtatatggacggaagcgggatgcctaagactatgcagtccgaagaaacaagagtttggcatcgcagagatgggaagtggcagaatgtccatttccatagatctggttctcccacggttcctatcaaatag

SEQ ID NO: 248183 - DNA, 1437 bp, Artificial Sequence
  derived and/or modified sequence
atggcatccacaactacttgcactcgctttaccgacgaataccaactgtttgaggagctgggaaagggagcattttcggtggttaggaggtgtatgaagatacccaccggtcaggaatatgctgccaaaatcatcaacacaaaaaagttgtccgcgcgagaccatcagaaattagagcgcgaggcccggatctgtcgactgcttaagcaccccaatattgtcagactccacgattcaatttcagaagaggggttccactatctggttttcgatttagtgacgggaggcgaactgtttgaggacatcgtggcgcgggagtactacagcgaggcggacgccagccactgtatccagcaaattctagagtccgtgaaccattgccatcttaatggaattgtgcacagggacttgaaacctgaaaatttgttactggcttcaaagagtaagggcgctgccgtgaaactagcagattttggcctcgccattgaggtacagggtgatcaacaggcctggtttgggttcgcgggcacccccggatacttgtcaccagaagttctgaggaaagatccatatggcaaaccagtggacatgtgggcctgtggcgtcattctgtacatcctgctggtaggatacccaccattctgggatgaagatcagcacaggctataccaacaaattaaagcaggagcctacgactttccttctcccgagtgggatacagttactccagaggcgaaggacctgatcaataagatgctgactattaaccctgccaagaggattactgcaagtgaggccctgaagcatccatggatctgccagagatccactgtggccagcatgatgcaccgtcaggaaactgtggactgcctgaagaagttcaacgcccgacggaagttgaagggagctattctgacaaccatgctggccacccgcaatttctcagcagcaaagagtttactgaagaagccagatggagtcaaggagtccacagaatcttctaataccactattgaagacgaagatgtcaaagcccgcaaacaggagataatcaaggtcactgagcagttaatcgaggctattaataacggagacttcgaggcttacacaaaaatctgcgatcccggcctaactgctttcgaacctgaggcgctcggcaacttagttgaaggaatggatttccacaggttttattttgagaatgcactctccaaatccaacaagccgatccatacaatcattttaaacccacatgttcatcttgtaggggacgacgccgcttgtatcgcctacatccggctcacccagtatatggatggttccggaatgccaaaaacaatgcaatccgaggaaacgcgagtgtggcacagacgcgacggtaagtggcagaatgtacactttcatagatctgggagccccacggtgcctatcaagtag

SEQ ID NO: 248184 - DNA, 549 bp, Artificial Sequence
  derived and/or modified sequence
tgacgtaaactgaaaggtgcaatcctcaccacgatgcttgcaacaagaaactttagcgctgctaaatcgctgctcaagaagcccgacggagtgaaggagagtaccgaaagcagtaacactacaatagaagatgaggacgtgaaagctaggaagcaggagatcattaaggtcaccgagcagctaattgaagctataaataacggcgactttgaggcttacaccaagatttgcgatcctgggctgaccgcgtttgagcctgaagctttgggaaacctggtggaaggcatggacttccacagattctactttgagaacgctctgtctaagtccaataaaccaatccacacgataatcctgaacccccacgtccacctggtcggggatgatgccgcctgtatcgcatacatccgcctgacccagtacatggacggctcagggatgccgaagacaatgcagtctgaagaaacacgggtttggcaccgtagggatggcaaatggcaaaatgtgcattttcatagaagcggctcacccaccgtgccaatcaagtag

SEQ ID NO: 248185 - DNA, 1437 bp, Artificial Sequence
  derived and/or modified sequence
atggccagcaccaccacctgcacccgcttcacagatgagtaccagctgtttgaggagctgggcaagggggccttctctgtggtgcggcgctgcatgaagatccccaccggccaggagtatgctgccaagatcatcaacaccaagaagctgagcgcccgggaccaccagaagctggagcgggaggcccgcatctgccgcctgctgaagcaccccaacatcgtgcggctgcatgacagcatcagcgaggagggcttccactacctggtgtttgacctggtgactggaggagagctgtttgaggacatcgtggcccgggagtactacagcgaggctgatgccagccactgcatccagcagatcctggagagcgtgaaccactgccacctgaatggcatcgtgcaccgggacctgaagccagagaacctgctgctggccagcaagagcaaaggagctgctgtgaagctggccgactttggcctggccatcgaggtgcagggcgaccagcaggcctggtttggatttgctggcaccccaggctacctgagccctgaggtgctgaggaaggacccctacggcaagcctgtggacatgtgggcctgtggggtcatcctgtacatcctgctggtgggctacccacccttctgggatgaggaccagcaccggctgtaccagcagatcaaggccggggcctatgacttccccagccctgagtgggacacagtgaccccagaggccaaggacctgatcaacaagatgctgaccatcaacccagccaagaggatcacagccagcgaggccctgaagcacccctggatctgccagaggagcacagtggcctccatgatgcaccggcaggagaccgtggactgcctgaagaagttcaatgcccggaggaagctgaagggggccatcctgaccaccatgctggccaccaggaacttctctgctgccaagagcctgctgaagaagccagatggagtgaaggagagcacagagagcagcaacaccaccattgaagatgaagatgtgaaggccaggaagcaggagatcatcaaggtgacagagcagctgattgaggccatcaacaatggagactttgaggcctacaccaagatctgtgaccccggcctgacagcctttgagcctgaggccctgggcaacctggtggagggcatggacttccaccgcttctactttgaaaatgccctgagcaagagcaacaagcccatccacaccatcatcctgaacccccacgtgcacctggtgggagatgatgctgcctgcatcgcctacatccggctgacccagtacatggatggcagcggcatgcccaagaccatgcagagcgaggagaccagggtgtggcacagaagagatggcaagtggcagaatgtgcacttccacaggagcggcagccccaccgtgcccatcaagtag

SEQ ID NO: 248186 - DNA, 549 bp, Artificial Sequence
  derived and/or modified sequence
tgaagaaagctgaagggggccatcctgaccaccatgctggccaccaggaacttctctgctgccaagagcctgctgaagaagccagatggagtgaaggagagcacagagagcagcaacaccaccattgaagatgaagatgtgaaggccaggaagcaggagatcatcaaggtgacagagcagctgattgaggccatcaacaatggagactttgaggcctacaccaagatctgtgaccccggcctgacagcctttgagcctgaggccctgggcaacctggtggagggcatggacttccaccgcttctactttgaaaatgccctgagcaagagcaacaagcccatccacaccatcatcctgaacccccacgtgcacctggtgggagatgatgctgcctgcatcgcctacatccggctgacccagtacatggatggcagcggcatgcccaagaccatgcagagcgaggagaccagggtgtggcacagaagagatggcaagtggcagaatgtgcacttccacaggagcggcagccccaccgtgcccatcaagtag

SEQ ID NO: 248187 - DNA, 1437 bp, Artificial Sequence
  derived and/or modified sequence
atggccagcaccaccacctgcacccggttcaccgacgagtaccagctgttcgaagagctcggaaagggagcattctcggtggtgcgccgctgcatgaagattccgaccgggcaggaatatgccgccaaaataattaacacaaaaaagttatcggctcgggatcatcaaaaactcgagcgtgaggccaggatctgtcgcctgctaaagcatcctaacattgtgcgcctacatgactccattagcgaggaggggttccattacttagtcttcgatctagtcaccggcggagaattatttgaggatatcgtggcaagagaatactactctgaggccgacgctagtcattgcattcagcaaattctcgaatcggtgaaccactgtcatctgaacgggatcgtgcatagagacctgaagcctgagaacctgttgctggccagtaaaagcaaaggtgctgccgtaaagttagccgattttgggcttgcaatcgaggtgcagggagatcagcaggcctggtttggattcgccggcacacctgggtacctgtcgcccgaggttctgcggaaagacccatacggaaaacccgttgatatgtgggcttgtggcgtcatcttgtatatcctactcgtaggttatcctcctttctgggacgaggaccagcatagactgtatcaacagatcaaggcgggcgcctacgatttccccagccccgaatgggatactgtgacccccgaggccaaggatctcataaataaaatgctcacaatcaaccccgccaagcgcatcactgcctctgaggccttgaagcacccatggatttgtcagaggtctacagttgccagcatgatgcacagacaagagaccgttgattgtctgaaaaagttcaacgcgcgtcgtaagctaaaaggcgctatcttaaccactatgttggccactaggaacttctcagctgctaagagcctcctgaaaaagcctgacggcgtaaaggaatccactgagagctccaatacaaccattgaggacgaagacgtaaaggccagaaagcaggaaatcatcaaggtgactgaacagctgatcgaagctatcaataatggcgacttcgaggcatatactaaaatctgtgacccagggctgacagcctttgaacccgaagcactgggaaacctcgtggagggaatggatttccacaggttttatttcgagaacgccctgagtaagtctaataagcctattcataccatcatcctaaatcctcacgtccacctagtcggagatgacgcagcctgcatcgcctacataagactcacgcagtacatggacgggtcaggaatgcctaagacaatgcagagcgaggagactagggtttggcaccggcgcgacggcaagtggcagaatgttcattttcatcgtagtggttcacctactgtcccaatcaaatag

SEQ ID NO: 248188 - DNA, 1437 bp, Artificial Sequence
  derived and/or modified sequence
atggccagcaccaccacctgcacccggttcaccgacgagtaccagctctttgaggagcttggtaagggggccttttccgtagttcgccgttgtatgaaaattccaactggacaggagtatgccgctaaaattatcaatacaaaaaaactttctgcacgggaccatcagaagctagaacgcgaagcccgtatctgtaggctgctgaaacaccccaatatagtgaggctgcacgattcaatcagcgaggagggattccattacctggtgtttgatctcgttactggaggggaactgttcgaggacattgtcgcaagggagtattatagcgaagcagacgccagccactgcatccaacaaatcttggagagtgttaatcattgccacttgaacggcattgtgcacagggatttgaagcccgagaatctgctgctcgcttctaaatccaagggcgctgccgtgaaactggctgattttggcctggctatagaggtgcagggcgaccagcaagcgtggttcggattcgccggaacccctggctatctgagcccagaagtgctcagaaaagacccctacggaaagccggtggatatgtgggcttgtggagtgatcctttatatactgttagtgggatacccccctttctgggacgaagatcagcaccgtctgtaccagcaaatcaaagcaggagcttacgatttcccctcccccgaatgggacacggtaacccctgaggctaaggacttgatcaataaaatgctaaccatcaatcccgctaagagaattactgcatccgaagcccttaaacacccctggatttgccagcgctccacagttgcgagtatgatgcatcgacaggaaaccgtcgattgtctgaaaaagttcaatgctcggagaaagctaaagggcgcaattctgacaacaatgttggcgacacggaattttagcgccgctaagagcttgctgaagaagcccgacggggtaaaggaatctaccgagtccagcaatactaccatcgaggatgaggatgttaaagcccggaaacaggagatcatcaaggtgacggagcaacttatagaagccattaacaacggcgacttcgaagcctatacaaaaatatgcgatcctggcttgacagctttcgagcccgaggccctcggcaatctcgtggagggaatggacttccatagattttacttcgagaatgcgctgtcaaaaagtaacaagccgatacacactattattctgaatccccacgtgcatctcgtgggggatgacgctgcctgtatcgcctatattcggctgacgcagtacatggatggaagtgggatgccgaagaccatgcagagcgaggaaactagggtgtggcatagaagagatggcaaatggcaaaatgtgcattttcaccgctcaggatcccctactgtccctatcaaatag

SEQ ID NO: 248189 - DNA, 549 bp, Artificial Sequence
  derived and/or modified sequence
tgacggaagctgaagggcgccatcctgaccaccatgctggccacccggaacttctcagctgctaagtcacttctgaagaaacctgacggggtgaaggaaagcactgagtcttcaaatactacgatcgaggacgaggatgtgaaggcccggaaacaagagatcattaaggtgacagagcaattgatcgaggccattaacaacggcgacttcgaggcctacactaaaatctgcgaccccgggctgaccgccttcgaacctgaagcgttgggcaaccttgtggagggaatggacttccacagattttactttgagaatgctttatccaagtctaataaacctattcacaccataattcttaatccacacgtgcatctggttggagacgacgccgcttgtattgcctatatcagactcacacaatacatggatggatcgggcatgcctaaaactatgcaatcggaagagacgcgcgtatggcataggcgtgacggaaagtggcaaaatgtgcacttccatcgttctggatcccccacagtcccaatcaagtag

SEQ ID NO: 248190 - DNA, 1437 bp, Artificial Sequence
  derived and/or modified sequence
atggcttctacaacgacatgtacgcgtttcacagatgagtatcagctcttcgaggaattgggcaaaggagccttctcggtggttaggcgctgcatgaagataccaactggtcaggaatacgctgccaaaatcattaacacaaagaaactgagcgcccgtgatcatcagaaactggaacgagaggcgcgaatctgtcggctgctaaaacatcccaacatcgtccgattgcatgacagtatcagcgaggagggatttcattatttagtgttcgatctggttaccgggggagaactgtttgaggacatagtggcgcgtgaatattactcagaggccgacgcttcccactgtattcagcagatcttggagtccgtgaaccactgccacctaaatggtatcgtgcatagggatctgaagcccgaaaatcttcttctcgccagcaaatcgaagggtgcagccgtgaaattggcagacttcggcctggctatagaggttcagggcgatcagcaggcatggtttggtttcgctgggacaccaggctatctctcacctgaagtactgaggaaagacccctacgggaaacctgttgacatgtgggcctgcggtgttatactctatatcttgcttgttggctatccccctttctgggatgaggatcagcaccgtctttatcaacagatcaaagctggcgcttacgatttcccatcgccggaatgggacacagtgacaccggaggcaaaggacttgatcaataagatgctcaccatcaacccggctaagaggatcacagcctcagaggccttgaagcacccctggatctgccagaggtccaccgtagccagcatgatgcaccgacaggagaccgttgactgtctgaaaaagttcaatgcaagacgaaagttgaagggagcaattctcacaaccatgttagccactcgaaatttcagcgccgctaagagcctgcttaagaagccggacggagtcaaggagtcaaccgagagctccaatacaacaattgaagatgaggacgtgaaggcccgaaaacaggaaattataaaggtcaccgaacagctcattgaagccattaacaatggcgattttgaggcctacaccaaaatctgtgatcccggactcaccgcattcgaacccgaggccctgggcaacctggtggaagggatggattttcacaggttttatttcgagaacgcgttgtcgaagtccaacaaacccattcacactatcatcctcaatccgcacgtgcacctggtcggagatgatgcagcttgtatcgcatacatacgccttacacagtacatggatggtagcggcatgcccaagaccatgcaatccgaggaaactcgagtgtggcacaggagagatggcaaatggcagaacgtccatttccaccggagcggatcccctactgtgcccatcaaatag

SEQ ID NO: 248191 - DNA, 1437 bp, Artificial Sequence
  derived and/or modified sequence
atggcctctacgacgacctgtacaagatttaccgacgaataccagctgttcgaggagctgggtaaaggcgctttcagcgttgtgagaaggtgcatgaagattccgaccggtcaggaatacgctgccaaaatcatcaatacaaaaaaactcagtgcccgagatcaccagaagctggagagagaggccagaatctgccgtcttctcaagcaccccaatatcgtaaggctacacgatagcatctccgaagagggttttcactacctggtatttgatcttgtgaccggtggtgagttgttcgaagatatcgtcgcgagggagtactattcagaagccgatgcaagccattgtatacaacagatccttgagagtgtcaaccattgtcatttgaatgggatagtgcacagagatttgaaacccgagaatcttcttctggcaagtaaaagcaaaggagccgcagtcaaactggccgatttcggcttggctatcgaggtccagggggaccagcaggcgtggttcggtttcgccggtaccccaggatacctgtctcccgaggtcctacggaaagacccttacgggaaaccagtcgacatgtgggcgtgtggagtaatcctgtacatcttactagttggatatccgccattttgggacgaggaccagcatcgactgtaccagcaaataaaggccggtgcttacgacttccccagtccggaatgggacactgtgacgccggaggccaaagacctaatcaacaagatgcttactatcaacccggctaagaggataacggccagtgaggccctgaagcacccatggatttgtcagaggtctaccgtggcgtcaatgatgcacaggcaagaaactgtggattgcctgaagaaatttaacgccagaagaaagctgaagggcgcaattctcaccaccatgctcgctaccaggaacttttcggccgcaaaatccctgcttaagaagcctgacggcgtgaaagaaagtactgagagcagtaataccaccattgaggatgaagacgtcaaggcccgaaaacaggaaatcatcaaagtcaccgaacagttgatagaagctatcaataacggggactttgaggcgtatacaaaaatctgtgatcctggactgactgcattcgaaccagaggccctgggcaatctggtagaggggatggatttccacaggttttattttgagaatgcgctttcgaaaagcaataaaccaattcacacgatcatcctcaaccctcacgtccacctggtcggcgatgatgcagcttgtatagcttatattcgtctgacacagtacatggacgggagtggtatgccaaaaaccatgcagagcgaagagacacgggtatggcatcgcagagatggcaaatggcagaacgtgcactttcacaggtccggatcacccaccgttcccatcaagtag

SEQ ID NO: 248192 - DNA, 549 bp, Artificial Sequence
  derived and/or modified sequence
tgacgcaaactcaagggtgcaattctcactaccatgctcgctaccagaaacttctctgccgctaaatctctgctaaaaaaaccagatggtgttaaggaatccacagaaagcagcaataccactattgaggatgaggacgtgaaagccaggaaacaggaaatcatcaaggtgactgaacagctgattgaggctattaacaatggggattttgaagcatacacaaagatttgtgatccaggcctcacggcgttcgagccagaggccctggggaacctggtggaagggatggatttccaccgattttattttgaaaacgctctgtcaaaatctaacaagccaatccacactattatcctgaaccctcacgttcacctggtgggcgatgacgctgcatgtattgcctacataaggctcacacagtacatggatggctcaggcatgcctaaaaccatgcaatccgaggaaactcgcgtgtggcacagacgcgatgggaagtggcagaatgtacactttcatcgtagcggtagcccaacggtacctatcaaatag

SEQ ID NO: 248193 - DNA, 5820 bp, Artificial Sequence
  derived and/or modified sequence
aaaggagggagtgcgagagatccacgaagggacaggcttggagtcgctagagggaggtgtgggaccagcgaggagggggcttcgccagggagggggtgctggcaggcggagggagcggcgggaggaggcgccggaggaggagacggaggcctggggacggcagaagaggcttcgcctgagccgagcgctctttctctcgccgcgccgtcttgaagccgcgcgggctcgtgagcagcgcgaggccgccaaggtgcctcgcttcgccggagccgctgccgcccgccggagggaagccggcctcgggcgcgcacgctcgtcggagccccggcgcgccccgcgcctgagcctgctgacagcggccgctgggctcaggctgtccgctctgggctccgcggcctcggccccgctgcactccacctccgccccctcggactccctcccctctgcttctactcctcctgctccagtgcggatcgtttcgcaactgcttgccactcgtcccgtgcctggctgtttttccatttcccggccccctcttcttgagtactttaccccctgcatttggggacagggactggaaaaggggcgggtggagcgtccagtggagaagaaggaagcgaggcccgcaggaggaggaggatcggcggactgtggggaggagaccccacgccaccctttctggtcatctcccctcccgccccgcccctgcgcacactccctcgcgggcgagctactttcggaccaggaaagtaagagcggccctgggtgacagcgccgcggggccagtcccggggttagccgcgcgtctgctcgcttctggtccgtcgcgctcccagccagggcacagcccggaccgaggatggcttcgaccacaacctgcaccaggttcacggacgagtatcagcttttcgaggagcttggaaagggggcattctcagtggtgagaagatgtatgaaaattcctactggacaagaatatgctgccaaaattatcaacaccaaaaagctttctgctagggatcatcagaaactagaaagagaagctagaatctgccgtcttttgaagcaccctaatattgtgcgacttcatgatagcatatcagaagagggctttcactacttggtgtttgatttagttactggaggtgaactgtttgaagacatagtggcaagagaatactacagtgaagctgatgccagtcattgtatacagcagattctagaaagtgttaatcattgtcacctaaatggcatagttcacagggacctgaagcctgagaatttgcttttagctagcaaatccaagggagcagctgtgaaattggcagactttggcttagccatagaagttcaaggggaccagcaggcgtggtttggttttgctggcacacctggatatctttctccagaagttttacgtaaagatccttatggaaagccagtggatatgtgggcatgtggtgtcattctctatattctacttgtggggtatccacccttctgggatgaagaccaacacagactctatcagcagatcaaggctggagcttatgattttccatcaccagaatgggacacggtgactcctgaagccaaagacctcatcaataaaatgcttactatcaaccctgccaaacgcatcacagcctcagaggcactgaagcacccatggatctgtcaacgttctactgttgcttccatgatgcacagacaggagactgtagactgcttgaagaaatttaatgctagaagaaaactaaagggtgccatcttgacaactatgctggctacaaggaatttctcagcagccaagagtttgttgaagaaaccagatggagtaaaggagtcaactgagagttcaaatacaacaattgaggatgaagatgtgaaagcacgaaagcaagagattatcaaagtcactgaacaactgatcgaagctatcaacaatggggactttgaagcctacacaaaaatctgtgacccaggccttactgcttttgaacctgaagctttgggtaatttagtggaagggatggattttcaccgattctactttgaaaatgctttgtccaaaagcaataaaccaatccacactattattctaaaccctcatgtacatctggtaggggatgatgccgcctgcatagcatatattaggctcacacagtacatggatggcagtggaatgccaaagacaatgcagtcagaagagactcgtgtgtggcaccgccgggatggaaagtggcagaatgttcattttcatcgctcggggtcaccaacagtacccatcaagtaaatatttccaggctgtcagcttctttgttaatacacccatgctaaatttcaacagtgccacttctgcattctctgttctcaaggcacctggatggtgaccctgggccgtcctctcctcctcttcatgcatgtttctgagtgcatgaagttgtgaaggtcctacatgtaatgcatatgtgatgcatcatcttatcatatattccttcctatacattgtttacacttcaactacggggatgttccacacaaacttaaattactgttggcaaaacaatagggggagattagacaaaaaaaaaaatccacaatattccaagtacaactcttcatcaagtttctctgttaatgccaagatttaacagacttaagaactattgttctctgaatgacagttgtaagagaaatgtaaattttttagaactctttgctgttaatctgttttggtttgtttggtttttttttttttttttaaggtaaaaaaaaaatacaccttcagtttcctggtgtgatcctggttaaaatggatgatttttcattgaaagttttgctgattaacaattaaagtgggatgatatgtgggcaaaatcacttatgaaagtagaagcaagaatcagttggtttgctaccacataaagccatgctgtttttggtcaaactgtgtaaactggaaaaattcacatcatttctgagtttaatcactttaggatatattcacattgttttggtgaatttgctgaattgaattgtttttctttctcaaatctgtgatctcttttctttatcctgtttctttgttcctttcgtttgctttcttatttttcttttgttccattcttttcttacttttttcccttttccttttttggggaggctggctagtagtgtgtgagaaaagaatagaagtgaaatttgcataatgaatgtaaaagggaaataaaagtcttttgaaggtagctatactagcacttttgatcatcttcagggcccacaaaaatgttgtcaagattttaaaggtttataattctgcttaagctctagtttggacttaggtatcctaactatgttggaggtatttgcattgtttaaagttaggataaaagcaagttcctcctgtgactgcaacgtcttactgattgggacagttgccaggaggataccaacttgatagcagagggggttttatgcaaacgcactcacctccgccttggggaatgaaagggtcacttctgcatcatcactagctagttttctagtgttagagaggcttacaaatgtttgccattctcataagtgttttgaacttgatctttgtgacttgtgcttttttagcttctctcttgaatcagagtatcattgtcttcctccaaggagttagaatttcccagtttaaaacaaaaagggaaatgtcctaggttttctttgtgcttctcatttttcctttgttgattcaattcctgtgatttttgttctcttccctgaagtgctttacagtgcatggaatctccatcattgttattttaacgatagtaattcacagtcctcagaagcctatttttaaagcagaagcaaaaaagaaaaacaaaataacaaaaacaacccttcctcttttctctcatctcacctctctgtgttgattactaatcatcttagatattattgctagtggatgtatggtagatgggttgaagcttttctgataattattacacaatttaaaacaacatatatatttaaaataaatatatacagtaaatatattgagccatgttaacctgccaatgagatctgtgaaaaaataatggcctcatttttctctttttaatttcttttacccttttgtgaagcagctatacgtggcatacatgtatttaaagaaaaaaaaatagatgtagagtgttttttttacacttttaacttagcatgtggtgttgaagtattactgtagatcaagtttgtcttccgcactaagatgtgaggaaattgtgatttgttctctccaccacaaatgaattacacatttattatcttctatcattttgaaacactgcagtttaccatgggacactgtatatatttcttgccataatggtaaaggactgattgatatatttaagagttaataaatttgtgatttctgctgacagtgcgtccatctttatttcttcagaagaggtactgtatgtatgcctgcatagtgctggccagtgtcaagggcagtgtgtcctactctggtctcatttagtacataacaatttgcacttggtgagaatggcaagttaattgttctctgtgagcaaaacaatggtctcttctgggaaaatgttgctgagaacaatatagttaacaactaagactcctaaaagcttctctaaactgtaccctccaatccagccttcacatggctgctttttttttttttttttaatacgaacctgtccttgtaacactttgatgttatcatttctgggatacaggcaagcaccccagctcctgctactccccagcttgaacttgagcatacatggatgctcagcttcttttgatttgctaaaaacatcacacttgctcacatgcctgtttatgctgttcatgttgtttatgtttcttacctagaataaatagtctcttcccctacttcttttcccgacttcttactttttcctaagattcagtgtacagcatcatgctccacagcaaaccttcctaggccctattctgggcttgccttccctctcaaaacctacataatagattgtatttacctctcctgtcaaccacattgttttgaaaatatatttctatttgtgtctcctctactgcagtataatgtctccatgggcaagaactgtgtattcatcattgcattcctaaacccaaaccaaggccaggaatggagatatcattgataaatagttgttgaattgaggccaagcccttttgataacagaagcctcaaggggtacccagatagtccttgttttaatgatgggttctctcaccactgtcttgatgctctgagcaagttacctcttccctctgaccctcagtttccatatttgtaaaatgagaataaacataccaacttaataaagatattgtgaggattaatgggtacagagtgactagaatgatatttgatagaaattaaatggtagcagtataactattctgatcactgacattaatattcctattgttattattctttgctcacgagggtatacaactcttgttttgctgttgggctgccctctttatgtaggtttactgttaatgctgaggatatactcggactcaaatgtctcagcagaaggctgagagacaccaaatgaagtggtcatctagctgaatgtaggaaaaatgaaatgtagtagcaaatcagtatattctaaggaaattttcaaggaatattaatcttcacccaaattttgaatttttatgtaaaaaattataatttaagggtaaacatagatgacacagctttcgagtgatttcattgaataaaattctactgacttctatgaa

SEQ ID NO: 248194 - DNA, 1642 bp, Artificial Sequence
  derived and/or modified sequence
gccgcgcgtctgctcgcttctggtccgtcgcgctcccagccagggcacagcccggaccgaggatggcttcgaccacaacctgcaccaggttcacggacgagtatcagcttttcgaggagcttggaaagggggcattctcagtggtgagaagatgtatgaaaattcctactggacaagaatatgctgccaaaattatcaacaccaaaaagctttctgctagggatcatcagaaactagaaagagaagctagaatctgccgtcttttgaagcaccctaatattgtgcgacttcatgatagcatatcagaagagggctttcactacttggtgtttgatttagttactggaggtgaactgtttgaagacatagtggcaagagaatactacagtgaagctgatgccagtcattgtatacagcagattctagaaagtgttaatcattgtcacctaaatggcatagttcacagggacctgaagcctgagaatttgcttttagctagcaaatccaagggagcagctgtgaaattggcagactttggcttagccatagaagttcaaggggaccagcaggcgtggtttggttttgctggcacacctggatatctttctccagaagttttacgtaaagatccttatggaaagccagtggatatgtgggcatgtggtgtcattctctatattctacttgtggggtatccacccttctgggatgaagaccaacacagactctatcagcagatcaaggctggagcttatgattttccatcaccagaatgggacacggtgactcctgaagccaaagacctcatcaataaaatgcttactatcaaccctgccaaacgcatcacagcctcagaggcactgaagcacccatggatctgtcaacgttctactgttgcttccatgatgcacagacaggagactgtagactgcttgaagaaatttaatgctagaagaaaactaaagggtgccatcttgacaactatgctggctacaaggaatttctcagcagccaagagtttgttgaagaaaccagatggagtaaaggagtcaactgagagttcaaatacaacaattgaggatgaagatgtgaaagcacgaaagcaagagattatcaaagtcactgaacaactgatcgaagctatcaacaatggggactttgaagcctacacaaaaatctgtgacccaggccttactgcttttgaacctgaagctttgggtaatttagtggaagggatggattttcaccgattctactttgaaaatgctttgtccaaaagcaataaaccaatccacactattattctaaaccctcatgtacatctggtaggggatgatgccgcctgcatagcatatattaggctcacacagtacatggatggcagtggaatgccaaagacaatgcagtcagaagagactcgtgtgtggcaccgccgggatggaaagtggcagaatgttcattttcatcgctcggggtcaccaacagtacccatcaagtaaatatttccaggctgtcagcttctttgttaatacacccatggtcagctccttctacttattccattgttaatagcatggtatatgttatttaacgctagtagttggttacactgatgaaaataaatgccttcacgggaaaggtt

SEQ ID NO: 248195 - DNA, 2142 bp, Artificial Sequence
  derived and/or modified sequence
aagaaaactaaagggtgccatcttgacaactatgctggctacaaggaatttctcagcagccaagagtttgttgaagaaaccagatggagtaaaggagtcaactgagagttcaaatacaacaattgaggatgaagatgtgaaagcacgaaagcaagagattatcaaagtcactgaacaactgatcgaagctatcaacaatggggactttgaagcctacacaaaaatctgtgacccaggccttactgcttttgaacctgaagctttgggtaatttagtggaagggatggattttcaccgattctactttgaaaatgctttgtccaaaagcaataaaccaatccacactattattctaaaccctcatgtacatctggtaggggatgatgccgcctgcatagcatatattaggctcacacagtacatggatggcagtggaatgccaaagacaatgcagtcagaagagactcgtgtgtggcaccgccgggatggaaagtggcagaatgttcattttcatcgctcggggtcaccaacagtacccatcaagtaaatatttccaggctgtcagcttctttgttaatacacccatgctaaatttcaacagtgccacttctgcattctctgttctcaaggcacctggatggtgaccctgggccgtcctctcctcctcttcatgcatgtttctgagtgcatgaagttgtgaaggtcctacatgtaatgcatatgtgatgcatcatcttatcatatattccttcctatacattgtttacacttcaactacggggatgttccacacaaacttaaattactgttggcaaaacaatagggggagattagacaaaaaaaaaaatccacaatattccaagtacaactcttcatcaagtttctctgttaatgccaagatttaacagacttaagaactattgttctctgaatgacagttgtaagagaaatgtaaattttttagaactctttgctgttaatctgttttggtttgtttggtttttttttttttttttaaggtaaaaaaaaaatacaccttcagtttcctggtgtgatcctggttaaaatggatgatttttcattgaaagttttgctgattaacaattaaagtgggatgatatgtgggcaaaatcacttatgaaagtagaagcaagaatcagttggtttgctaccacataaagccatgctgtttttggtcaaactgtgtaaactggaaaaattcacatcatttctgagtttaatcactttaggatatattcacattgttttggtgaatttgctgaattgaattgtttttctttctcaaatctgtgatctcttttctttatcctgtttctttgttcctttcgtttgctttcttatttttcttttgttccattcttttcttacttttttcccttttccttttttggggaggctggctagtagtgtgtgagaaaagaatagaagtgaaatttgcataatgaatgtaaaagggaaataaaagtcttttgaaggtagctatactagcacttttgatcatcttcagggcccacaaaaatgttgtcaagattttaaaggtttataattctgcttaagctctagtttggacttaggtatcctaactatgttggaggtatttgcattgtttaaagttaggataaaagcaagttcctcctgtgactgcaacgtcttactgattgggacagttgccaggaggataccaacttgatagcagagggggttttatgcaaacgcactcacctccgccttggggaatgaaagggtcacttctgcatcatcactagctagttttctagtgttagagaggcttacaaatgtttgccattctcataagtgttttgaacttgatctttgtgacttgtgcttttttagcttctctcttgaatcagagtatcattgtcttcctccaaggagttagaatttcccagtttaaaacaaaaagggaaatgtcctaggttttctttgtgcttctcatttttcctttgttgattcaattcctgtgatttttgttctcttccctgaagtgctttacagtgcatggaatctccatcattgttattttaacgatagtaattcacagtcctcagaagcctatttttaaagcagaagcaaaaaagaaaaacaaaataacaaaaacaa

SEQ ID NO: 248196 - DNA, 1437 bp, Artificial Sequence
  derived and/or modified sequence
atggccagcaccaccacctgcaccagattcaccgacgagtaccagctgttcgaggagctgggcaagggcgccttcagcgtggtgagaagatgcatgaagatccccaccggccaggagtacgccgccaagatcatcaacaccaagaagctgagcgccagagaccaccagaagctggagagagaggccagaatctgcagactgctgaagcaccccaacatcgtgagactgcacgacagcatcagcgaggagggcttccactacctggtgttcgacctggtgaccggcggcgagctgttcgaggacatcgtggccagagagtactacagcgaggccgacgccagccactgcatccagcagatcctggagagcgtgaaccactgccacctgaacggcatcgtgcacagagacctgaagcccgagaacctgctgctggccagcaagagcaagggcgccgccgtgaagctggccgacttcggcctggccatcgaggtgcagggcgaccagcaggcctggttcggcttcgccggcacccccggctacctgagccccgaggtgctgagaaaggacccctacggcaagcccgtggacatgtgggcctgcggcgtgatcctgtacatcctgctggtgggctacccccccttctgggacgaggaccagcacagactgtaccagcagatcaaggccggcgcctacgacttccccagccccgagtgggacaccgtgacccccgaggccaaggacctgatcaacaagatgctgaccatcaaccccgccaagagaatcaccgccagcgaggccctgaagcacccctggatctgccagagaagcaccgtggccagcatgatgcacagacaggagaccgtggactgcctgaagaagttcaacgccagaagaaagctgaagggcgccatcctgaccaccatgctggccaccagaaacttcagcgccgccaagagcctgctgaagaagcccgacggcgtgaaggagagcaccgagagcagcaacaccaccatcgaggacgaggacgtgaaggccagaaagcaggagatcatcaaggtgaccgagcagctgatcgaggccatcaacaacggcgacttcgaggcctacaccaagatctgcgaccccggcctgaccgccttcgagcccgaggccctgggcaacctggtggagggcatggacttccacagattctacttcgagaacgccctgagcaagagcaacaagcccatccacaccatcatcctgaacccccacgtgcacctggtgggcgacgacgccgcctgcatcgcctacatcagactgacccagtacatggacggcagcggcatgcccaagaccatgcagagcgaggagaccagagtgtggcacagaagagacggcaagtggcagaacgtgcacttccacagaagcggcagccccaccgtgcccatcaagtag

SEQ ID NO: 248197 - DNA, 549 bp, Artificial Sequence
  derived and/or modified sequence
tgaagaaagctgaagggcgccatcctgaccaccatgctggccaccagaaacttcagcgccgccaagagcctgctgaagaagcccgacggcgtgaaggagagcaccgagagcagcaacaccaccatcgaggacgaggacgtgaaggccagaaagcaggagatcatcaaggtgaccgagcagctgatcgaggccatcaacaacggcgacttcgaggcctacaccaagatctgcgaccccggcctgaccgccttcgagcccgaggccctgggcaacctggtggagggcatggacttccacagattctacttcgagaacgccctgagcaagagcaacaagcccatccacaccatcatcctgaacccccacgtgcacctggtgggcgacgacgccgcctgcatcgcctacatcagactgacccagtacatggacggcagcggcatgcccaagaccatgcagagcgaggagaccagagtgtggcacagaagagacggcaagtggcagaacgtgcacttccacagaagcggcagccccaccgtgcccatcaagtag

SEQ ID NO: 248198 - protein, 478 aa, Artificial Sequence
  derived and/or modified sequence
MASTTTCTRFTDEYQLFEELGKGAFSVVRRCMKIPTGQEYAAKIINTKKLSARDHQKLEREARICRLLKHPNIVRLHDSISEEGFHYLVFDLVTGGELFEDIVAREYYSEADASHCIQQILESVNHCHLNGIVHRDLKPENLLLASKSKGAAVKLADFGLAIEVQGDQQAWFGFAGTPGYLSPEVLRKDPYGKPVDMWACGVILYILLVGYPPFWDEDQHRLYQQIKAGAYDFPSPEWDTVTPEAKDLINKMLTINPAKRITASEALKHPWICQRSTVASMMHRQETVDCLKKFNARRKLKGAILTTMLATRNFSAAKSLLKKPDGVKESTESSNTTIEDEDVKARKQEIIKVTEQLIEAINNGDFEAYTKICDPGLTAFEPEALGNLVEGMDFHRFYFENALSKSNKPIHTIILNPHVHLVGDDAACIAYIRLTQYMDGSGMPKTMQSEETRVWHRRDGKWQNVHFHRSGSPTVPIN

SEQ ID NO: 248199 - DNA, 1437 bp, Artificial Sequence
  derived and/or modified sequence
atggcctcaaccactacctgcacaagatttacggatgaataccaattgttcgaggagttgggaaaaggcgccttctccgtcgtcagaaggtgtatgaaaatacccacagggcaagaatacgccgctaagataatcaatacaaaaaaattatccgctcgggatcatcaaaagcttgaacgggaggccagaatatgccgcctcctaaaacatccaaacatagttcgtctacacgattctatcagcgaggagggctttcactacctcgtgtttgacctggtgaccggaggcgaattgttcgaggatattgtcgcccgagagtattacagcgaggcagatgcctctcattgcatccagcagatccttgaaagcgtgaaccattgtcatctgaatgggatcgtacaccgggatcttaagcctgagaatttacttctcgcatcaaagtcaaaaggcgcagccgtcaagctggctgactttggcctcgcgatcgaggttcagggagatcagcaggcctggtttggatttgccgggacccctgggtacttaagccccgaggtgttgaggaaggacccttatggaaagccagtggacatgtgggcttgtggcgtcatcctgtacatactgcttgttgggtatccacccttctgggacgaggatcagcatcggctctatcagcagataaaggctggcgcatacgatttcccttccccagaatgggacacggttaccccagaagccaaggacctcataaacaaaatgctgactatcaacccggccaaacgtatcaccgcatccgaggcccttaagcacccatggatttgccagagatccaccgttgcgtcgatgatgcacagacaggaaaccgttgattgtcttaaaaaattcaacgctcgcaggaaactgaagggggctatactgaccacaatgctggccacgcgaaatttctcagctgccaaatccctactgaagaaacccgacggcgtaaaagagagtactgagtccagtaatacaactatagaggacgaagacgtgaaagctcgcaagcaagaaattatcaaggtgacagagcagctgatcgaggcaatcaacaacggcgatttcgaagcctacactaagatctgcgaccccgggctgaccgcattcgagccagaagccttaggaaacttagttgagggcatggatttccaccgtttctatttcgaaaatgccctgagcaaaagcaataaaccgattcatactattattctgaatccacatgtacaccttgtgggcgacgacgctgcctgcatcgcatacattcggctgacacaatatatggacggaagcggcatgccaaagacaatgcagagcgaagagacgcgcgtttggcataggagagacggaaaatggcagaatgtgcatttccataggtcaggctcccccaccgtgcctataaattag

SEQ ID NO: 248200 - DNA, 1437 bp, Artificial Sequence
  derived and/or modified sequence
atggccagcaccaccacctgcacccgcttcacagatgagtaccagctgtttgaggagctgggcaagggggccttctctgtggtgcggcgctgcatgaagatccccaccggccaggagtatgctgccaagatcatcaacaccaagaagctgagcgcccgggaccaccagaagctggagcgggaggcccgcatctgccgcctgctgaagcaccccaacatcgtgcggctgcatgacagcatcagcgaggagggcttccactacctggtgtttgacctggtgactggaggagagctgtttgaggacatcgtggcccgggagtactacagcgaggctgatgccagccactgcatccagcagatcctggagagcgtgaaccactgccacctgaatggcatcgtgcaccgggacctgaagccagagaacctgctgctggccagcaagagcaaaggagctgctgtgaagctggccgactttggcctggccatcgaggtgcagggcgaccagcaggcctggtttggatttgctggcaccccaggctacctgagccctgaggtgctgaggaaggacccctacggcaagcctgtggacatgtgggcctgtggggtcatcctgtacatcctgctggtgggctacccacccttctgggatgaggaccagcaccggctgtaccagcagatcaaggccggggcctatgacttccccagccctgagtgggacacagtgaccccagaggccaaggacctgatcaacaagatgctgaccatcaacccagccaagaggatcacagccagcgaggccctgaagcacccctggatctgccagaggagcacagtggcctccatgatgcaccggcaggagaccgtggactgcctgaagaagttcaatgcccggaggaagctgaagggggccatcctgaccaccatgctggccaccaggaacttctctgctgccaagagcctgctgaagaagccagatggagtgaaggagagcacagagagcagcaacaccaccattgaagatgaagatgtgaaggccaggaagcaggagatcatcaaggtgacagagcagctgattgaggccatcaacaatggagactttgaggcctacaccaagatctgtgaccccggcctgacagcctttgagcctgaggccctgggcaacctggtggagggcatggacttccaccgcttctactttgaaaatgccctgagcaagagcaacaagcccatccacaccatcatcctgaacccccacgtgcacctggtgggagatgatgctgcctgcatcgcctacatccggctgacccagtacatggatggcagcggcatgcccaagaccatgcagagcgaggagaccagggtgtggcacagaagagatggcaagtggcagaatgtgcacttccacaggagcggcagccccaccgtgcccatcaactag

SEQ ID NO: 248201 - DNA, 1437 bp, Artificial Sequence
  derived and/or modified sequence
atggccagcaccaccacctgcacccggttcaccgacgagtaccagttgttcgaggagctgggaaaaggtgcattttccgttgttaggagatgcatgaaaattccaacgggacaagaatacgcagctaagataattaacaccaagaagcttagcgctagggaccatcagaaattggagagagaagcgcgtatctgcagacttcttaaacatcccaatattgtgcggctccatgattcaatctccgaagaaggcttccactacctggtgtttgacctcgtaacaggaggagagctctttgaagatatcgtggcccgggaatattactctgaggccgatgcctcccattgtattcagcagatccttgagtccgtgaaccactgccacttaaatggcatagtccaccgcgacctgaagcctgagaacctgctgttggcctccaagtcgaaaggtgcggccgtcaaattagctgacttcggcctggctattgaggtgcagggggaccaacaggcttggttcggatttgctggaactccgggttatctcagtcccgaggtcctccgcaaggacccttatggaaaacctgtcgacatgtgggcctgcggtgtgatattatacattctgctggtgggttatcctcccttttgggacgaggaccagcaccgattgtaccagcaaatcaaggcaggagcatacgacttcccttcacccgagtgggacaccgtgaccccagaggcaaaagatctaatcaataagatgcttacaattaatcctgccaagaggatcacagcatcagaggccctgaagcacccatggatatgccagcgcagtactgtcgcctccatgatgcacaggcaggagactgtggattgtctgaaaaaatttaatgctcggagaaaattgaaaggggcgatcctgaccaccatgttggccacccgcaacttctccgcagctaaatctcttctaaagaaaccagacggagtgaaagaatcaaccgagtcatccaatactacaatcgaagatgaagacgtgaaggcccgaaaacaagaaattattaaggtgacagaacaacttatcgaggccataaataacggagacttcgaggcctataccaagatttgcgatcctgggctgacagcctttgagcccgaagctctagggaatctggttgaggggatggattttcataggttctatttcgagaatgcactgagcaagtctaataagcccattcataccatcatcttgaatccccatgtacacttggtaggtgacgatgccgcctgtatcgcctatattaggctgacccagtatatggacggaagcggcatgccaaaaacaatgcagtcagaggagaccagggtgtggcatagacgcgacggcaaatggcagaatgttcattttcaccgcagcgggagccctacggtgcccatcaactag

SEQ ID NO: 248202 - DNA, 1437 bp, Artificial Sequence
  derived and/or modified sequence
atggctagcaccacaacgtgcactaggtttaccgatgagtaccaactattcgaggaattagggaagggagccttttccgtggttagacggtgtatgaagatacctacagggcaagagtacgccgcaaagatcatcaatactaaaaaactctcagcaagagaccaccagaagctcgaacgcgaggccaggatctgtcggttattaaaacacccgaacatcgttcgcctccatgacagcatctcagaggaaggatttcactatctcgtgttcgacctggtgacaggaggagaactgtttgaagacatcgtcgcacgggaatattattccgaagctgacgcatctcattgcatacagcagatcttggaatctgtgaaccactgtcaccttaatggaatagtccatagagatctcaaaccagaaaatttactgctggcctcaaaatccaagggagcagccgtgaagctggcagacttcggcctagctattgaagtccagggcgaccagcaggcttggttcggctttgccggaacaccgggatatcttagccccgaggtcttacgtaaggacccatacgggaaacctgtcgatatgtgggcctgcggagtcatcctgtatatattattggtagggtatcctcctttctgggacgaggaccagcaccgactgtaccaacagataaaagctggggcttacgacttccctagtccagagtgggataccgtgacaccagaggctaaggatctcatcaacaagatgctgacaataaaccccgctaagcgcatcacggcctccgaggccctcaaacatccatggatctgccagcgctcaacagtggccagcatgatgcaccgacaagagacggtagattgtctcaagaagttcaacgctcgaaggaagctgaagggcgctatccttacaacaatgctggcaacacgaaacttttcggctgcaaagtccttgttgaaaaagcccgacggcgtgaaagagagtactgagtcaagcaacactaccatagaagatgaggatgtcaaagctcgtaaacaggagatcatcaaagtgaccgagcagttgatcgaggctattaataacggcgacttcgaggcatacacaaagatctgcgatcccggtctgaccgcctttgagcccgaggcactgggcaatttggttgagggcatggactttcaccggttttactttgaaaacgccctgagtaagtccaataagccaatccataccatcattttgaacccccacgtgcacctggtcggggacgatgccgcttgtattgcctatataagattaacacagtacatggacggtagcggtatgccgaaaaccatgcagagtgaggaaaccagagtctggcatcgacgagatggaaaatggcaaaatgttcactttcatcgctccggcagtccaacagtgcctattaattag

SEQ ID NO: 248203 - DNA, 5294 bp, Artificial Sequence
  derived and/or modified sequence
aactgcttgccactcgtcccgtgcctggctgtttttccatttcccggccccctcttcttgagtactttaccccctgcatttggggacagggactggaaaaggggcgggtggagcgtccagtggagaagaaggaagcgaggcccgcaggaggaggaggatcggcggactgtggggaggagaccccacgccaccctttctggtcatctcccctcccgccccgcccctgcgcacactccctcgcgggcgagctactttcggaccaggaaagtaagagcggccctgggtgacagcgccgcggggccagtcccggggttagccgcgcgtctgctcgcttctggtccgtcgcgctcccagccagggcacagcccggaccgaggatggcttcgaccacaacctgcaccaggttcacggacgagtatcagcttttcgaggagcttggaaagggggcattctcagtggtgagaagatgtatgaaaattcctactggacaagaatatgctgccaaaattatcaacaccaaaaagctttctgctagggatcatcagaaactagaaagagaagctagaatctgccgtcttttgaagcaccctaatattgtgcgacttcatgatagcatatcagaagagggctttcactacttggtgtttgatttagttactggaggtgaactgtttgaagacatagtggcaagagaatactacagtgaagctgatgccagtcattgtatacagcagattctagaaagtgttaatcattgtcacctaaatggcatagttcacagggacctgaagcctgagaatttgcttttagctagcaaatccaagggagcagctgtgaaattggcagactttggcttagccatagaagttcaaggggaccagcaggcgtggtttggttttgctggcacacctggatatctttctccagaagttttacgtaaagatccttatggaaagccagtggatatgtgggcatgtggtgtcattctctatattctacttgtggggtatccacccttctgggatgaagaccaacacagactctatcagcagatcaaggctggagcttatgattttccatcaccagaatgggacacggtgactcctgaagccaaagacctcatcaataaaatgcttactatcaaccctgccaaacgcatcacagcctcagaggcactgaagcacccatggatctgtcaacgttctactgttgcttccatgatgcacagacaggagactgtagactgcttgaagaaatttaatgctagaagaaaactaaagggtgccatcttgacaactatgctggctacaaggaatttctcagcagccaagagtttgttgaagaaaccagatggagtaaaggagtcaactgagagttcaaatacaacaattgaggatgaagatgtgaaagcacgaaagcaagagattatcaaagtcactgaacaactgatcgaagctatcaacaatggggactttgaagcctacacaaaaatctgtgacccaggccttactgcttttgaacctgaagctttgggtaatttagtggaagggatggattttcaccgattctactttgaaaatgctttgtccaaaagcaataaaccaatccacactattattctaaaccctcatgtacatctggtaggggatgatgccgcctgcatagcatatattaggctcacacagtacatggatggcagtggaatgccaaagacaatgcagtcagaagagactcgtgtgtggcaccgccgggatggaaagtggcagaatgttcattttcatcgctcggggtcaccaacagtacccatcaactaaatttcaacagtgccacttctgcattctctgttctcaaggcacctggatggtgaccctgggccgtcctctcctcctcttcatgcatgtttctgagtgcatgaagttgtgaaggtcctacatgtaatgcatatgtgatgcatcatcttatcatatattccttcctatacattgtttacacttcaactacggggatgttccacacaaacttaaattactgttggcaaaacaatagggggagattagacaaaaaaaaaaatccacaatattccaagtacaactcttcatcaagtttctctgttaatgccaagatttaacagacttaagaactattgttctctgaatgacagttgtaagagaaatgtaaattttttagaactctttgctgttaatctgttttggtttgtttggtttttttttttttttttaaggtaaaaaaaaaatacaccttcagtttcctggtgtgatcctggttaaaatggatgatttttcattgaaagttttgctgattaacaattaaagtgggatgatatgtgggcaaaatcacttatgaaagtagaagcaagaatcagttggtttgctaccacataaagccatgctgtttttggtcaaactgtgtaaactggaaaaattcacatcatttctgagtttaatcactttaggatatattcacattgttttggtgaatttgctgaattgaattgtttttctttctcaaatctgtgatctcttttctttatcctgtttctttgttcctttcgtttgctttcttatttttcttttgttccattcttttcttacttttttcccttttccttttttggggaggctggctagtagtgtgtgagaaaagaatagaagtgaaatttgcataatgaatgtaaaagggaaataaaagtcttttgaaggtagctatactagcacttttgatcatcttcagggcccacaaaaatgttgtcaagattttaaaggtttataattctgcttaagctctagtttggacttaggtatcctaactatgttggaggtatttgcattgtttaaagttaggataaaagcaagttcctcctgtgactgcaacgtcttactgattgggacagttgccaggaggataccaacttgatagcagagggggttttatgcaaacgcactcacctccgccttggggaatgaaagggtcacttctgcatcatcactagctagttttctagtgttagagaggcttacaaatgtttgccattctcataagtgttttgaacttgatctttgtgacttgtgcttttttagcttctctcttgaatcagagtatcattgtcttcctccaaggagttagaatttcccagtttaaaacaaaaagggaaatgtcctaggttttctttgtgcttctcatttttcctttgttgattcaattcctgtgatttttgttctcttccctgaagtgctttacagtgcatggaatctccatcattgttattttaacgatagtaattcacagtcctcagaagcctatttttaaagcagaagcaaaaaagaaaaacaaaataacaaaaacaacccttcctcttttctctcatctcacctctctgtgttgattactaatcatcttagatattattgctagtggatgtatggtagatgggttgaagcttttctgataattattacacaatttaaaacaacatatatatttaaaataaatatatacagtaaatatattgagccatgttaacctgccaatgagatctgtgaaaaaataatggcctcatttttctctttttaatttcttttacccttttgtgaagcagctatacgtggcatacatgtatttaaagaaaaaaaaatagatgtagagtgttttttttacacttttaacttagcatgtggtgttgaagtattactgtagatcaagtttgtcttccgcactaagatgtgaggaaattgtgatttgttctctccaccacaaatgaattacacatttattatcttctatcattttgaaacactgcagtttaccatgggacactgtatatatttcttgccataatggtaaaggactgattgatatatttaagagttaataaatttgtgatttctgctgacagtgcgtccatctttatttcttcagaagaggtactgtatgtatgcctgcatagtgctggccagtgtcaagggcagtgtgtcctactctggtctcatttagtacataacaatttgcacttggtgagaatggcaagttaattgttctctgtgagcaaaacaatggtctcttctgggaaaatgttgctgagaacaatatagttaacaactaagactcctaaaagcttctctaaactgtaccctccaatccagccttcacatggctgctttttttttttttttttaatacgaacctgtccttgtaacactttgatgttatcatttctgggatacaggcaagcaccccagctcctgctactccccagcttgaacttgagcatacatggatgctcagcttcttttgatttgctaaaaacatcacacttgctcacatgcctgtttatgctgttcatgttgtttatgtttcttacctagaataaatagtctcttcccctacttcttttcccgacttcttactttttcctaagattcagtgtacagcatcatgctccacagcaaaccttcctaggccctattctgggcttgccttccctctcaaaacctacataatagattgtatttacctctcctgtcaaccacattgttttgaaaatatatttctatttgtgtctcctctactgcagtataatgtctccatgggcaagaactgtgtattcatcattgcattcctaaacccaaaccaaggccaggaatggagatatcattgataaatagttgttgaattgaggccaagcccttttgataacagaagcctcaaggggtacccagatagtccttgttttaatgatgggttctctcaccactgtcttgatgctctgagcaagttacctcttccctctgaccctcagtttccatatttgtaaaatgagaataaacataccaacttaataaagatattgtgaggattaatgggtacagagtgactagaatgatatttgatagaaattaaatggtagcagtataactattctgatcactgacattaatattcctattgttattattctttgctcacgagggtatacaactcttgttttgctgttgggctgccctctttatgtaggtttactgttaatgctgaggatatactcggactcaaatgtctcagcagaaggctgagagacaccaaatgaagtggtcatctagctgaatgtaggaaaaatgaaatgtagtagcaaatcagtatattctaaggaaattttcaaggaatattaatcttcacccaaattttgaatttttatgtaaaaaattataatttaagggtaaacatagatgacacagctttcgagtgatttcattgaataaaattctactgacttctatgaa

SEQ ID NO: 248204 - DNA, 1437 bp, Artificial Sequence
  derived and/or modified sequence
atggccagcaccaccacctgcaccagattcaccgacgagtaccagctgttcgaggagctgggcaagggcgccttcagcgtggtgagaagatgcatgaagatccccaccggccaggagtacgccgccaagatcatcaacaccaagaagctgagcgccagagaccaccagaagctggagagagaggccagaatctgcagactgctgaagcaccccaacatcgtgagactgcacgacagcatcagcgaggagggcttccactacctggtgttcgacctggtgaccggcggcgagctgttcgaggacatcgtggccagagagtactacagcgaggccgacgccagccactgcatccagcagatcctggagagcgtgaaccactgccacctgaacggcatcgtgcacagagacctgaagcccgagaacctgctgctggccagcaagagcaagggcgccgccgtgaagctggccgacttcggcctggccatcgaggtgcagggcgaccagcaggcctggttcggcttcgccggcacccccggctacctgagccccgaggtgctgagaaaggacccctacggcaagcccgtggacatgtgggcctgcggcgtgatcctgtacatcctgctggtgggctacccccccttctgggacgaggaccagcacagactgtaccagcagatcaaggccggcgcctacgacttccccagccccgagtgggacaccgtgacccccgaggccaaggacctgatcaacaagatgctgaccatcaaccccgccaagagaatcaccgccagcgaggccctgaagcacccctggatctgccagagaagcaccgtggccagcatgatgcacagacaggagaccgtggactgcctgaagaagttcaacgccagaagaaagctgaagggcgccatcctgaccaccatgctggccaccagaaacttcagcgccgccaagagcctgctgaagaagcccgacggcgtgaaggagagcaccgagagcagcaacaccaccatcgaggacgaggacgtgaaggccagaaagcaggagatcatcaaggtgaccgagcagctgatcgaggccatcaacaacggcgacttcgaggcctacaccaagatctgcgaccccggcctgaccgccttcgagcccgaggccctgggcaacctggtggagggcatggacttccacagattctacttcgagaacgccctgagcaagagcaacaagcccatccacaccatcatcctgaacccccacgtgcacctggtgggcgacgacgccgcctgcatcgcctacatcagactgacccagtacatggacggcagcggcatgcccaagaccatgcagagcgaggagaccagagtgtggcacagaagagacggcaagtggcagaacgtgcacttccacagaagcggcagccccaccgtgcccatcaactag

SEQ ID NO: 248205 - protein, 489 aa, Artificial Sequence
  derived and/or modified sequence
MASTTTCTRFTDEYQLFEELGKGAFSVVRRCMKIPTGQEYAAKIINTKKLSARDHQKLEREARICRLLKHPNIVRLHDSISEEGFHYLVFDLVTGGELFEDIVAREYYSEADASHCIQQILESVNHCHLNGIVHRDLKPENLLLASKSKGAAVKLADFGLAIEVQGDQQAWFGFAGTPGYLSPEVLRKDPYGKPVDMWACGVILYILLVGYPPFWDEDQHRLYQQIKAGAYDFPSPEWDTVTPEAKDLINKMLTINPAKRITASEALKHPWICQRSTVASMMHRQETVDCLKKFNARRKLKGAILTTMLATRNFSAAKSLLKKPDGVKKRKSSSSVQMMESTESSNTTIEDEDVKARKQEIIKVTEQLIEAINNGDFEAYTKICDPGLTAFEPEALGNLVEGMDFHRFYFENALSKSNKPIHTIILNPHVHLVGDDAACIAYIRLTQYMDGSGMPKTMQSEETRVWHRRDGKWQNVHFHRSGSPTVPIK

SEQ ID NO: 248206 - DNA, 1470 bp, Artificial Sequence
  derived and/or modified sequence
atggccagcactacgacctgcactcgtttcactgacgagtatcagttatttgaagagctcgggaagggagccttctctgttgtgcggcgttgtatgaaaatcccaacaggtcaagaatacgccgccaaaatcatcaatactaagaaactctctgccagggatcatcagaagctcgaacgagaagcaagaatctgcaggctgctgaagcatccaaatattgtgagattgcacgactccatcagcgaagagggatttcattatctcgtttttgacttagtcacaggcggggagctattcgaagatatagtagcccgtgagtattactccgaggctgacgccagtcattgtattcagcagatcctcgagagcgtgaatcattgtcatcttaacggaatcgtccaccgcgacctcaaacccgagaatttgctcttggcctccaagtctaagggggccgccgtcaagctggccgatttcggcttggccatcgaggttcagggcgatcaacaggcctggttcggtttcgcagggactcctggttatctaagccccgaagtgttgcgtaaagatccctacggcaaacctgtggacatgtgggcctgtggagtcatcctgtatatcctgctcgtcggatacccaccgttttgggatgaagatcagcatagactttaccagcagataaaggcaggcgcctacgactttccttctcccgagtgggacactgtgacccctgaggctaaagacttgataaacaagatgctgacaattaatcccgcaaaaagaattaccgcgagcgaggctctgaaacatccatggatctgccaacggagcactgtggcaagtatgatgcacagacaggaaaccgtggactgccttaaaaagttcaatgctaggcgcaaacttaagggtgctatcctgactactatgctggccacaagaaactttagtgcggccaaatccctgctcaagaagccagacggcgtcaagaaaagaaaaagctctagcagcgtgcaaatgatggagtccaccgaatcctctaacactacaattgaggacgaggatgtgaaagctagaaagcaggagatcattaaggtgaccgagcagttaatagaagccataaacaacggcgacttcgaagcctatacaaagatatgtgacccggggctgactgcattcgagcctgaggccctgggtaacctcgtcgaaggcatggattttcatcgattctactttgagaatgctctgagtaaatctaataagcccatccacacaattatcctgaaccctcacgtgcacctggtcggggatgatgccgcttgcattgcttacattagactaacccagtatatggatggcagtggcatgccgaaaaccatgcagtcagaagaaacaagggtttggcatcggagggatggtaagtggcaaaacgtccacttccacaggtccgggtcccccaccgttcccatcaaatag

SEQ ID NO: 248207 - DNA, 1470 bp, Artificial Sequence
  derived and/or modified sequence
atggccagcaccaccacctgcacccgcttcacagatgagtaccagctgtttgaggagctgggcaagggggccttctctgtggtgcggcgctgcatgaagatccccaccggccaggagtatgctgccaagatcatcaacaccaagaagctgagcgcccgggaccaccagaagctggagcgggaggcccgcatctgccgcctgctgaagcaccccaacatcgtgcggctgcatgacagcatcagcgaggagggcttccactacctggtgtttgacctggtgactggaggagagctgtttgaggacatcgtggcccgggagtactacagcgaggctgatgccagccactgcatccagcagatcctggagagcgtgaaccactgccacctgaatggcatcgtgcaccgggacctgaagccagagaacctgctgctggccagcaagagcaaaggagctgctgtgaagctggccgactttggcctggccatcgaggtgcagggcgaccagcaggcctggtttggatttgctggcaccccaggctacctgagccctgaggtgctgaggaaggacccctacggcaagcctgtggacatgtgggcctgtggggtcatcctgtacatcctgctggtgggctacccacccttctgggatgaggaccagcaccggctgtaccagcagatcaaggccggggcctatgacttccccagccctgagtgggacacagtgaccccagaggccaaggacctgatcaacaagatgctgaccatcaacccagccaagaggatcacagccagcgaggccctgaagcacccctggatctgccagaggagcacagtggcctccatgatgcaccggcaggagaccgtggactgcctgaagaagttcaatgcccggaggaagctgaagggggccatcctgaccaccatgctggccaccaggaacttctctgctgccaagagcctgctgaagaagccagatggagtgaagaagaggaagagcagcagctctgtgcagatgatggagagcacagagagcagcaacaccaccattgaagatgaagatgtgaaggccaggaagcaggagatcatcaaggtgacagagcagctgattgaggccatcaacaacggggactttgaggcctacaccaagatctgtgaccccggcctgacagcctttgagcctgaggccctgggcaacctggtggagggcatggacttccaccgcttctactttgaaaatgccctgagcaagagcaacaagcccatccacaccatcatcctgaacccccacgtgcacctggtgggagatgatgctgcctgcatcgcctacatccggctgacccagtacatggatggcagcggcatgcccaagaccatgcagagcgaggagaccagggtgtggcacagaagagatggcaagtggcagaatgtgcacttccacaggagcggcagccccaccgtgcccatcaagtag

SEQ ID NO: 248208 - DNA, 1470 bp, Artificial Sequence
  derived and/or modified sequence
atggccagcaccaccacctgcacccggttcaccgacgagtaccagctcttcgaagagttagggaagggcgccttttctgtggtgcggagatgtatgaagatacctaccggccaggaatatgccgcgaaaattattaacacgaagaaactctcagcacgggatcatcagaaactggagagggaggctagaatttgccgcctgctgaaacatccgaatatcgtacggctgcacgactccatatcagaagagggattccactatcttgtgtttgatcttgttaccggaggcgagctttttgaggacattgtggctcgggagtactactcagaagcagatgctagccactgcatccagcagatcttagagagcgtgaaccactgtcaccttaatggcattgtccaccgggatctgaagcccgagaatctgctgctagcgagcaaatctaagggagccgccgtgaaacttgccgacttcggtttggcaatagaagtgcagggcgatcagcaggcctggtttggcttcgccggcaccccaggctacctatcaccagaggtgctgagaaaggatccttacggcaagcctgtagacatgtgggcctgcggagtcatcctgtatattctgctggtcggttaccctcctttctgggacgaggatcagcaccgcctatatcagcagataaaggccggggcatacgattttccaagccctgagtgggacacagtcacacctgaggcgaaagatctgattaataagatgctgactatcaatcctgccaagagaattacggctagcgaggcgttgaagcacccctggatctgccagcgctctactgtggcttcaatgatgcataggcaggagaccgtggactgcctgaagaaattcaatgcaaggcgaaagctgaaaggcgcaatactgaccactatgttagccacaagaaatttctcagcagccaaatccctgctcaaaaagcctgacggcgtgaagaaacgtaaatcctctagttcagttcagatgatggaatcaacagagtccagcaacacgacaatcgaggatgaggacgtgaaagctagaaaacaggaaattatcaaagtcactgagcagctaatcgaggccattaataacggcgactttgaggcctatacaaagatctgtgatccaggcctgacagccttcgagcccgaggcactcggaaatctagtagaaggcatggactttcataggttctacttcgaaaacgccctctctaagtcaaataagccaattcacacgatcatactgaacccccacgttcacttggtgggcgatgacgctgcctgtatagcttacatcaggctgacccaatacatggatgggtccggcatgccaaaaaccatgcagtcagaggaaacacgcgtctggcacagacgcgacggcaaatggcagaacgtgcacttccatcgttctggcagcccaaccgtcccaatcaagtag

SEQ ID NO: 248209 - DNA, 1470 bp, Artificial Sequence
  derived and/or modified sequence
atggcttctaccaccacgtgcactcggttcacggacgagtatcagcttttcgaagagctggggaagggtgcatttagtgtggtgcggaggtgcatgaaaattcctactgggcaggaatatgctgcaaagatcataaacaccaaaaagctgagcgcaagagatcatcaaaaactcgaaagagaggcaagaatctgtagattattgaagcaccccaatatagttcggctgcatgactcaatttctgaggagggtttccattacctcgtgtttgatctggtgactggcggtgagttattcgaggatatagtcgccagggagtactacagcgaggcagacgcgtcccactgcatccaacagatactagagtctgtgaaccactgtcatctgaacggcatagtccaccgagatcttaaaccggagaatttactgcttgcaagcaaaagcaagggcgcagccgtgaagcttgccgattttggtctcgctatcgaggtgcagggcgatcagcaggcctggttcggattcgcaggcaccccagggtatctgtcacctgaggtcctgcggaaagacccctatgggaagcctgtcgatatgtgggcttgcggggtgatcttatatatcctcctggtgggatacccacctttctgggacgaagaccagcatagattgtaccagcagatcaaagccggagcctacgactttccatctcccgaatgggatacagttacaccggaggctaaagacttgattaataaaatgttaactatcaacccagccaagcgaattactgctagcgaagccctaaagcacccctggatctgccaaaggtcaactgtggcgagcatgatgcacaggcaggagaccgtggattgcctgaagaagttcaacgccagacgcaaacttaagggagccatcctgaccactatgcttgctacccgcaacttcagcgccgctaagtccctcctgaaaaaacccgatggagtcaaaaaaaggaaaagctcctcctcagtgcagatgatggagagcaccgaatctagtaacaccaccatcgaagacgaggacgtcaaagctaggaagcaagagatcatcaaagttaccgagcagctgattgaggctatcaataacggcgacttcgaggcctatactaagatctgcgatccagggctcaccgccttcgaaccagaggccttaggaaatctggttgaggggatggatttccatcggttttattttgagaatgccctgtcaaaatcaaataaacccattcacactatcatccttaacccccatgtacatcttgtcggcgatgacgctgcctgcatcgcttacataagactcactcagtatatggacggaagcgggatgcctaagaccatgcagagtgaggagacccgtgtgtggcaccgacgtgacggaaagtggcaaaatgtgcactttcaccggagcggcagccccaccgttcccattaaatag

SEQ ID NO: 248210 - DNA, 1470 bp, Artificial Sequence
  derived and/or modified sequence
atggcttcgaccacaacctgcaccaggttcacggacgagtatcagcttttcgaggagcttggaaagggggcattctcagtggtgagaagatgtatgaaaattcctactggacaagaatatgctgccaaaattatcaacaccaaaaagctttctgctagggatcatcagaaactagaaagagaagctagaatctgccgtcttttgaagcaccctaatattgtgcgacttcatgatagcatatcagaagagggctttcactacttggtgtttgatttagttactggaggtgaactgtttgaagacatagtggcaagagaatactacagtgaagctgatgccagtcattgtatacagcagattctagaaagtgttaatcattgtcacctaaatggcatagttcacagggacctgaagcctgagaatttgcttttagctagcaaatccaagggagcagctgtgaaattggcagactttggcttagccatagaagttcaaggggaccagcaggcgtggtttggttttgctggcacacctggatatctttctccagaagttttacgtaaagatccttatggaaagccagtggatatgtgggcatgtggtgtcattctctatattctacttgtggggtatccacccttctgggatgaagaccaacacagactctatcagcagatcaaggctggagcttatgattttccatcaccagaatgggacacggtgactcctgaagccaaagacctcatcaataaaatgcttactatcaaccctgccaaacgcatcacagcctcagaggcactgaagcacccatggatctgtcaacgttctactgttgcttccatgatgcacagacaggagactgtagactgcttgaagaaatttaatgctagaagaaaactaaagggtgccatcttgacaactatgctggctacaaggaatttctcagcagccaagagtttgttgaagaaaccagatggagtaaagaaaaggaagtccagttcgagtgttcagatgatggagtcaactgagagttcaaatacaacaattgaggatgaagatgtgaaagcacgaaagcaagagattatcaaagtcactgaacaactgatcgaagctatcaacaatggggactttgaagcctacacaaaaatctgtgacccaggccttactgcttttgaacctgaagctttgggtaatttagtggaagggatggattttcaccgattctactttgaaaatgctttgtccaaaagcaataaaccaatccacactattattctaaaccctcatgtacatctggtaggggatgatgccgcctgcatagcatatattaggctcacacagtacatggatggcagtggaatgccaaagacaatgcagtcagaagagactcgtgtgtggcaccgccgggatggaaagtggcagaatgttcattttcatcgctcggggtcaccaacagtacccatcaagtaa

SEQ ID NO: 248211 - DNA, 1470 bp, Artificial Sequence
  derived and/or modified sequence
atggccagcaccaccacctgcaccagattcaccgacgagtaccagctgttcgaggagctgggcaagggcgccttcagcgtggtgagaagatgcatgaagatccccaccggccaggagtacgccgccaagatcatcaacaccaagaagctgagcgccagagaccaccagaagctggagagagaggccagaatctgcagactgctgaagcaccccaacatcgtgagactgcacgacagcatcagcgaggagggcttccactacctggtgttcgacctggtgaccggcggcgagctgttcgaggacatcgtggccagagagtactacagcgaggccgacgccagccactgcatccagcagatcctggagagcgtgaaccactgccacctgaacggcatcgtgcacagagacctgaagcccgagaacctgctgctggccagcaagagcaagggcgccgccgtgaagctggccgacttcggcctggccatcgaggtgcagggcgaccagcaggcctggttcggcttcgccggcacccccggctacctgagccccgaggtgctgagaaaggacccctacggcaagcccgtggacatgtgggcctgcggcgtgatcctgtacatcctgctggtgggctacccccccttctgggacgaggaccagcacagactgtaccagcagatcaaggccggcgcctacgacttccccagccccgagtgggacaccgtgacccccgaggccaaggacctgatcaacaagatgctgaccatcaaccccgccaagagaatcaccgccagcgaggccctgaagcacccctggatctgccagagaagcaccgtggccagcatgatgcacagacaggagaccgtggactgcctgaagaagttcaacgccagaagaaagctgaagggcgccatcctgaccaccatgctggccaccagaaacttcagcgccgccaagagcctgctgaagaagcccgacggcgtgaagaagagaaagagcagcagcagcgtgcagatgatggagagcaccgagagcagcaacaccaccatcgaggacgaggacgtgaaggccagaaagcaggagatcatcaaggtgaccgagcagctgatcgaggccatcaacaacggcgacttcgaggcctacaccaagatctgcgaccccggcctgaccgccttcgagcccgaggccctgggcaacctggtggagggcatggacttccacagattctacttcgagaacgccctgagcaagagcaacaagcccatccacaccatcatcctgaacccccacgtgcacctggtgggcgacgacgccgcctgcatcgcctacatcagactgacccagtacatggacggcagcggcatgcccaagaccatgcagagcgaggagaccagagtgtggcacagaagagacggcaagtggcagaacgtgcacttccacagaagcggcagccccaccgtgcccatcaagtag

SEQ ID NO: 248212 - DNA, 591 bp, Artificial Sequence
  derived and/or modified sequence
atgaccggcgactgcatgcccgtgctggtgctgatggccgccgtgctgaccgtgaccggcgccgtgcccgtggccagactgagaggcgccctgcccgacgccagaggctgccacatcgcccagttcaagagcctgagcccccaggagctgcaggccttcaagagagccaaggacgccctggaggagagcctgctgctgaaggactgcaagtgcagaagcagactgttccccagaacctgggacctgagacagctgcaggtgagagagagacccgtggccctggaggccgagctggccctgaccctgaaggtgctggaggccaccgccgacaccgaccccgccctgggcgacgtgctggaccagcccctgcacaccctgcaccacatcctgagccagctgagagcctgcatccagccccagcccaccgccggccccagaaccagaggcagactgcaccactggctgcacagactgcaggaggcccccaagaaggagagccccggctgcctggaggccagcgtgaccttcaacctgttcagactgctgaccagagacctgaactgcgtggccagcggcgacctgtgcgtgtag

SEQ ID NO: 248213 - DNA, 591 bp, Artificial Sequence
  derived and/or modified sequence
atgacaggggattgtatgcccgtgctggttttgatggcagccgtcctgactgttaccggggccgttccagtagcacgcctcaggggcgctctcccggacgcaaggggttgccatatcgcccagtttaaatccctctccccgcaagagcttcaagcctttaagagagctaaagacgccctggaggaaagcctattgttgaaggactgtaaatgccggtcaaggctctttcctcggacttgggacttgaggcaactgcaggtccgcgagagaccagtggccttggaagccgaactggccctgaccttgaaggtcttagaagctaccgccgacaccgaccctgctctgggtgacgtgctggaccagcctttacatactcttcaccacatcctttcccagctgagagcctgtatccagccacagccaaccgcaggacctcgaacccgcggcagattgcaccactggctccacagattgcaggaagcgccgaaaaaggagtctccaggctgtttagaagcatctgtcaccttcaatctttttagattactgactagagacctgaactgcgtcgcatcgggagatctgtgcgtatag

SEQ ID NO: 248214 - DNA, 591 bp, Artificial Sequence
  derived and/or modified sequence
atgaccggggactgcatgcctgtgctggtgctgatggctgctgtgctgactgtgactggagctgtgcctgtggcccggctgcggggggccctgcctgatgcccggggctgccacatcgcccagttcaagagcctgagcccccaggagctgcaggccttcaagagggccaaggatgccctggaggagagcctgctgctgaaggactgcaagtgccgcagccgcctcttccccaggacctgggacctgcggcagctgcaggtgcgggagaggcctgtggccctggaggccgagctggccctgaccctgaaggtgctggaggccacagctgacacagatcctgccctgggagatgtgctggaccagcccctgcacaccctgcaccacatcctgagccagctgcgggcctgcatccagccccagcccacagctggccccaggacccggggccgcctgcaccactggctgcaccggctgcaggaggcccccaagaaggagagccctggctgcctggaggcctctgtgaccttcaacctcttccggctgctgacccgggacctgaactgtgtggccagcggggacctgtgtgtgtag

SEQ ID NO: 248215 - DNA, 591 bp, Artificial Sequence
  derived and/or modified sequence
atgaccggcgactgcatgcccgtgctggtgctgatggccgccgtgttaaccgtaaccggcgccgtgcccgtcgcccgactgaggggcgccctcccagacgcacgcggctgccacattgctcaatttaagtctctgagtcctcaggaactccaagccttcaagcgggcaaaggatgcactggaggagagcctgttattgaaggactgcaagtgccgcagccgtctgttcccccggacgtgggatctgcgccagttgcaggtgcgtgagcgcccagtggcccttgaagctgagctcgcactgactcttaaggtgctggaggcaaccgcagacacagatccggcattaggcgacgtcctggatcagccccttcatacgctacatcatatattgtcacagttacgtgcctgcatccagccacagcctactgcagggccccgtacgcggggccgcttacaccactggcttcatcggttgcaggaagctcctaaaaaagagtcccctggatgcctggaggcaagcgtgacatttaacctgtttcgcctccttacacgggatttgaattgtgtcgccagcggcgatttatgtgtgtag

SEQ ID NO: 248216 - DNA, 591 bp, Artificial Sequence
  derived and/or modified sequence
atgacaggtgactgtatgcccgttctagtattgatggcggcagtattaaccgtgactggggctgtgccagtggcacgcctgagaggggctcttcccgatgcacgagggtgccacatcgcccagtttaaatcgctgtctccgcaggaactacaagccttcaaacgcgctaaagatgctctggaggaatcccttttactgaaagactgcaagtgcaggtcaagattgtttcccaggacgtgggacctgcggcagttgcaggtccgggaaaggccagtagccctggaagccgagctggcactcaccctgaaggtattggaggctacggctgatactgacccagccctcggcgatgtgctagaccagcctctacataccctccaccatatcctgagccagttacgggcttgtatccagcctcagcctactgcagggccaagaacaaggggacggctgcatcattggttgcaccgtttacaggaagccccaaaaaaggagtctccgggttgcctggaggctagcgtcacatttaatctcttcagactcttaacccgggaccttaattgcgtggcaagcggagatctgtgcgtgtag

SEQ ID NO: 248217 - protein, 200 aa, Artificial Sequence
  derived and/or modified sequence
MAAAWTVVLVTLVLGLAVAGPVPTSKPTTTGKGCHIGRFKSLSPQELASFKKARDALEESLKLKNWSCSSPVFPGNWDLRLLQVRERPVALEAELALTLKVLEAAAGPALEDVLDQPLHTLHHILSQLQACIQPQPTAGPRPRGRLHHWLHRLQEAPKKESAGCLEASVTFNLFRLLTRDLKYVADGNLCLRTSTHPEST

SEQ ID NO: 248218 - DNA, 603 bp, Artificial Sequence
  derived and/or modified sequence
atggccgccgcctggaccgtggtgctggtgaccctggtgctgggcctggccgtggccggccccgtgcccaccagcaagcccaccaccaccggcaagggctgccacatcggcagattcaagagcctgagcccccaggagctggccagcttcaagaaggccagagacgccctggaggagagcctgaagctgaagaactggagctgcagcagccccgtgttccccggcaactgggacctgagactgctgcaggtgagagagagacccgtggccctggaggccgagctggccctgaccctgaaggtgctggaggccgccgccggccccgccctggaggacgtgctggaccagcccctgcacaccctgcaccacatcctgagccagctgcaggcctgcatccagccccagcccaccgccggccccagacccagaggcagactgcaccactggctgcacagactgcaggaggcccccaagaaggagagcgccggctgcctggaggccagcgtgaccttcaacctgttcagactgctgaccagagacctgaagtacgtggccgacggcaacctgtgcctgagaaccagcacccaccccgagagcacctag

SEQ ID NO: 248219 - DNA, 603 bp, Artificial Sequence
  derived and/or modified sequence
atggccgcagcctggacagttgtcttagttactctggtgctgggcttagccgtggcaggtcctgttcctacttctaaacctactacgacgggtaagggctgccacatcggtcggttcaaatccctgtcaccccaagagctggcatcatttaaaaaggccagggatgcgctggaggagtccctgaagctcaagaattggtcttgttcctccccagtatttcctggcaattgggatctgagactgcttcaagtgcgggaaaggcccgtagccctagaggctgagcttgcactgaccctaaaagttctggaggcagccgccggaccagccctcgaagatgtgttagatcaaccccttcataccctgcaccacattctgtctcagctccaagcatgcatccaacctcaaccaactgcagggcctcgccccagaggccgcctccaccactggctacatcggttgcaggaggcacccaaaaaagagagcgccgggtgcctcgaggctagtgttacatttaacttgtttagactcctgacacgtgatctgaaatacgtcgcggatggtaacctgtgcctgcggacatccactcatcctgaatctacttag

SEQ ID NO: 248220 - DNA, 603 bp, Artificial Sequence
  derived and/or modified sequence
atggctgctgcctggacagtggtgctggtgaccctggtgctgggcctggccgtggccggccctgtgcccaccagcaagcccaccaccaccgggaagggctgccacatcggccgcttcaagagcctgagcccccaggagctggccagcttcaagaaggccagagatgccctggaggagagcctgaagctgaagaactggagctgcagcagccctgtgtttcctggcaactgggacctgcggctgctgcaggtgcgggagaggcctgtggccctggaggccgagctggccctgaccctgaaggtgctggaggccgccgccggccctgccctggaggatgtgctggaccagcccctgcacaccctgcaccacatcctgagccagctgcaggcctgcatccagccccagcccacagctggcccccggccccggggccgcctgcaccactggctgcaccggctgcaggaggcccccaagaaggagagcgctggctgcctggaggcctctgtgaccttcaacctcttccggctgctgacccgggacctgaagtatgtggctgatggcaacctgtgcctgcggaccagcacccaccctgagagcacctag

SEQ ID NO: 248221 - DNA, 603 bp, Artificial Sequence
  derived and/or modified sequence
atggccgccgcctggaccgtggtgctggtgaccctggtgctgggcctcgccgtagccggtccagtaccgacctcaaagccaactactacaggcaagggctgtcatataggtcgctttaaatcactgagtcctcaggagctcgcttcattcaagaaagcacgggacgccctcgaagagtctctgaaattgaagaattggagctgttccagtccagtgtttccagggaactgggatttgagactactgcaggttcgggaaaggcccgtggccctcgaggccgaactcgcccttacactgaaggtgctggaggctgcggctggaccagccttagaagacgtcctcgatcagccactccacaccctccatcatattctgtcccaactgcaggcttgtatccagccacagccaaccgccggccccaggccgagaggaaggctgcaccattggcttcacaggctgcaggaggcccccaaaaaagagagcgccgggtgcctggaagcgtccgtcacgtttaacctgttcagattgcttactcgcgaccttaagtacgtcgcagatggtaacctttgtttgcggaccagcactcacccggaaagcacctag

SEQ ID NO: 248222 - DNA, 603 bp, Artificial Sequence
  derived and/or modified sequence
atggctgctgcctggaccgtggtattggttaccttagtcctggggctggcagttgccggaccagtgccgacatccaagccgacaacaacggggaagggctgccatatcggaaggttcaaatccctgagtcctcaagagctggcaagctttaaaaaagcgagggatgctctggaggaatcactgaagctgaagaattggagctgctccagtcctgtcttccccggaaattgggacctgcgcctcctgcaggtgcgggaaaggccagtggccctggaggctgagctggcactaactttgaaagtgctagaggccgcagcgggacccgctctggaagatgtcctcgatcagccactgcacaccctgcatcacattttgtcccagctgcaagcctgtatccagcctcagcccactgcagggccacggcctcggggaaggttgcatcactggctccacaggctgcaggaggcaccgaagaaggagtcagcaggctgtctggaggcgtctgtaaccttcaacctgtttcggctcctgaccagggatctaaagtacgttgcggacggaaatctgtgcctacgcacatcaacgcatcctgaatccacgtag

SEQ ID NO: 248223 - DNA, 856 bp, Artificial Sequence
  derived and/or modified sequence
aattaccttttcactttacacacatcatcttggattgcccattttgcgtggctaaaaagcagagccatgccgctggggaagcagttgcgatttagccatggctgcagcttggaccgtggtgctggtgactttggtgctaggcttggccgtggcaggccctgtccccacttccaagcccaccacaactgggaagggctgccacattggcaggttcaaatctctgtcaccacaggagctagcgagcttcaagaaggccagggacgccttggaagagtcactcaagctgaaaaactggagttgcagctctcctgtcttccccgggaattgggacctgaggcttctccaggtgagggagcgccctgtggccttggaggctgagctggccctgacgctgaaggtcctggaggccgctgctggcccagccctggaggacgtcctagaccagccccttcacaccctgcaccacatcctctcccagctccaggcctgtatccagcctcagcccacagcagggcccaggccccggggccgcctccaccactggctgcaccggctccaggaggcccccaaaaaggagtccgctggctgcctggaggcatctgtcaccttcaacctcttccgcctcctcacgcgagacctcaaatatgtggccgatgggaacctgtgtctgagaacgtcaacccaccctgagtccacctgacaccccacaccttatttatgcgctgagccctactccttccttaatttatttcctctcaccctttatttatgaagctgcagccctgactgagacatagggctgagtttattgttttacttttatacattatgcacaaataaacaacaaggaattgga

SEQ ID NO: 248224 - protein, 401 aa, Artificial Sequence
  derived and/or modified sequence
MQVSIACTEHNLKSRNGEDRLLSKQSSTAPNVVNAARAKFRTVAIIARSLGTFTPQHHISLKESTAKQTGMKYRNLGKSGLRVSCLGLGTWVTFGGQISDEVAERLMTIAYESGVNLFDTAEVYAAGKAEVILGSIIKKKGWRRSSLVITTKLYWGGKAETERGLSRKHIIEGLKGSLQRLQLEYVDVVFANRPDSNTPMEEIVRAMTHVINQGMAMYWGTSRWSAMEIMEAYSVARQFNMIPPVCEQAEYHLFQREKVEVQLPELYHKIGVGAMTWSPLACGIISGKYGNGVPESSRASLKCYQWLKERIVSEEGRKQQNKLKDLSPIAERLGCTLPQLAVAWCLRNEGVSSVLLGSSTPEQLIENLGAIQVLPKMTSHVVNEIDNILRNKPYSKKDYRS

SEQ ID NO: 248225 - DNA, 1206 bp, Artificial Sequence
  derived and/or modified sequence
atgcaggtcagcattgcctgtacggaacataaccttaagtctcgcaatggtgaagaccggttgctgtcaaaacaatcttccacagcacccaatgtggtgaacgccgccagagctaagttccgaactgtggcaatcatcgcacgctcgcttggcacatttaccccacagcaccatatctcattgaaagaaagtacagccaagcagaccggcatgaagtacagaaacctgggaaagagtggcctgcgagtgtcctgtctgggattagggacttgggtgacatttgggggccagatatccgacgaagttgctgagaggctgatgaccatcgcttacgaaagtggagtgaatctctttgacaccgccgaggtttacgcagcagggaaagcggaggttatcctgggttccatcatcaaaaaaaagggctggcggagatcctctctcgtgattacaacaaagttgtactggggtggaaaggcagagactgaacgaggtcttagcagaaagcatataatcgagggacttaagggatcactgcagaggctgcagctggaatacgtcgacgttgtttttgctaataggccggactcaaatacgcccatggaagaaatagtgcgggcgatgacccacgtgattaatcagggaatggctatgtactgggggacctcacggtggtcggctatggaaattatggaggcttacagcgtggctaggcagtttaatatgatacccccagtgtgcgagcaggccgagtaccacctgttccagcgggaaaaagtcgaagtgcagctgcctgaactgtaccacaagatcggggtgggggcgatgacctggagcccactcgcttgcggcatcatctccggaaagtacggaaacggtgttcccgagagctcacgcgcatctctaaagtgttatcaatggctgaaagagagaattgtgtcggaagaaggcagaaagcagcaaaataagctgaaagacctatctcccattgcagaaaggttgggatgtaccttgcctcaactcgccgtcgcctggtgtctgcgaaacgaaggggtcagctccgttttgcttggtagttctactcctgagcaactcatagaaaacctgggagccattcaggtattgccaaagatgaccagccatgtcgtgaacgagattgataacatactcaggaataagccgtatagtaagaaagactatagaagctag

SEQ ID NO: 248226 - DNA, 1206 bp, Artificial Sequence
  derived and/or modified sequence
atgcaggtgtccatcgcctgcacagagcacaacctgaagagcagaaatggagaggaccggctgctgagcaagcagagcagcacagccccaaatgtggtgaatgctgcccgggccaagttcagaacagtggccatcatcgcccggagcctgggcaccttcaccccccagcaccacatcagcctgaaggagagcacagccaagcagacaggcatgaagtacagaaacctgggcaagagcggcctgcgggtgtcctgcctgggcctgggcacctgggtgaccttcggcggccagatcagtgatgaggtggccgagcggctgatgaccatcgcctatgaaagtggagtgaacctgtttgacacagctgaggtgtatgctgctgggaaggccgaggtgatcctgggcagcatcatcaagaagaagggctggaggaggagcagcctggtgatcaccaccaagctgtactggggcggcaaggccgagacagagcggggcctgagcaggaagcacatcatcgagggcctgaagggcagcctgcagaggctgcagctggagtatgtggatgtggtgtttgccaacagaccagacagcaacacccccatggaggagatcgtgcgggccatgacccacgtgatcaaccagggcatggccatgtactggggcaccagccgctggagcgccatggagatcatggaggcctacagcgtggcccggcagttcaacatgatcccccctgtgtgtgagcaggccgagtaccacctgttccagcgggagaaggtggaggtgcagctgcctgagctgtaccacaagattggagtgggcgccatgacctggagccccctggcctgtggcatcatcagcggcaagtatggaaatggagtgcctgagagcagccgggccagcctgaagtgctaccagtggctgaaggagagaattgtgtctgaggagggcaggaagcagcagaacaagctgaaggacctgagccccatcgccgagcggctgggctgcaccctgccccagctggccgtggcctggtgcctgagaaatgaaggagtgtcctctgtgctgctgggcagcagcaccccagagcagctgattgagaacctgggcgccatccaggtgctgcccaagatgaccagccacgtggtgaatgaaattgacaacatcctgaggaacaagccctacagcaagaaggactaccgctcctag

SEQ ID NO: 248227 - DNA, 1206 bp, Artificial Sequence
  derived and/or modified sequence
atgcaggtgagcatcgcctgcaccgagcacaacctgaagagccggaatggagaggaccgcctgctcagtaaacagtcctccacagcaccaaatgtggtaaatgcagcccgcgccaaattcagaaccgtcgcaataattgccagatccttaggtacattcactccacagcaccacatttctttgaaggagtccacagccaagcaaactgggatgaaatacagaaatctaggtaaaagcggcctgagagtaagctgtctagggttaggcacttgggtgacttttgggggccagatcagcgatgaagtagcagagcgattaatgaccattgcctacgaatccggagttaacctgtttgacactgccgaggtgtatgcggcgggtaaggccgaagtgatcctgggttcaattattaagaaaaaaggttggcgccgtagctccctggttatcacaacaaaactgtattggggcggcaaggccgaaacagagaggggattatcccgtaaacacataattgaaggactcaaggggagcctccagagacttcagcttgagtacgtggatgtcgtgtttgccaacaggcccgatagcaatacccccatggaagaaattgtgagagcaatgactcatgtcatcaaccagggcatggcaatgtactggggaacatctcgatggtcggcaatggaaattatggaggcatactccgtggcaagacagtttaacatgatcccccccgtctgcgagcaagccgagtatcacttattccagagggaaaaggtcgaagtacagctgccagaattgtaccataagattggcgtgggtgcaatgacctggtcccctcttgcctgtgggatcatttctgggaaatatggaaatggagtccccgaaagcagcagagcgtccctgaaatgctaccaatggttgaaagagcgtattgtctcagaggaaggtcggaagcagcagaacaagcttaaagacctctctccaatcgcagaacgcctgggttgcacactgcctcagctggccgtggcgtggtgtctgaggaacgagggggtatcaagcgttctcctgggtagttcaactcccgaacaactaatcgagaatctcggagccatccaggtgctgcccaagatgacgtcccacgtggtcaacgaaatcgacaacatcctcaggaacaagccatacagtaaaaaagattataggtcgtag

SEQ ID NO: 248228 - DNA, 4086 bp, Artificial Sequence
  derived and/or modified sequence
agttccaactgttgtgctgcagcagatttggtctgagtctgggcagagcccctttttatggagcaaccctcccgatttgttacagcaagagcctggtgcaagtgatctttgccttcccatcgcacacaaaggcaaagagctccttaaagggacctgcctgctcctccgtgcagctgcaaacccgtgtcggtgcaggctcagcaacccaggctttcgctcgagaatgagtggggaggggtcttgaggagcccccacgtcctcccggagcggaggcgggagggagctgacagccggagtggatggagaccaccagtccgaggggacccgcttgcgattagctgcttcttgggatgctccgcgcgccagttgagcatcctgcctgtggtccaggggatgctggcggcgcatcttgcggtaagcctgcgctgatttgagccatcgcccagaagcgagcccgcattcagacaccgcggaccggctccgcgaagggctgcgtgcagtcaccatgaatgctcagctctaggcttctgtaaaaacctcccccactgcatggatttggctgtttaatcagccgagattacagcccgggaagatttgcaaacctgattctccctccagctgctgtgacaacttcggggccgtctgtttacttctctgggtccccggggactctttcctgcatcgcagccccttgtgccactttgtgggcttggctcgaaagtcagccgccaggactcctctgacggcatccccaggaagggggagcaaggagggcttaaaagaaaagcagaaatccccgcaactgctcaacctctcgtgactgcctgtgttctggggttctgagagggaccgtgcgctgcctggggaagcaatgcaagtctccatagcctgcacagagcacaatttgaagagtcggaatggtgaggaccgacttctgagcaagcagagctccaccgcccccaatgtggtgaacgcagcccgggccaaattccgcacggtcgctatcatcgcgcgcagcctggggacgttcacgcctcagcatcacatttctctcaaagagtccaccgcaaagcagactggcatgaaatataggaatcttggaaaatcaggactcagagtttcttgcttgggtcttggaacatgggtgacatttggaggtcaaatttcagatgaggttgctgaacggctgatgaccatcgcctatgaaagtggtgttaacctctttgatactgccgaagtctatgctgctggaaaggctgaagtgattctggggagcatcatcaagaagaaaggctggaggaggtccagtctggtcataacaaccaaactctactggggtggaaaagctgaaacagaaagagggctgtcaagaaagcatattattgaaggattgaagggctccctccagaggctgcagctcgagtatgtggatgtggtctttgcaaatcgaccggacagtaacactcccatggaagaaattgtccgagccatgacacatgtgataaaccaaggcatggcgatgtactggggcacctcgagatggagtgctatggagatcatggaagcctattctgtagcaagacagttcaatatgatcccaccggtctgtgaacaagctgagtaccatcttttccagagagagaaagtggaggtccagctgccagagctctaccacaaaataggtgttggcgcaatgacatggtctccacttgcctgtggaatcatctcaggaaaatacggaaacggggtgcctgaaagttccagggcttcactgaagtgctaccagtggttgaaagaaagaattgtaagtgaagaagggagaaaacagcaaaacaagctaaaagacctttccccaattgcggagcgtctgggatgcacactacctcagctagctgttgcgtggtgcctgagaaatgaaggtgtgagttctgtgctcctgggatcatccactcctgaacaactcattgaaaaccttggtgccattcaggttctcccaaagatgacatcacatgtggtaaatgagattgataacatactgcgcaacaagccctacagcaagaaggactatagatcataaggcaatgcatgaaccacagaagctgcatggttaaaatagcggcctgtgcccagtacagaaaggtgttactaaccagtcttttgaatcacttagcagcttgctgctcaacctctagtgtccctccctggattctttgaggtgtctgctgtcgctaccactgtgcacatctgaaaactcacaaccaagaaaatccattctattttcttatcttggactggagtcacctattcttgcattgctgtatacacctcatgcttatgcaatgggaagaatatgggggccagggggtgtggtactaccttcaggcatttggtaactcaaagaaggctgtacagatatattttttcaaaagaacaaaatccacagatgcaatgtgagttgcgtaagaaacagagtagatagactaaattcagtgaaggaaaggaattgagagatttttcttagtaaatagattattgttaagtaaatagttattaaaaatatatctcactgcaaaaaaaaaaaagcagtatcttcactcaaaagtcttgcttggaagaataagcagaaataattttatatattttttttctattttcacattcatactaacaagttttgttccatttgttattcaataaaacaaaaatttctaggtatttgctttattacctttcaaatatttactgttgcttggccccaagaatggccttgtacaacttatccagaatgtctattaggattctaatgttatgtccacttacaagtagagacagtaaaaggatgaatacccaatctttagtgacaatgcagctgatttatgaaagagagggctacactgctatggaaacttagcttcaaagaaaatgcaatgtatctgcaattaggtgttcattttttactacattttattaaaacctgctttatactttcaactgcttgtaggcacaacttctgcaagtttaaatatttgagctttacaaataaacatacacatgctcagttttttaagtaaacctgtaaaatacccaggaaggcaaatgttcattgtttaattagcactgggattttataatataatgtttggtatttttgaggcattgttaacatgaaagtcaaccactggctttgtgaaaaatgctatgtcactattcagaatatgctgggtaaattgacttgcctagtgaaaagcaaaatgttaaagaaagaacttctggttctataatcatattatatgcactaaactatatgcatgaaagttctttgcatggattaatggggcttacccttgttgcactcgaaatctgaggtgtatctagccctgccactattggctacttaccctcattaatatcccacttgagaaaaattgtgagactatactgtgtcaatatctgtaaaaagagagaaaacatgttttgtttttttttgaagggggtggtgtgggagtggccctttaactctatttggctatctgaggatgtacaaaattctcatttaattttctggtcagcaagttccccacacagaaatcactctgaggtttacagaagaactgtaatattattttaaaatgcgatttttctgtcattagttctagatatgtacttcatggttaaattctaaatctgaaaatgctagtgggagatatcaagaaattttctttttgattactagtacctgtattctaacagagagtttgaattttttgcccgtgttatcagaatgatggaaattgatcattttcagttgttcattgtgtattcaatccagcgaactgctgtatgtatagaggagctgaggtgctgtctaatgggaaatgtgatttgattgatttatttgcttagagtaataaaagcattttgtgcattcaatcttacaatagattttatctgatctttcactgtaaggcttatgtgtattttccatatatgtaaaacatacacatgtaaaatatatgtggccataaattaggcaataatcatctaaataaaaattatattggcagctaagctgcactgaatactcaa

SEQ ID NO: 248229 - DNA, 1206 bp, Artificial Sequence
  derived and/or modified sequence
atgcaggtcagtattgcatgtactgaacataatctgaagtcacgaaacggggaagaccgcctgctgtccaagcaatccagcacagcgcctaatgtggtcaacgctgccagagctaaattccgtacagttgcaatcattgccagatctcttggaacattcacaccacagcatcatatatcgctcaaagagagtacagcaaagcagacaggcatgaagtatcgaaacctgggtaagtccggtctccgcgtttcctgtctcgggctaggcacttgggttacctttggcggtcaaatttcggatgaagtggcggaacgtcttatgaccatcgcgtacgagagcggggtgaatctctttgatacagccgaagtttatgcagctgggaaggctgaggtgatcctcggcagcattatcaaaaaaaaggggtggcggaggtcgtctctcgtcataaccacaaaactgtactggggtggcaaagcagaaaccgaacgtggcctgtcaaggaagcacatcatcgaaggcctcaaaggttctttgcaaaggcttcagctagaatatgtggacgtggtttttgctaacagaccggactctaatacaccgatggaggaaatcgtgagggccatgactcatgtcatcaaccaaggcatggcgatgtattgggggacaagcagatggagcgctatggaaatcatggaggcctactccgtcgccagacaattcaacatgatccctccagtttgtgaacaggctgagtatcacctttttcagcgagaaaaagtcgaggtacagctcccagaactttatcacaagatcggggtgggcgctatgacatggagcccgttggcgtgtggcatcataagcggcaagtatggaaacggagtgccagaatctagtcgggcatcgctgaagtgctaccagtggctgaaggaaagaattgtgtccgaggaaggcaggaaacaacaaaacaagctcaaagacttgtcccctatcgccgagcgacttggttgcaccctgccacagcttgcagtagcctggtgcttgcgcaacgaaggggtaagctccgttttgcttggtagttctactccagagcaactgatcgagaatttgggggctatccaagtcctcccaaaaatgacctctcacgtggtcaatgagatcgacaacatccttcgtaacaaaccttactcaaaaaaagactatcggtcttag

SEQ ID NO: 248230 - DNA, 1206 bp, Artificial Sequence
  derived and/or modified sequence
atgcaggtgagcatcgcctgcaccgagcacaacctgaagagcagaaacggcgaggacagactgctgagcaagcagagcagcaccgcccccaacgtggtgaacgccgccagagccaagttcagaaccgtggccatcatcgccagaagcctgggcaccttcaccccccagcaccacatcagcctgaaggagagcaccgccaagcagaccggcatgaagtacagaaacctgggcaagagcggcctgagagtgagctgcctgggcctgggcacctgggtgaccttcggcggccagatcagcgacgaggtggccgagagactgatgaccatcgcctacgagagcggcgtgaacctgttcgacaccgccgaggtgtacgccgccggcaaggccgaggtgatcctgggcagcatcatcaagaagaagggctggagaagaagcagcctggtgatcaccaccaagctgtactggggcggcaaggccgagaccgagagaggcctgagcagaaagcacatcatcgagggcctgaagggcagcctgcagagactgcagctggagtacgtggacgtggtgttcgccaacagacccgacagcaacacccccatggaggagatcgtgagagccatgacccacgtgatcaaccagggcatggccatgtactggggcaccagcagatggagcgccatggagatcatggaggcctacagcgtggccagacagttcaacatgatcccccccgtgtgcgagcaggccgagtaccacctgttccagagagagaaggtggaggtgcagctgcccgagctgtaccacaagatcggcgtgggcgccatgacctggagccccctggcctgcggcatcatcagcggcaagtacggcaacggcgtgcccgagagcagcagagccagcctgaagtgctaccagtggctgaaggagagaatcgtgagcgaggagggcagaaagcagcagaacaagctgaaggacctgagccccatcgccgagagactgggctgcaccctgccccagctggccgtggcctggtgcctgagaaacgagggcgtgagcagcgtgctgctgggcagcagcacccccgagcagctgatcgagaacctgggcgccatccaggtgctgcccaagatgaccagccacgtggtgaacgagatcgacaacatcctgagaaacaagccctacagcaagaaggactacagaagctag

SEQ ID NO: 248231 - protein, 419 aa, Artificial Sequence
  derived and/or modified sequence
MLAARTGAAGSQISEENTKLRRQSGFSVAGKDKSPKKASENAKDSSLSPSGESQLRARQLALLREVEMNWYLKLCDLSSEHTTVCTTGMPHRNLGKSGLRVSCLGLGTWVTFGGQISDEVAERLMTIAYESGVNLFDTAEVYAAGKAEVILGSIIKKKGWRRSSLVITTKLYWGGKAETERGLSRKHIIEGLKGSLQRLQLEYVDVVFANRPDSNTPMEEIVRAMTHVINQGMAMYWGTSRWSAMEIMEAYSVARQFNMIPPVCEQAEYHLFQREKVEVQLPELYHKIGVGAMTWSPLACGIISGKYGNGVPESSRASLKCYQWLKERIVSEEGRKQQNKLKDLSPIAERLGCTLPQLAVAWCLRNEGVSSVLLGSSTPEQLIENLGAIQVLPKMTSHVVNEIDNILRNKPYSKKDYRS

SEQ ID NO: 248232 - DNA, 1260 bp, Artificial Sequence
  derived and/or modified sequence
atgctggccgcacggacaggtgctgcgggctcgcagataagtgaagagaacacaaagctgcggaggcaatccggctttagtgtggcaggcaaagacaaaagtcctaagaaggcaagcgaaaatgctaaggactcctctctgtctccgtccggagaatctcagttgcgcgcacggcagctagcgctgttgcgggaggtggagatgaactggtacctgaagttatgcgatttgagttcggagcatactaccgtctgcaccactggcatgccccacaggaacctaggcaagagcggattgcgggtttcatgtctcggacttggaacctgggtgacatttggtggccagatctctgatgaggtggctgagcgactgatgaccattgcatacgagagcggcgtgaacctgttcgacacggccgaagtgtacgcagcagggaaggccgaggtgattttaggaagcattatcaaaaagaaagggtggaggcggagttcactggtaatcactacaaaattatattggggcggtaaggccgagaccgaacgggggctatcccgaaagcatataattgaagggctcaaaggatctctgcaacgtctgcagctcgaatacgttgatgttgtcttcgcaaataggcccgattccaacactcctatggaagagatcgtgagggccatgacacatgtgatcaatcagggaatggcgatgtattggggcacatctcgttggagcgcgatggagattatggaagcttattcggtagcaaggcagtttaatatgatcccaccagtatgcgagcaggccgaataccacctctttcagcgcgagaaggtcgaagttcagctccccgaactttaccacaagataggcgtgggagccatgacctggtcgcccttggcctgtggcatcataagcggaaagtatggtaatggagtgcctgagtcctctagagccagtcttaaatgttatcagtggcttaaggaaagaattgtgtctgaggaggggcgcaagcagcagaacaaactgaaagacctgtcacctatcgctgagcgccttggttgcactctccctcaactggcagtggcctggtgcctcaggaacgagggtgtaagcagcgtcctcctcggatctagcacgcctgagcagctgatagagaacctcggtgccattcaggtgctgcctaaaatgacctctcacgtggtaaatgaaatcgacaatatattacgcaataagccctacagcaagaaggactatcggagttag

SEQ ID NO: 248233 - DNA, 1260 bp, Artificial Sequence
  derived and/or modified sequence
atgctggccgccaggactggagctgctggcagccagatcagcgaggagaacaccaagctgcggcggcagagcggcttctctgtggccggcaaggacaagagccccaagaaggcctctgaaaatgccaaggacagcagcctgagccccagcggggagagccagctgcgggcccggcagctggccctgctgcgggaggtggagatgaactggtacctgaagctgtgtgacctgagcagcgagcacaccaccgtgtgcaccaccggcatgccccacaggaacctgggcaagagcggcctgcgggtgtcctgcctgggcctgggcacctgggtgaccttcggcggccagatcagtgatgaggtggccgagcggctgatgaccatcgcctatgaaagtggagtgaacctgtttgacacagctgaggtgtatgctgctgggaaggccgaggtgatcctgggcagcatcatcaagaagaagggctggaggaggagcagcctggtgatcaccaccaagctgtactggggcggcaaggccgagacagagcggggcctgagcaggaagcacatcatcgagggcctgaagggcagcctgcagaggctgcagctggagtatgtggatgtggtgtttgccaacagaccagacagcaacacccccatggaggagatcgtgcgggccatgacccacgtgatcaaccagggcatggccatgtactggggcaccagccgctggagcgccatggagatcatggaggcctacagcgtggcccggcagttcaacatgatcccccctgtgtgtgagcaggccgagtaccacctgttccagcgggagaaggtggaggtgcagctgcctgagctgtaccacaagattggagtgggcgccatgacctggagccccctggcctgtggcatcatcagcggcaagtatggaaatggagtgcctgagagcagccgggccagcctgaagtgctaccagtggctgaaggagagaattgtgtctgaggagggcaggaagcagcagaacaagctgaaggacctgagccccatcgccgagcggctgggctgcaccctgccccagctggccgtggcctggtgcctgagaaatgaaggagtgtcctctgtgctgctgggcagcagcaccccagagcagctgattgagaacctgggcgccatccaggtgctgcccaagatgaccagccacgtggtgaatgaaattgacaacatcctgaggaacaagccctacagcaagaaggactaccgctcctag

SEQ ID NO: 248234 - DNA, 1260 bp, Artificial Sequence
  derived and/or modified sequence
atgctggccgcccggaccggcgccgccggcagccagatcagcgaggagaatacaaagctgcgcagacaaagcggcttctctgtggctggcaaagacaagtcccccaaaaaagcttcggaaaatgccaaagatagtagtttgagcccatcgggtgagagccagttgagagcacgacaactggctttactgcgggaggtcgaaatgaactggtacctcaaactgtgtgatctgagctcggaacacaccaccgtgtgtaccaccggtatgccccatcggaatctcggcaaatcagggctgcgcgtttcctgcttgggcctagggacctgggtcacattcggcggccagatcagtgatgaggtggccgaacggctcatgactattgcctatgaatcaggagttaacctcttcgatactgcagaagtctacgccgccggcaaggccgaagtaatcctggggagtatcataaaaaagaaagggtggcgcaggtcaagcctggtgattactacaaagctgtattggggggggaaggcagagaccgagcgtggtctgtcccggaaacatatcattgaaggcctgaaggggtctctccagaggcttcagctcgaatacgttgacgtggtttttgcgaaccggcccgatagcaatacccccatggaggagatcgtcagagccatgacccatgtgatcaaccagggcatggccatgtactggggcacatcgcgctggtctgcaatggaaattatggaggcttacagcgtcgcaagacagttcaacatgattccacccgtgtgcgaacaggcagaatatcacctgtttcagagggaaaaagtggaggtgcaattgccagagttatatcataaaattggcgttggggcaatgacttggtctcccctggcctgcgggattatttccggtaaatacggcaatggagtaccggagtccagtagggcatcactcaagtgttatcaatggctgaaggagagaatcgtttcggaggagggacggaagcagcagaacaagctgaaggatcttagtcctattgcagagagactggggtgcacgctccctcaactggctgtggcatggtgtctacgaaacgagggagttagctcagtactcttgggttccagcactcctgagcagttgatagagaatctaggcgccattcaagttctgccaaagatgacttcccacgtcgtaaatgagattgataatattctgaggaacaaaccgtactcgaagaaagattaccgttcttag

SEQ ID NO: 248235 - DNA, 3122 bp, Artificial Sequence
  derived and/or modified sequence
agaaaaatcaattcagattactttgatgacagtgacttccagtcttctctgaaagatctccacgatgctggcagcccggacaggggcagcggggagtcagatctcagaggagaacaccaagttaaggagacagtctgggttttctgtagcagggaaagacaaatctcccaagaaagcctcagaaaacgctaaagacagcagccttagtccctcaggggaaagccagctcagggcgcgtcaactggctctgctgcgcgaagtggagatgaactggtacctaaagctctgcgacctgtccagcgagcacaccaccgtctgcaccacaggcatgccgcacaggaatcttggaaaatcaggactcagagtttcttgcttgggtcttggaacatgggtgacatttggaggtcaaatttcagatgaggttgctgaacggctgatgaccatcgcctatgaaagtggtgttaacctctttgatactgccgaagtctatgctgctggaaaggctgaagtgattctggggagcatcatcaagaagaaaggctggaggaggtccagtctggtcataacaaccaaactctactggggtggaaaagctgaaacagaaagagggctgtcaagaaagcatattattgaaggattgaagggctccctccagaggctgcagctcgagtatgtggatgtggtctttgcaaatcgaccggacagtaacactcccatggaagaaattgtccgagccatgacacatgtgataaaccaaggcatggcgatgtactggggcacctcgagatggagtgctatggagatcatggaagcctattctgtagcaagacagttcaatatgatcccaccggtctgtgaacaagctgagtaccatcttttccagagagagaaagtggaggtccagctgccagagctctaccacaaaataggtgttggcgcaatgacatggtctccacttgcctgtggaatcatctcaggaaaatacggaaacggggtgcctgaaagttccagggcttcactgaagtgctaccagtggttgaaagaaagaattgtaagtgaagaagggagaaaacagcaaaacaagctaaaagacctttccccaattgcggagcgtctgggatgcacactacctcagctagctgttgcgtggtgcctgagaaatgaaggtgtgagttctgtgctcctgggatcatccactcctgaacaactcattgaaaaccttggtgccattcaggttctcccaaagatgacatcacatgtggtaaatgagattgataacatactgcgcaacaagccctacagcaagaaggactatagatcataaggcaatgcatgaaccacagaagctgcatggttaaaatagcggcctgtgcccagtacagaaaggtgttactaaccagtcttttgaatcacttagcagcttgctgctcaacctctagtgtccctccctggattctttgaggtgtctgctgtcgctaccactgtgcacatctgaaaactcacaaccaagaaaatccattctattttcttatcttggactggagtcacctattcttgcattgctgtatacacctcatgcttatgcaatgggaagaatatgggggccagggggtgtggtactaccttcaggcatttggtaactcaaagaaggctgtacagatatattttttcaaaagaacaaaatccacagatgcaatgtgagttgcgtaagaaacagagtagatagactaaattcagtgaaggaaaggaattgagagatttttcttagtaaatagattattgttaagtaaatagttattaaaaatatatctcactgcaaaaaaaaaaaagcagtatcttcactcaaaagtcttgcttggaagaataagcagaaataattttatatattttttttctattttcacattcatactaacaagttttgttccatttgttattcaataaaacaaaaatttctaggtatttgctttattacctttcaaatatttactgttgcttggccccaagaatggccttgtacaacttatccagaatgtctattaggattctaatgttatgtccacttacaagtagagacagtaaaaggatgaatacccaatctttagtgacaatgcagctgatttatgaaagagagggctacactgctatggaaacttagcttcaaagaaaatgcaatgtatctgcaattaggtgttcattttttactacattttattaaaacctgctttatactttcaactgcttgtaggcacaacttctgcaagtttaaatatttgagctttacaaataaacatacacatgctcagttttttaagtaaacctgtaaaatacccaggaaggcaaatgttcattgtttaattagcactgggattttataatataatgtttggtatttttgaggcattgttaacatgaaagtcaaccactggctttgtgaaaaatgctatgtcactattcagaatatgctgggtaaattgacttgcctagtgaaaagcaaaatgttaaagaaagaacttctggttctataatcatattatatgcactaaactatatgcatgaaagttctttgcatggattaatggggcttacccttgttgcactcgaaatctgaggtgtatctagccctgccactattggctacttaccctcattaatatcccacttgagaaaaattgtgagactatactgtgtcaatatctgtaaaaagagagaaaacatgttttgtttttttttgaagggggtggtgtgggagtggccctttaactctatttggctatctgaggatgtacaaaattctcatttaattttctggtcagcaagttccccacacagaaatcactctgaggtttacagaagaactgtaatattattttaaaatgcgatttttctgtcattagttctagatatgtacttcatggttaaattctaaatctgaaaatgctagtgggagatatcaagaaattttctttttgattactagtacctgtattctaacagagagtttgaattttttgcccgtgttatcagaatgatggaaattgatcattttcagttgttcattgtgtattcaatccagcgaactgctgtatgtatagaggagctgaggtgctgtctaatgggaa

SEQ ID NO: 248236 - DNA, 1260 bp, Artificial Sequence
  derived and/or modified sequence
atgcttgcagccaggacaggcgcagctgggagtcagatttcagaggaaaatacaaagcttcgcaggcagtccgggttctctgttgcaggaaaggacaagagcccgaaaaaggcttccgagaatgccaaagactcatccctgtcgccaagtggtgagtcgcaactgcgcgctcggcaactggcacttcttagggaagtggagatgaattggtaccttaagctttgtgatctgtcttcggagcacaccacggtgtgcacaacaggaatgccccacagaaatctggggaaaagcggactgcgggtttcgtgtctgggtttgggcacatgggtgacgttcggcggacagatttccgatgaagtagcagaaagacttatgacaatcgcttacgagagcggagtgaatcttttcgacactgcagaagtatacgcagccggaaaagcggaggtcatactgggctctattattaagaaaaaggggtggcgccgaagttctctcgtgatcactaccaagttgtattgggggggtaaggcagagacggaacgcggtctaagcagaaaacacatcattgaaggtcttaaggggtcattgcaaagactacagctcgaatacgtggacgtggtgttcgccaatcgaccagactccaatacacctatggaagaaatcgtccgcgctatgacacacgtcatcaaccaggggatggctatgtattgggggacctcacgatggagcgccatggaaattatggaggcttatagcgtggcacgccagtttaacatgatcccccctgtttgcgaacaggccgagtatcaccttttccagagagagaaagtagaagttcagcttccagaattgtaccataagatcggagtcggagctatgacttggagtccgttggcgtgtggtatcattagcggaaagtacggcaatggcgtgccagaatcaagccgagccagtttgaaatgctaccagtggctaaaggagagaatcgtcagcgaggaaggtagaaagcagcagaacaagcttaaagatctcagtcctattgccgaaagactcggctgcaccctccctcagttagcagttgcctggtgtctcagaaacgagggggtgtcttcagtcctcctgggctcttccacgcctgagcagcttattgagaatttgggagccatccaggtcctcccaaagatgacatcacatgtggtcaatgaaatagacaacatcctcaggaataaaccatatagtaagaaagattacagatcctag

SEQ ID NO: 248237 - DNA, 1260 bp, Artificial Sequence
  derived and/or modified sequence
atgctggccgccagaaccggcgccgccggcagccagatcagcgaggagaacaccaagctgagaagacagagcggcttcagcgtggccggcaaggacaagagccccaagaaggccagcgagaacgccaaggacagcagcctgagccccagcggcgagagccagctgagagccagacagctggccctgctgagagaggtggagatgaactggtacctgaagctgtgcgacctgagcagcgagcacaccaccgtgtgcaccaccggcatgccccacagaaacctgggcaagagcggcctgagagtgagctgcctgggcctgggcacctgggtgaccttcggcggccagatcagcgacgaggtggccgagagactgatgaccatcgcctacgagagcggcgtgaacctgttcgacaccgccgaggtgtacgccgccggcaaggccgaggtgatcctgggcagcatcatcaagaagaagggctggagaagaagcagcctggtgatcaccaccaagctgtactggggcggcaaggccgagaccgagagaggcctgagcagaaagcacatcatcgagggcctgaagggcagcctgcagagactgcagctggagtacgtggacgtggtgttcgccaacagacccgacagcaacacccccatggaggagatcgtgagagccatgacccacgtgatcaaccagggcatggccatgtactggggcaccagcagatggagcgccatggagatcatggaggcctacagcgtggccagacagttcaacatgatcccccccgtgtgcgagcaggccgagtaccacctgttccagagagagaaggtggaggtgcagctgcccgagctgtaccacaagatcggcgtgggcgccatgacctggagccccctggcctgcggcatcatcagcggcaagtacggcaacggcgtgcccgagagcagcagagccagcctgaagtgctaccagtggctgaaggagagaatcgtgagcgaggagggcagaaagcagcagaacaagctgaaggacctgagccccatcgccgagagactgggctgcaccctgccccagctggccgtggcctggtgcctgagaaacgagggcgtgagcagcgtgctgctgggcagcagcacccccgagcagctgatcgagaacctgggcgccatccaggtgctgcccaagatgaccagccacgtggtgaacgagatcgacaacatcctgagaaacaagccctacagcaagaaggactacagaagctag

SEQ ID NO: 248238 - protein, 194 aa, Artificial Sequence
  derived and/or modified sequence
MASLGANPRRTPQGPRPGAASSGFPSPAPVPGPREAEEEEVEEEEELAEIHLCVLWNSGYLGIAYYDTSDSTIHFMPDAPDHESLKLLQRVLDEINPQSVVTSAKQDENMTRFLGKLASQEHREPKRPEIIFLPSVDFGLEISKQRLLSGNYSFIPDAMTATEKILFLSSIIPFDCLLTVRALGGLLKFLGRRR

SEQ ID NO: 248239 - protein, 835 aa, Artificial Sequence
  derived and/or modified sequence
MASLGANPRRTPQGPRPGAASSGFPSPAPVPGPREAEEEEVEEEEELAEIHLCVLWNSGYLGIAYYDTSDSTIHFMPDAPDHESLKLLQRVLDEINPQSVVTSAKQDENMTRFLGKLASQEHREPKRPEIIFLPSVDFGLEISKQRLLSGNYSFIPDAMTATEKILFLSSIIPFDCLLTVRALGGLLKFLGRRRIGVELEDYNVSVPILGFKKFMLTHLVNIDQDTYSVLQIFKSESHPSVYKVASGLKEGLSLFGILNRCHCKWGEKLLRLWFTRPTHDLGELSSRLDVIQFFLLPQNLDMAQMLHRLLGHIKNVPLILKRMKLSHTKVSDWQVLYKTVYSALGLRDACRSLPQSIQLFRDIAQEFSDDLHHIASLIGKVVDFEGSLAENRFTVLPNIDPEIDEKKRRLMGLPSFLTEVARKELENLDSRIPSCSVIYIPLIGFLLSIPRLPSMVEASDFEINGLDFMFLSEEKLHYRSARTKELDALLGDLHCEIRDQETLLMYQLQCQVLARAAVLTRVLDLASRLDVLLALASAARDYGYSRPRYSPQVLGVRIQNGRHPLMELCARTFVPNSTECGGDKGRVKVITGPNSSGKSIYLKQVGLITFMALVGSFVPAEEAEIGAVDAIFTRIHSCESISLGLSTFMIDLNQQVAKAVNNATAQSLVLIDEFGKGTNTVDGLALLAAVLRHWLARGPTCPHIFVATNFLSLVQLQLLPQGPLVQYLTMETCEDGNDLVFFYQVCEGVAKASHASHTAAQAGLPDKLVARGKEVSDLIRSGKPIKPVKDLLKKNQMENCQTLVDKFMKLDLEDPNLDLNVFMSQEVLPAATSIL

SEQ ID NO: 248240 - protein, 333 aa, Artificial Sequence
  derived and/or modified sequence
KILFLSSIIPFDCLLTVRALGGLLKFLGRRRIGVELEDYNVSVPILGFKKFMLTHLVNIDQDTYSVLQIFKSESHPSVYKVASGLKEGLSLFGILNRCHCKWGEKLLRLWFTRPTHDLGELSSRLDVIQFFLLPQNLDMAQMLHRLLGHIKNVPLILKRMKLSHTKVSDWQVLYKTVYSALGLRDACRSLPQSIQLFRDIAQEFSDDLHHIASLIGKVYLSPQVDFEGSLAENRFTVLPNIDPEIDEKKRRLMGLPSFLTEVARKELENLDSRIPSCSVIYIPLIGFLLSIPRLPSMVEASDFEINGLDFMFLSEEKLHYRSARTKELDALLG

SEQ ID NO: 248241 - protein, 156 aa, Artificial Sequence
  derived and/or modified sequence
TAQSLVLIDEFGKGTNTVDGLALLAAVLRHWLARGPTCPHIFVATNFLSLVQLQLLPQGPLVQYLVCEGVAKASHASHTAAQAGLPDKLVARGKEVSDLIRSGKPIKPVKDLLKKNQMENCQTLVDKFMKLDLEDPNLDLNVFMSQEVLPAATSIL

SEQ ID NO: 248242 - protein, 728 aa, Artificial Sequence
  derived and/or modified sequence
MASLGANPRRTPQGPRPGAASSGFPSPAPVPGPREAEEEEVEEEEELAEIHLCVLWNSGYLGIAYYDTSDSTIHFMPDAPDHESLKLLQRVLDEINPQSVVTSAKQDENMTRFLGKLASQEHREPKRPEIIFLPSVDFGLEISKQRLLSGNYSFIPDAMTATEKILFLSSIIPFDCLLTVRALGGLLKFLGRRRIGVELEDYNVSVPILGFKKFMLTHLVNIDQDTYSVLQIFKSESHPSVYKVASGLKEGLSLFGILNRCHCKWGEKLLRLWFTRPTHDLGELSSRLDVIQFFLLPQNLDMAQMLHRLLGHIKNVPLILKRMKLSHTKVSDWQVLYKTVYSALGLRDACRSLPQSIQLFRDIAQEFSDDLHHIASLIGKVVDFEGSLAENRFTVLPNIDPEIDEKKRRLMGLPSFLTEVARKELENLDSRIPSCSVIYIPLIGFLLSIPRLPSMVEASDFEINGLDFMFLSEEKLHYRSARTKELDALLGDLHCEIRDQETLLMYQLQCQVLARAAVLTRVLDLASRLDVLLALASAARDYGYSRPRYSPQVLGVRIQNGRHPLMELCARTFVPNSTECGGDKGRVKVITGPNSSGKSIYLKQVGLITFMALVGSFVPAEEAEIGAVDAIFTRIHSCESISLGLSTFMIDLNQQVAKAVNNATAQSLVLIDEFGKGTNTVDGLALLAAVLRHWLARGPTCPHIFVATNFLSLVQLQLLPQGPLVQYL

SEQ ID NO: 248243 - protein, 497 aa, Artificial Sequence
  derived and/or modified sequence
TVYSALGLRDACRSLPQSIQLFRDIAQEFSDDLHHIASLIGKVVDFEGSLAENRFTVLPNIDPEIDEKKRRLMGLPSFLTEVARKELENLDSRIPSCSVIYIPLIGFLLSIPRLPSMVEASDFEINGLDFMFLSEEKLHYRSARTKELDALLGDLHCEIRDQETLLMYQLQCQVLARAAVLTRVLDLASRLDVLLALASAARDYGYSRPRYSPQVLGVRIQNGRHPLMELCARTFVPNSTECGGDKGRVKVITGPNSSGKSIYLKQVGLITFMALVGSFVPAEEAEIGAVDAIFTRIHSCESISLGLSTFMIDLNQQVAKAVNNATAQSLVLIDEFGKGTNTVDGLALLAAVLRHWLARGPTCPHIFVATNFLSLVQLQLLPQGPLVQYLTMETCEDGNDLVFFYQVCEGVAKASHASHTAAQAGLPDKLVARGKEVSDLIRSGKPIKPVKDLLKKNQMENCQTLVDKFMKLDLEDPNLDLNVFMSQEVLPAATSIL

SEQ ID NO: 248244 - protein, 65 aa, Artificial Sequence
  derived and/or modified sequence
TAQSLVLIDEFGKGTNTVDGLALLAAVLRHWLARGPTCPHIFVATNFLSLVQLQLLPQGPLVQYL

SEQ ID NO: 248245 - protein, 115 aa, Artificial Sequence
  derived and/or modified sequence
IAQEFSDDLHHIASLIGKVVDFEGSLAENRFTVLPNIDPEIDEKKRRLMGLPSFLTEVARKELENLDSRIPSCSVIYIPLIGFLLSIPRLPSMVEASDFEINGLDFMVRPSTSVR

SEQ ID NO: 248246 - DNA, 2508 bp, Artificial Sequence
  derived and/or modified sequence
atggcctcactcggtgccaaccctaggcggaccccccaaggccccagacctggcgccgcctcctcagggtttccaagcccagcccccgtgcccggcccacgagaagctgaagaagaagaagtagaagaagaagaggagttggccgagatacacctctgtgtcctctggaatagcgggtatctaggaatcgcttattatgatacctctgactctacaatccactttatgccggatgcccctgatcacgagagtcttaaactactccagcgcgtccttgacgaaatcaaccctcagagcgtcgtaactagcgctaagcaagacgaaaatatgactagattcctagggaagttagccagccaggagcaccgcgagccaaagcgacctgaaattatctttctgcccagcgttgattttggacttgaaatcagtaagcagcgactgctgtctggcaattactcattcataccggatgccatgacagccacagagaagatcctgttcctatcctcaatcatacccttcgactgtctgctgaccgtgcgcgccctgggtggactcctaaaatttttggggcggagacggatcggggtcgaacttgaggactacaacgtgtccgtccctattctcggcttcaaaaaattcatgctcacccacttagtcaatattgaccaagatacctactccgtgctgcagatcttcaagtctgagtcccacccgagcgtgtacaaagtggcttctggtcttaaggagggactgtctttgttcgggatccttaacaggtgccactgcaaatggggtgaaaagcttttgagactgtggtttacacggcctacacacgacctgggagagttgtcatcccggctggacgtaatccagttttttctgctgccccagaacctggacatggcccagatgctgcataggctgctgggccacattaagaatgttcccttgattctgaaacgcatgaaactgagtcacacgaaagtctccgactggcaggtgctgtataagacggtgtattcagcactaggcctgcgagacgcttgtcgatcccttcctcaatccatacagctgttccgcgatatcgctcaggagttttcagatgacctgcatcatattgccagcctgatcggcaaagtcgtggatttcgaaggttctcttgccgaaaaccgtttcaccgtcctgcctaacattgaccctgagatcgatgagaagaaacggaggctcatgggactgcctagctttctgacagaagttgccaggaaggagcttgagaatctggactcacggattcccagttgttcagtgatatacatcccactaataggcttcctcttgtccatcccacgactgccttcgatggtcgaagcttctgattttgaaattaacgggctggatttcatgttcctgagcgaggagaaactgcactacagatcggcacggactaaagaactcgatgccctcttaggggatcttcactgcgaaatccgcgatcaggaaaccctgctgatgtaccagctccagtgtcaagtgctggcgagagcagcggtgctcacaagagtgctggatctggccagtcgcctggatgtgctgttagccctggcgagcgctgcccgagactacgggtattcgagaccaagatattcaccgcaggtgctcggcgtccggatccagaacggtaggcatccgttgatggagctttgtgcccggacatttgtaccaaactccaccgaatgtggaggcgataaagggagagtgaaggtgattactgggcccaattccagcggcaagagtatttacctcaaacaggtcggactgattactttcatggcactcgtggggagctttgttcctgcggaggaggcagagatcggagccgtggatgccatttttaccagaattcattcttgtgaaagtatctccctcggattgagtacatttatgattgaccttaaccagcaagttgctaaggctgtgaataacgctacagcccagtccctggttcttatcgatgagtttggcaaaggcaccaatactgtggatggccttgccctgctggctgccgtgctgaggcactggttagctagagggcccacctgcccacacatatttgttgcgaccaacttcctctccctggtgcaactgcagctgctcccccaggggcctctggtgcaatacctgactatggaaacgtgcgaggatggcaacgatctggttttcttctaccaggtctgcgagggagtggcaaaagcctcccatgcctctcacaccgccgcacaggctggcctaccggacaagttggtggccaggggtaaggaggtgtcggacttgatccgctccgggaagcctatcaagccggtgaaggacctgctaaaaaaaaatcagatggaaaactgccagaccctggtggacaagttcatgaagctggacctggaagaccctaacttagatcttaacgttttcatgtctcaggaggtgctccccgcagcgacttccattctgtag

SEQ ID NO: 248247 - DNA, 2508 bp, Artificial Sequence
  derived and/or modified sequence
atggcatctctcggggctaatccgcggagaacccctcagggcccccggcccggtgcagcatcttcaggctttccctcccccgcccccgtaccaggaccaagagaagccgaagaggaggaagtggaggaggaggaggaactagcggaaatccacctgtgtgttctgtggaacagcggatacctgggaatcgcttactacgatacatcagattcaaccatccacttcatgccagacgccccagaccatgagagcctgaaacttctgcagagggtgttggacgaaatcaatccccagtctgtggttacttctgcaaagcaggacgagaatatgaccagatttctagggaagctggcctctcaggagcatagagaaccaaaacgccccgagataattttcctgcctagcgtcgactttggtctggaaatctcaaagcaaagacttctctctggcaattacagttttatcccagatgctatgacagctactgagaagatactctttctcagtagtattattccctttgactgcctgttgacagtacgcgcgctgggggggctgctaaagttcctgggcagacgtcgtatcggggtcgagcttgaggactacaatgtgtccgtccccatcctggggtttaagaaattcatgttgacccacctagtcaacatcgatcaggatacgtacagtgttttacaaatcttcaaatctgagagtcatccctctgtgtataaggtggccagcgggctgaaggaagggctgtcactgtttggcattcttaacagatgtcactgtaaatggggagaaaaactcctcagactctggttcactaggcctacccacgacctgggggaattgtcatccaggctcgatgtgattcaattctttctgctcccccagaacttggacatggctcaaatgctccaccggcttctgggccatatcaaaaatgtgcccctgatcttaaaacgtatgaagttatcgcacacaaaagtaagcgactggcaagtgttatataagaccgtatacagcgctctcggactaagagacgcctgccgcagtctgccacaaagtatacaactcttcagagatattgcccaggagtttagtgacgatctgcaccatattgcttctttgataggtaaggtggtggatttcgaggggtctttggccgagaatcgatttacagtcttaccgaacattgatcccgagatcgacgaaaagaaaagacggctgatggggctgccttcttttctcaccgaagtggcgagaaaagagctcgagaatctcgattctcggatcccatcttgttctgtcatttacatccctttaattgggtttcttttgtcaattcctagactgccatccatggtggaagctagcgactttgagatcaacgggctggactttatgtttctttcagaggagaaattacattatcggagcgcacgtacgaaggaactcgatgctcttctgggcgacttgcattgtgagataagggaccaggaaacactactaatgtatcagcttcaatgtcaggtgctggcgcgggctgccgtactgacaagggtgctggatttggcaagccgcctcgatgtgctccttgcacttgccagtgccgcacgcgactatggatactctaggcctagatatagtcctcaagtgcttggagtgcgcattcagaatggtcgccaccccttgatggaactttgtgcccggacgtttgtgcccaattcaacggagtgcggcggagacaaaggaagagtcaaggttattacgggcccgaatagcagtggaaagtctatttatttgaaacaggtgggactgataacctttatggccctggtgggatcgtttgtgccggccgaagaggcagagataggagccgtcgatgcaatctttacacgcattcatagctgcgaaagtatctccctgggactcagtacattcatgattgatcttaaccagcaagtcgctaaagctgtaaataacgccacagcacagtccttggtactgattgatgaattcgggaagggcactaacactgtggacgggctagctctcctggctgcagtccttcggcactggctcgccagggggccaacttgtccgcacattttcgtggccacgaacttcctgtctctggtgcaattgcagctgttacctcagggacccctagttcagtacctcacaatggaaacctgcgaagacggtaacgacctggtttttttctatcaggtctgtgagggagttgccaaagcgagtcacgccagccacacagccgcccaagcgggcctcccggataagttagtcgccagaggaaaggaggtgagcgatctgattagatccgggaaacctatcaaaccagtgaaagacttgctgaagaaaaaccagatggagaattgccagaccctcgttgacaagtttatgaaactggatttagaggacccaaatttagatttgaatgtcttcatgtcccaggaagtactgcccgctgccacaagcattctgtag

SEQ ID NO: 248248 - DNA, 2508 bp, Artificial Sequence
  derived and/or modified sequence
atggcatctctaggcgccaaccctcggaggactccacaggggccacggcccggcgccgcttcaagcgggttcccctcccccgcccctgtgcccgggcctagagaagcagaagaggaggaggtcgaggaagaagaagagctggccgagatccatctgtgtgtcctgtggaattctgggtatcttgggattgcctattatgatacttctgatagtactattcattttatgccagacgctcccgatcatgagtctctgaagctacttcagagagttctggacgagatcaatcctcagtctgtggtcacatccgctaaacaagacgaaaacatgacccgatttttgggaaagctggcttcgcaggaacaccgtgaacccaaaagacctgagatcatctttctgccctccgtagactttggtctggagatctcgaaacagagactgctgagcggcaattacagctttattcccgacgcaatgacagctactgaaaaaattctctttttgtctagcatcattcctttcgactgcctgcttactgtgcgcgccctcgggggattgcttaagtttctgggacgcagacgtattggcgtggagcttgaggactacaatgttagtgtccccatattagggttcaaaaaattcatgcttactcacctcgtcaacattgatcaggatacatactccgtcctccagattttcaagagtgaaagtcacccctctgtgtataaggtggcctccggcctcaaggaagggctaagtctgttcgggattttgaacagatgccattgcaaatggggtgaaaaactgttgcgtctatggtttactaggcctacccatgatctcggcgaattgtccagcaggctggacgttatccaattcttcctgctcccacagaacctcgacatggcacagatgttacatagattgctgggccatattaagaatgtcccccttatcttgaagcgcatgaaactgtctcacactaaggtgagcgattggcaagtcctgtataaaacagtctattccgctctgggactccgggacgcctgtaggtctctgcctcagtccatccaactcttccgggatatcgcccaagaattctctgacgatctccaccacatcgccagcttaattggtaaagtagtggactttgagggctccctcgcagaaaatcgctttacggtgctccccaatattgatcctgagatagacgaaaaaaagaggagactcatgggtctccctagctttctgaccgaagtggcccgtaaagaactagagaaccttgatagccgaatcccttcatgcagcgtgatctacatcccactcatagggtttcttctctccatccctcgtctaccgagcatggttgaggcctccgacttcgagattaacggcttagactttatgttcctgtctgaagagaagttgcactaccggagcgcgcggacaaaagagctggacgctctgctgggtgatttgcattgcgaaatccgggaccaagagaccctgctaatgtatcaacttcagtgccaggtcctggcacgggctgctgtgcttaccagagtcctggacctggcatcgcgcctggatgtcttgcttgccctagcctccgctgcaagagactatggatattcaagacctagatatagtccccaggtcctgggagtcaggatccagaatgggcgccacccacttatggagctgtgcgcgaggaccttcgtaccaaacagcaccgagtgcggcggagacaagggcagggtgaaagttattactgggcctaactcgagtggaaagtctatctatctcaagcaggtcggattgataacctttatggccttagtaggtagctttgtccccgcggaggaagctgagataggtgcagtggatgccatctttactcgcatacattcgtgcgagagtatctccctagggctctcaaccttcatgattgacctcaatcagcaagtcgctaaagctgttaacaacgcaacagcccagagcctggtgctgattgatgaattcgggaaaggtaccaatactgtggatggactagctctgctggccgctgtgctgagacattggctggcccgaggccccacttgtccgcacatcttcgtggctacaaacttcctgagtttagttcaactccagctcttaccacagggaccactcgtgcagtatctcactatggagacgtgcgaggacggaaacgaccttgtctttttttaccaggtttgtgaaggggttgccaaggccagccacgcctcccacactgctgctcaagccggcctgcccgacaaactcgtagccaggggcaaagaagtgtctgacctcatacgaagtggaaagccaatcaagcctgtcaaggacctgctgaagaaaaaccagatggaaaactgccaaacactagtggacaagtttatgaaactggacctagaggatcccaatttggacctgaacgtgttcatgtcacaagaggtgttaccagccgcaacctccattctgtag

SEQ ID NO: 248249 - DNA, 2508 bp, Artificial Sequence
  derived and/or modified sequence
atggccagcctgggcgcaaatccacgccgcacaccacagggacctagacccggtgcagcatcctctggcttcccctctcctgcccccgtgccaggccccagggaggctgaggaagaggaggttgaggaagaggaggaattggccgaaatccacctgtgcgttctctggaatagtggctacctcggcattgcctattacgacacttccgacagtaccatccattttatgcctgacgccccggaccacgagagcttgaaattgctgcaaagagtgctcgatgagatcaacccccagtcagtcgtcacttctgcgaaacaggacgagaatatgacgagatttctgggtaagctggcaagccaagagcatagggaacccaaacgcccagaaataatattcctgccctcagttgatttcggactggaaatctcaaagcagcgtttactgagcggtaattatagcttcattccagacgccatgacggccaccgaaaagattctgtttctcagcagtatcattccctttgactgtctgttaacggtgcgcgccctgggtgggttgctcaagtttctaggccgacgcagaattggagtggaattggaggactataatgtcagcgtgcctattctgggctttaagaagttcatgctgacccacctggtgaacatcgaccaggacacctacagtgtgcttcagatttttaagtcagagtcacatccttcagtctataaagtagcgtctggattaaaagagggcctgtccctgttcggcatcctgaaccgatgtcactgcaagtggggcgagaagctgttgaggctgtggttcacacgaccaacccatgatctgggcgagctgtcgagcaggctcgatgtcatccaatttttcctgttgccccagaatctcgacatggcacaaatgctgcacaggctgctcggccacattaagaacgttccactgatcctgaagcggatgaaactgtcccacacgaaggtgtcagattggcaagtgctgtacaaaacagtttattcggctctcggactgagagacgcgtgtaggtccctccctcagtcaattcaactgtttcgcgacattgcccaggaattcagcgatgacctgcaccatattgcctcactgattggtaaggtcgtggacttcgagggatcactagcagaaaaccgctttaccgtgcttcccaatatagacccggagatagatgaaaaaaagagacgattgatgggtctgccgagcttccttactgaagtcgcccgaaaagagctcgagaatttagattccaggatcccaagttgcagcgtgatttacatccccctcatcggtttcctgctcagcattcctaggttgccttctatggtggaggcctcagattttgaaattaacggtctggactttatgttcctttcagaagaaaagcttcactatcgctcagcacgaacaaaggagctggacgccctgctaggagaccttcattgcgaaatcagagaccaggagactctcttaatgtaccagttgcagtgtcaggtccttgctcgggccgccgtgctgactcgcgtgctcgatctagccagcagattagatgttctgcttgctctcgccagcgccgccagagactatgggtactcgcggccaaggtattcaccacaggtacttggagtccgcattcagaacggccggcatcccttgatggagctctgtgcccgcacctttgtacctaattctaccgagtgtggaggagataaagggagggtaaaggtcatcacaggtccaaatagctccggcaaatctatttacctcaaacaggtggggttgattaccttcatggctttggttggatcatttgtgcccgcagaagaagccgaaatcggcgccgtggatgctatatttacgcgcatacattcatgtgagagcattagtctgggactcagtacatttatgatcgatctgaatcaacaggtggctaaggctgtcaacaacgccactgcccaaagtcttgttctgatcgatgagtttggtaaggggacaaacaccgttgatgggctcgcgctccttgccgccgtattaagacactggctggcacggggacccacatgtcctcatattttcgtggccaccaactttctcagcttggtgcagctgcaactccttccccagggacctctagttcaatatctcacaatggaaacctgcgaggacggtaatgatctcgttttcttttaccaggtctgcgagggggtggcaaaggcctctcatgctagccacacagctgcccaagctgggctgcctgataagctcgtggcaagaggcaaggaagtgtccgacttgattaggagcggcaaaccaataaaaccagtgaaggatctgctgaagaagaatcagatggaaaattgccagaccctggtggataaatttatgaagctagatttggaagatccaaacctggatctgaatgtgtttatgtctcaagaggttctaccagcggccactagtattctttag

SEQ ID NO: 248250 - DNA, 2708 bp, Artificial Sequence
  derived and/or modified sequence
gcggtcggtcagcggggcgttctcccacctgtagcgactcagagcctccaagctcatggcctccttaggagcgaacccaaggaggacaccgcagggaccgagacctggggcggcctcctccggcttccccagcccggccccagtgccgggccccagggaggccgaggaggaggaagtcgaggaggaggaggagctggccgagatccatctgtgtgtgctgtggaattcaggatacttgggcattgcctactatgatactagtgactccactatccacttcatgccagatgccccagaccacgagagcctcaagcttctccagagagttctggatgagatcaatccccagtctgttgttacgagtgccaaacaggatgagaatatgactcgatttctgggaaagcttgcctcccaggagcacagagagcctaaaagacctgaaatcatatttttgccaagtgtggattttggtctggagataagcaaacaacgcctcctttctggaaactactccttcatcccagacgccatgactgccactgagaaaatcctcttcctctcttccattattccctttgactgcctcctcacagttcgagcacttggagggctgctgaagttcctgggtcgaagaagaatcggggttgaactggaagactataatgtcagcgtccccatcctgggctttaagaaatttatgttgactcatctggtgaacatagatcaagacacttacagtgttctacagatttttaagagtgagtctcacccctcagtgtacaaagtggccagtggactgaaggaggggctcagcctctttggaatcctcaacagatgccactgtaagtggggagagaagctgctcaggctatggttcacacgtccgactcatgacctgggggagctcagttctcgtctggacgtcattcagttttttctgctgccccagaatctggacatggctcagatgctgcatcggctcctgggtcacatcaagaacgtgcctctgattctgaaacgcatgaagttgtcccacaccaaggtcagcgactggcaggttctctacaagactgtgtacagtgccctgggcctgagggatgcctgccgctccctgccgcagtccatccagctctttcgggacattgcccaagagttctctgatgacctgcaccatatcgccagcctcattgggaaagtagtggactttgagggcagccttgctgaaaatcgcttcacagtcctccccaacatagatcctgaaattgatgagaaaaagcgaagactgatgggacttcccagtttccttactgaggttgcccgcaaggagctggagaatctggactcccgtattccttcatgcagtgtcatctacatccctctgattggcttccttctttctattccccgcctgccttccatggtagaggccagtgactttgagattaatggactggacttcatgtttctctcagaggagaagctgcactatcgtagtgcccgaaccaaggagctggatgcattgctgggggacctgcactgcgagatccgggaccaggagacgctgctgatgtaccagctacagtgccaggtgctggcacgagcagctgtcttaacccgagtattggaccttgcctcccgcctggacgtcctgctggctcttgccagtgctgcccgggactatggctactcaaggccgcgttactccccacaagtccttggggtacgaatccagaatggcagacatcctctgatggaactctgtgcccgaacctttgtgcccaactccacagaatgtggtggggacaaagggagggtcaaagtcatcactggacccaactcatcagggaagagcatatacctcaaacaggtaggcttgatcacattcatggccctggtaggcagctttgtgccagcagaggaggccgaaattggggcagtagacgccatcttcacacgaattcatagctgcgaatccatctcccttggcctctccaccttcatgatcgacctcaaccagcaggtggcgaaagcagtgaacaatgccactgcacagtcgctggtccttattgatgaatttggaaagggaaccaacacggtggatgggctcgcgcttctggccgctgtgctccgacactggctggcacgtggacccacatgcccccacatctttgtggccaccaactttctgagccttgttcagctacaactgctgccacaagggcccctggtgcagtatttgaccatggagacctgtgaggatggcaacgatcttgtcttcttctatcaggtttgcgaaggtgttgcgaaggccagccatgcctcccacacagctgcccaggctgggcttcctgacaagcttgtggctcgtggcaaggaggtctcagacttgatccgcagtggaaaacccatcaagcctgtcaaggatttgctaaagaagaaccaaatggaaaattgccagacattagtggataagtttatgaaactggatttggaagatcctaacctggacttgaacgttttcatgagccaggaagtgctgcctgctgccaccagcatcctctgagagtccttccagtgtcctccccagcctcctgagactccggtgggctgccatgccctctttgtttccttatctccctcagacgcagagtttttagtttctctagaaattttgtttcatattaggaataaagtttattttgaagaaa

SEQ ID NO: 248251 - DNA, 2708 bp, Artificial Sequence
  derived and/or modified sequence
gcggtcggtcagcggggcgttctcccacctgtagcgactcagagcctccaagctcatggcctccttaggagcgaacccaaggaggacaccgcagggaccgagacctggggcggcctcctccggcttccccagcccggccccagtgccgggccccagggaggccgaggaggaggaagtcgaggaggaggaggagctggccgagatccatctgtgtgtgctgtggaattcaggatacttgggcattgcctactatgatactagtgactccactatccacttcatgccagatgccccagaccacgagagcctcaagcttctccagagagttctggatgagatcaatccccagtctgttgttacgagtgccaaacaggatgagaatatgactcgatttctgggaaagcttgcctcccaggagcacagagagcctaaaagacctgaaatcatatttttgccaagtgtggattttggtctggagataagcaaacaacgcctcctttctggaaactactccttcatcccagacgccatgactgccactgagaaaatcctcttcctctcttccattattccctttgactgcctcctcacagttcgagcacttggagggctgctgaagttcctgggtcgaagaagaatcggggttgaactggaagactataatgtcagcgtccccatcctgggctttaagaaatttatgttgactcatctggtgaacatagatcaagacacttacagtgttctacagatttttaagagtgagtctcacccctcagtgtacaaagtggccagtggactgaaggaggggctcagcctctttggaatcctcaacagatgccactgtaagtggggagagaagctgctcaggctatggttcacacgtccgactcatgacctgggggagctcagttctcgtctggacgtcattcagttttttctgctgccccagaatctggacatggctcagatgctgcatcggctcctgggtcacatcaagaacgtgcctctgattctgaaacgcatgaagttgtcccacaccaaggtcagcgactggcaggttctctacaagactgtgtacagtgccctgggcctgagggatgcctgccgctccctgccgcagtccatccagctctttcgggacattgcccaagagttctctgatgacctgcaccatatcgccagcctcattgggaaagtagtggactttgagggcagccttgctgaaaatcgcttcacagtcctccccaacatagatcctgaaattgatgagaaaaagcgaagactgatgggacttcccagtttccttactgaggttgcccgcaaggagctggagaatctggactcccgtattccttcatgcagtgtcatctacatccctctgattggcttccttctttctattccccgcctgccttccatggtagaggccagtgactttgagattaatggactggacttcatgtttctctcagaggagaagctgcactatcgtagtgcccgaaccaaggagctggatgcattgctgggggacctgcactgcgagatccgggaccaggagacgctgctgatgtaccagctacagtgccaggtgctggcacgagcagctgtcttaacccgagtattggaccttgcctcccgcctggacgtcctgctggctcttgccagtgctgcccgggactatggctactcaaggccgcgttactccccacaagtccttggggtacgaatccagaatggcagacatcctctgatggaactctgtgcccgaacttttgtgcccaactccacagaatgtggtggggacaaagggagggtcaaagtcatcactggacccaactcatcagggaagagcatatacctcaaacaggtaggcttgatcacattcatggccctggtaggcagctttgtgccagcagaggaggccgaaattggggcagtagacgccatcttcacacgaattcatagctgcgaatccatctcccttggcctctccaccttcatgatcgacctcaaccagcaggtggcgaaagcagtgaacaatgccactgcacagtcgctggtccttattgatgaatttggaaagggaaccaacacggtggatgggctcgcgcttctggccgctgtgctccgacactggctggcacgtggacccacatgcccccacatctttgtggccaccaactttctgagccttgttcagctacagctgctgccacaagggcccctggtgcagtatttgaccatggagacctgtgaggatggcaacgatcttgtcttcttctatcaggtttgcgaaggtgttgcgaaggccagccatgcctcccacacagctgcccaggctgggcttcctgacaagcttgtggctcgtggcaaggaggtctcagacttgatccgcagtggaaaacccatcaagcctgtcaaggatttgctaaagaagaaccaaatggaaaattgccagacattagtggataagtttatgaaactggatttggaagatcctaacctggacttgaacgttttcatgagccaggaagtgctgcctgctgccaccagcatcctctgagagtccttccagtgtcctccccagcctcctgagactccggtgggctgccatgccctctttgtttccttatctccctcagacgcagagtttttagtttctctagaaattttgtttcatattaggaataaagtttattttgaagaaa

SEQ ID NO: 248252 - DNA, 2508 bp, Artificial Sequence
  derived and/or modified sequence
atggccagcctgggcgccaaccccaggaggaccccccagggccccaggcctggagctgccagcagcggcttccccagccctgcccctgtgcccggcccccgggaggccgaggaggaggaggtggaggaggaggaggagctggccgagatccacctgtgtgtgctgtggaacagcggctacctgggcatcgcctactatgacaccagtgacagcaccatccacttcatgccagatgccccagaccacgagagcctgaagctgctgcagagggtgctggatgagatcaacccccagagcgtggtgaccagcgccaagcaggatgagaacatgacccgcttcctgggcaagctggccagccaggagcaccgggagcccaagaggcctgagatcatcttcctgcccagcgtggactttggcctggagatcagcaagcagaggctgctgagcggcaactacagcttcatcccagatgccatgacagccacagagaagatcctcttcctgagcagcatcatcccctttgactgcctgctgactgtgcgggccctgggcggcctgctgaagttcctgggcagaagaagaattggagtggagctggaggactacaacgtgtctgtgcccatcctgggcttcaagaagttcatgctgacccacctggtgaacatcgaccaggacacctacagcgtgctgcagatcttcaagtctgagagccaccccagcgtgtacaaggtggccagcggcctgaaggagggcctgagcctgtttggcatcctgaaccgctgccactgcaagtggggcgagaagctgctgcggctgtggttcacccggcccacccatgacctgggggagctgagcagccggctggatgtgatccagttcttcctgctgccccagaacctggacatggcccagatgctgcaccggctgctgggccacatcaagaatgtgcccctcatcctgaagaggatgaagctgagccacaccaaggtgtctgactggcaggtgctgtacaagacagtgtacagcgccctgggcctgagagatgcctgccgcagcctgccccagagcatccagctgttccgggacatcgcccaggagttcagtgatgacctgcaccacatcgccagcctcatcggcaaggtggtggactttgagggcagcctggccgagaaccgcttcaccgtgctgcccaacattgatcctgagattgatgagaagaagaggcggctgatgggcctgcccagcttcctgacagaggtggccaggaaggagctggagaacctggacagccgcatccccagctgcagcgtcatctacatccccctgattggcttcctgctgagcatcccccggctgcccagcatggtggaggccagtgactttgagatcaatggcctggacttcatgttcctgtctgaggagaagctgcactaccgcagcgcccggaccaaggagctggatgccctgctgggggacctgcactgtgagatccgggaccaggagaccctgctgatgtaccagctgcagtgccaggtgctggcccgggctgctgtgctgaccagggtgctggacctggccagccggctggatgtgctgctggccctggccagcgctgcccgggactatggctacagccggccccgctacagcccccaggtgctgggcgtgcgcatccagaatggccgccaccccctgatggagctgtgtgcccggacctttgtgcccaacagcacagaatgtggcggggacaagggccgggtgaaggtgatcaccggccccaacagcagcggcaagagcatctacctgaagcaggtgggcctcatcaccttcatggccctggtgggcagctttgtgcctgctgaggaggccgagattggagctgtggatgccatcttcacccgcatccacagctgtgagagcatcagcctgggcctgagcaccttcatgattgacctgaaccagcaggtggccaaggctgtgaacaatgccacagcccagagcctggtgctgattgatgaatttgggaagggcaccaacacagtggatggcctggccctgctggccgctgtgctgcggcactggctggcccggggccccacctgcccccacatctttgtggccaccaacttcctgagcctggtgcagctgcagctgctgccccagggccccctggtgcagtacctgaccatggagacctgtgaagatggaaatgacctggtgttcttctaccaggtgtgtgagggcgtggccaaggccagccacgccagccacacagctgcccaggccggcctgcctgacaagctggtggcccggggcaaggaggtgtctgacctgatccgcagcggcaagcccatcaagcctgtgaaggacctgctgaagaagaaccagatggagaactgccagaccctggtggacaagttcatgaagctggacctggaggaccccaacctggacctgaatgtgttcatgagccaggaggtgctgcctgctgccaccagcatcctgtag

SEQ ID NO: 248253 - DNA, 2508 bp, Artificial Sequence
  derived and/or modified sequence
atggccagcctgggcgccaacccccggcggaccccccagggccccagaccaggggcggctagctctggttttccatcacccgcaccagtacccggaccgcgtgaggctgaagaggaggaggtcgaagaggaggaggaactggctgagatccatttatgtgtcctctggaatagtggatacctgggcattgcctactatgacacaagcgattcgaccatccactttatgccagacgcccccgatcatgagtctcttaaattgcttcaacgggtcctggacgaaattaaccctcaaagtgtcgtgacctcagccaagcaggatgaaaacatgacacgtttcttggggaaattagcgagccaggaacacagggaacctaaacggcccgagatcatttttctgccttctgtagatttcgggctcgagatctcaaagcaaagactcctctctggcaattactcctttattccagatgccatgaccgcaacggagaagatcctttttctgtcctctattatcccatttgattgtctgttgaccgtgcgagctctgggaggtctgctaaagtttctgggcaggcgacggattggggtggaactggaggattataacgtgtctgtaccaatactggggttcaagaaattcatgttaactcacctagtgaacattgatcaggatacctactctgtgctccagattttcaagagcgagagtcacccatcagtgtacaaggtcgcctccggcctcaaagaaggtctctctctctttgggattctcaacaggtgccattgcaagtggggagagaagcttctaagactgtggttcactagacccacccacgacctgggcgagctgtcgtcaagactagacgtaatccagttctttctgctcccccagaacctcgacatggctcaaatgctgcatagactgctgggccacataaagaacgtgcccttaatcctgaagcgaatgaagttgagccatactaaggtttctgattggcaggtcctatacaagacagtgtatagcgcactgggcttgcgcgatgcgtgtcgctccctcccccagtccattcagctgttccgagatatcgctcaagaattttcagatgaccttcaccatatagcctctctcatcggcaaggtggtggacttcgagggtagcttggcagagaataggttcacggttcttcctaatatcgacccagagattgatgaaaagaagaggcggttgatgggactgccctcattcctcacagaggtggcccgtaaggagcttgaaaaccttgatagtagaatcccatcatgcagcgtaatatatatcccactgattgggttcctcttgtccattccaagactgcctagcatggtggaggctagcgatttcgagatcaatgggctagattttatgttcctgtctgaggagaaattgcactaccggtcggccaggactaaggaattagatgcacttcttggggatcttcattgtgagatcagagaccaggagactcttctgatgtaccagctccagtgtcaggtgttggcaagagcggccgtgctcacaagggttttagatctggcgtcacgccttgacgtgctgttggctctggcgagcgcagcgcgggactacgggtactctcgaccacgctacagtccgcaggtgcttggtgtgaggatccaaaatgggcgccatcctctcatggagctgtgcgcacggacatttgtcccaaatagcactgaatgtgggggggacaaaggccgggttaaagtcattacaggtccgaactcctccggcaaatccatctatctcaaacaggttgggcttatcactttcatggcattggtcggtagtttcgttcctgctgaggaagcagagattggagcagtggatgccatttttacacgcatacatagctgcgagagcattagcctcggtttgagtactttcatgatcgatctcaaccagcaggtggcaaaagccgtgaacaatgctacggcacagagcctggtcctgattgacgagttcggaaaaggaactaacaccgtcgacggccttgctctcctcgctgccgtgcttagacattggctcgcacgcgggccaacttgtccacacatcttcgtggcaactaattttctatcacttgtgcagttgcagcttttgccccaaggtccactggtgcaatacctcaccatggaaacctgcgaggacggcaacgaccttgtgtttttttaccaggtatgtgaaggcgtggcgaaggcctctcatgcttcccatacagccgcacaggcgggtctaccagacaagctggtggcccgagggaaggaggtaagtgatctgattcggagcggtaaacctattaagcccgtgaaagacttgctgaagaagaatcagatggaaaattgtcagactctggtagacaaatttatgaaactggacctggaagaccccaacctcgacttgaatgtgttcatgagtcaagaggtccttcccgccgccacttccattctgtag

SEQ ID NO: 248254 - DNA, 2508 bp, Artificial Sequence
  derived and/or modified sequence
atggccagcctgggcgccaacccccggcggaccccccagggccccaggccaggggctgcgagttccggctttccctcccctgcccccgtgcctgggccgcgcgaagccgaagaggaggaggtcgaggaggaagaggagttagccgagattcacttgtgtgttttgtggaacagcggttacctaggcatagcctactacgacaccagcgactccactatccactttatgcctgacgccccagaccacgaaagtctgaaactgttgcagcgggtcctggatgaaattaacccacagtctgtcgtgacttctgccaagcaggatgaaaacatgacaagattcctgggcaagctggcttcacaggaacaccgagagcccaagcggccggaaattatcttcctcccgtcagttgacttcggcctggagatatcgaaacagagattgttgtccggaaactattccttcatacctgacgccatgactgctactgagaaaattctgtttttgagctccataataccgttcgactgcttgctgacagttcgcgccctcggcggactgttaaaatttctcggacggcgccgaatcggagtggagctcgaggactataacgtttcagtgcctatccttggcttcaagaaattcatgctgacccatctcgtcaacatcgatcaggacacatacagcgttttgcagatatttaaatcagagagccacccgtcagtttacaaggtcgcctctggcttgaaggagggactgtccctgtttggaattctcaacaggtgccactgtaaatggggcgagaaactcctcaggctgtggttcacgcgtcccacacacgatctgggggagttgtcctcccgcttagacgttattcagttcttcctgctgccgcagaacctggacatggcacagatgctgcataggctcttgggccacataaaaaatgtgccattaattctgaagaggatgaagcttagccacacaaaggtgtctgattggcaggtcctctataagacagtctactctgcactgggcctcagggacgcttgtcgctcacttccccagagcattcagttgttccgcgatatcgcccaggaattctccgatgacctccaccatattgcctcacttatcggcaaggtggtggatttcgagggctccctcgccgagaacaggttcacagtcttaccaaatatagaccccgagatcgacgagaaaaagcggcgtctgatggggctgcctagtttccttactgaggtagcccggaaagagctggagaatctcgattctaggattccctcctgttctgttatttatattcctctgattgggttcctcctctcaatcccacgcttgccgtctatggtggaagcctctgacttcgagattaacggccttgactttatgttcctttccgaagagaaattgcattataggtctgcgcgaaccaaggagttggacgcactgctcggtgacttgcactgtgagatccgggaccaggagacgcttttgatgtatcaactgcagtgtcaagtcttggcaagagctgctgtcctcacaagggtgctggatctggctagcaggctggatgttttgctggcccttgctagtgctgcacgtgactacgggtacagccgacctcggtactcgccacaagtgctcggggttaggattcagaacggtagacatccccttatggagctgtgcgcccggacttttgtgccaaattctacagagtgcggtggcgataaggggagggtcaaggtcattactggaccaaactcttccggtaagagcatttatctgaaacaggttggactgatcacctttatggctctggtgggtagttttgtgcctgccgaagaggccgagattggggccgtcgatgccattttcacccgcattcactcttgtgagtccatctcacttggcttgtccaccttcatgatcgatcttaaccagcaggtggctaaggcggtcaataatgccaccgcccagtccttggtgctcattgatgaattcggaaagggtaccaacacagtggatggtctggccctactcgcggccgttctgcgacactggcttgccaggggacccacatgccctcatatctttgttgctactaattttttatcactggtgcaactacaattgctgccgcaggggcccctggtccagtatttgactatggaaacatgcgaggacggaaatgacttggtgtttttctaccaggtttgtgagggagttgctaaagcctcacacgcctcccatactgcggctcaggcgggtctgccggacaagcttgtagcaagaggtaaagaagttagcgatctcatacgctcaggcaagcctattaagcccgtgaaggatctcctgaaaaaaaatcaaatggaaaactgtcagacgctggttgataagtttatgaagctggatttggaggatcctaaccttgatctgaacgtgttcatgtcccaagaagtgctgccggccgccacctctatcctgtag

SEQ ID NO: 248255 - DNA, 2508 bp, Artificial Sequence
  derived and/or modified sequence
atggccagcctgggcgccaacccccggcggaccccccagggccccaggccaggagctgcgtcgtccgggttcccttcccctgctccggtgcccggcccaagagaagcagaggaggaagaagttgaagaagaggaagaactggccgaaattcacttgtgtgtcctctggaatagtggctacttggggatcgcctactacgacacctccgacagcactattcatttcatgcctgatgccccagatcacgaatcactgaagctcttgcagcgtgtgctcgacgagatcaaccctcagtccgtcgttacgtctgcaaagcaggatgaaaacatgacgcggtttctagggaagctggcatctcaggagcatagagaaccgaaaagaccagagatcattttcctgcctagcgtggactttggcctggagatctcaaaacagcggctgttgtccggaaactactcatttatcccggacgcaatgacagccacggagaagatcctgttcctgagttctatcatcccctttgattgcctgttgaccgtgagagccctgggcggcctgctgaagttcttagggcgaagacgcatcggagtcgagctggaagactacaacgtgtctgtgccaatattggggtttaaaaaatttatgctgactcatctcgtgaacatagaccaagacacttacagcgttctccaaatttttaaatctgagtctcacccgtccgtgtacaaagtcgcatcggggttgaaggaagggctgagcctgttcggaattctgaatcgttgccattgtaaatggggggaaaaattgctgaggctgtggttcaccaggccaacacacgacctaggggagctctccagtaggttggatgtgatacagttcttccttctgcctcagaacctggatatggcacagatgctccacagattactcgggcacatcaagaatgtccctttgatcttgaagagaatgaagctatcccacacaaaagtcagtgattggcaagtgctatataagaccgtgtactcggcattggggttgcgcgatgcatgcaggtcactgccccaatcaatccaactgtttagagacattgctcaggaattttccgatgacctgcaccacatcgcttccctaatcgggaaggtcgtcgacttcgagggtagcctcgctgaaaatagatttaccgtgctgccaaatatagatcctgaaattgatgagaagaagcgtaggctgatgggtctcccaagctttcttactgaggtcgctcgcaaagaactggagaacctagactctcgtatcccatcctgtagcgtgatctacatcccactaattggcttcctcctgtccatcccgcgcctgccttccatggtcgaggcctctgatttcgagattaacggcctagacttcatgtttctgagtgaggagaaactgcactatcggtccgcccgaaccaaggagctcgacgccctgctgggagacctgcactgtgagatcagagaccaggagacactcctcatgtaccagctacaatgtcaagtcttagcaagagccgccgtgctgactcgggtcctggacctggcatcaaggctggacgtgttacttgcgctagcctcagcagcgagggattacggctattcacgaccgcgctactctccccaggtgcttggcgtccggatccagaatggtcggcatccccttatggagctctgtgccagaaccttcgtgccaaatagcacagaatgtggtggggacaagggtcgcgtgaaagtgattacaggacccaacagcagtggcaagtccatttacctcaaacaggtcggactcattacgtttatggctctcgtgggctctttcgtgcccgccgaggaagctgaaatcggcgccgttgacgccatctttacaaggattcatagctgcgaaagcattagtttaggtttgagcacgtttatgattgaccttaaccagcaggtggctaaagccgtaaataacgccaccgcccagtctctagttctgatcgacgagtttgggaaaggcacaaacacagttgatggtctcgccctgctcgctgcagtgttgagacactggctggctagagggcctacctgtcctcacatatttgtggctacgaacttcttgtcactagtccagctgcagttgctgcctcaggggcctctcgtgcagtaccttactatggagacttgcgaggatggtaatgatcttgtctttttttaccaggtctgcgagggagtcgccaaagcaagccatgcctcacatactgctgcccaggccggactacctgataagctcgtggcgagaggaaaggaggtaagtgatttgataaggtccggtaagcctattaagccagttaaagatctgcttaaaaagaaccagatggaaaattgccagacactggtggacaagtttatgaaacttgacctcgaggacccaaatttggacctgaatgttttcatgtcgcaggaggttctgccagccgctacttccatcctttag

SEQ ID NO: 248256 - DNA, 2508 bp, Artificial Sequence
  derived and/or modified sequence
atggccagcctgggcgccaacccccggcggaccccccagggccccagacctggcgccgcttctagcggctttcccagccccgccccagtccccggaccaagggaagccgaggaagaggaggtagaggaagaagaggagctggctgaaattcacctgtgcgttctctggaatagtggatacttgggcatcgcttactacgacacttctgactcaaccattcatttcatgccggacgcccccgatcatgaatccctgaagcttctccagcgcgtcctagacgaaatcaatcctcagtctgtggttacaagtgccaaacaagatgagaacatgacccggttcctgggaaagctggccagccaggaacatcgcgaacccaagcggcccgaaattatatttctgccaagtgttgatttcgggctggagattagtaagcagaggctactgagcgggaactatagctttatccccgacgctatgactgccacagaaaagatcctcttcttatcttctatcatcccattcgattgtctgttgaccgtccgggctctaggtggcttactgaagttcctcggcagacgacgcataggagtggaactcgaggattataatgtctccgtgccaattctggggtttaagaaatttatgctgacccatttggtcaatatcgatcaggatacttatagtgtcctgcaaatatttaaaagcgaatcacatccttctgtctacaaggttgcatcgggtctgaaagaaggtctgagcctcttcgggatcttgaacagatgccattgtaaatggggtgagaagctcttgaggctctggttcactcggccaacacatgacctgggagaactaagtagcaggcttgacgtgatccagttcttccttcttccccaaaatttggatatggcacagatgctgcatcgcctgctgggacatattaagaacgttcctttgattctcaaaaggatgaagctttcccacaccaaagtttcggattggcaggttttatataaaactgtctatagcgcactaggcctaagggatgcctgccggtccctgccacagtccatacaattatttagggatattgcgcaggaattctcagacgatctacaccatattgccagcctgatcggcaaggtcgtggactttgaggggtccctggctgagaacagatttaccgtgctgcccaatattgaccctgagatagatgagaaaaaaaggagactgatgggactgccaagcttcctcaccgaggtcgctcggaaggagctggagaaccttgacagccgcatccctagttgctccgtcatctacatcccactgattggatttcttctgagtatacctcgtctcccctctatggtcgaggcatctgacttcgaaatcaacggattggattttatgttcctgagcgaagagaaattacattatagaagtgccaggacgaaggaacttgatgccctactgggcgatctgcactgcgaaatacgcgaccaagaaaccctcctgatgtaccaactccagtgccaagttctggcacgagctgccgtgcttacacgagtcctggacctcgcgagtcgcttggacgtcctccttgctttggcctcagcagcaagggattacggctacagcagacccaggtacagcccacaggttctgggtgttcgcatacaaaatgggcgtcacccactgatggagctatgcgctaggaccttcgtcccaaactccaccgagtgcggcggcgacaaaggccgggtcaaggttattacaggacccaactcaagcggtaagtctatctatctcaaacaggtcggtttgatcacctttatggctctcgtgggtagtttcgtgccagcagaagaagccgagataggcgccgttgacgcgatttttacaaggatccactcctgtgaatcaatctcactggggctgtctaccttcatgatcgatttgaatcagcaagtggccaaggctgtgaataatgcaaccgcacagtctctggtgttaatcgatgagttcggaaaaggcacaaacaccgtggatggtctggcactgctggcggctgttctgcgtcactggcttgcaagaggccctacctgtccacatatttttgttgccaccaatttcctgagccttgtgcaactgcaattgctgccccaagggcccctggtgcagtatcttaccatggaaacgtgtgaagatggaaacgacttggtgtttttttaccaggtgtgcgagggtgtggccaaggcttctcacgccagtcacaccgctgcacaggccgggctcccagacaagctcgtcgcgcggggcaaagaggtttccgacctcatacgctctggtaaacccataaagcctgtgaaggatcttcttaaaaaaaaccagatggaaaattgccaaactctcgtagacaagttcatgaagctcgaccttgaggatcccaatttggatctaaatgtgtttatgagccaggaggtgcttcccgctgccacaagcatattatag

SEQ ID NO: 248257 - DNA, 2508 bp, Artificial Sequence
  derived and/or modified sequence
atggccagtctgggggcaaatccgaggcgtaccccacaggggcctcgccctggtgctgcctccagcggttttcccagcccggctccagttcccggtcccagagaagcggaagaggaagaggtcgaggaagaggaagaactggcagagatacacctgtgcgtgctctggaacagtggttacctcggaatagcttactatgacacgtcggatagcaccattcactttatgcccgacgcacccgatcacgaatccctgaaattgcttcagagggtgctcgatgagatcaatccccagtcagttgtgacgagtgcaaagcaggatgagaatatgaccaggtttctggggaaactggcttctcaggagcacagagagcctaagcgtccagaaataatcttcctgcccagtgtggacttcggccttgaaatcagcaaacagcgactgctgtctgggaactactcttttatccccgacgcgatgacggccacagagaaaatcctctttctgtccagcatcattccatttgactgcctgctaactgtccgagcactcggcggtctgctcaagttcctcgggaggaggcgtattggggtcgaactcgaggactataatgtatcggtgcccatcctggggttcaagaagttcatgcttacacacctggtgaacattgaccaggatacctactccgtgctgcagatctttaagtccgaaagtcacccatcggtctacaaggtggctagcgggttgaaggagggcctgagtctatttgggattcttaaccggtgccattgtaagtggggggagaaacttttgcgcctttggttcacaagaccaacccacgacctgggcgaactgtcctccagattggatgtcattcaattttttcttctccctcagaacctggacatggcccagatgctgcaccgactgctgggccacatcaagaacgtacccttaatcttgaaacgcatgaaactgagccacacaaaggtgagcgactggcaagtgctgtacaaaaccgtatactccgccctggggctcagagatgcttgtaggtccctcccccagtctattcagctcttccgggacatcgcacaggaattttctgacgatctgcatcacatcgcttctctcattggcaaggtggtggacttcgagggctctttagcagagaacagatttacagtcctacccaacatcgaccccgagattgacgaaaagaaacgtcgcttgatggggctcccgtcctttttgaccgaggtggcgcgaaaggaactagagaatctcgactctcgaatcccctcttgtagcgttatctacattcctctgatcggctttctgctctcgattcctagacttcccagcatggttgaagcctccgatttcgaaattaacggtcttgactttatgtttctgtccgaggaaaagcttcactacagaagcgcgaggacaaaggagcttgatgctctgctgggtgacttacactgtgagatcagagatcaggagacactgctgatgtatcaattacagtgtcaggtgctggctagggcagccgttctcactcgggtgctggacctggcaagccggctggatgtgttgttggcgctcgccagcgccgcacgggattatggatatagccgtcccagatacagtccgcaagtgttaggggttagaattcaaaatggacggcatccactcatggaactgtgtgccaggacctttgtccccaatagcacagaatgcggtggtgataaaggtagagttaaggtgattacgggcccaaattcaagcggcaaatctatctacctaaaacaagtagggttgatcacattcatggcgttggtgggctccttcgtccccgctgaagaggctgaaattggagcggtggatgccattttcacccgcatccatagttgtgagagcatctccctgggcctttcaacctttatgatcgacctgaatcaacaggtcgccaaggcagttaacaacgctacagcccagagcctcgttcttatagacgagtttggcaagggaactaacactgtagacgggctggccctgcttgccgcagtactgaggcattggctcgcgagaggacccacatgcccccacatttttgttgctactaattttctctccttggtgcagcttcaattgctccctcagggacctctcgtccagtacctcacaatggaaacatgcgaagatggcaacgacctcgtattcttttaccaggtctgtgaaggcgttgctaaagcctcacatgcaagccataccgccgctcaggccggactgcccgataagctcgtggccagaggaaaagaagttagtgacttaataagatcagggaagccaattaagccagtgaaagacctgcttaaaaagaatcagatggagaattgccagacactagtggacaagtttatgaagctggatctcgaagatccaaatctagaccttaacgtgttcatgagtcaggaggttctcccagctgccactagtatcctttag

SEQ ID NO: 248258 - DNA, 2508 bp, Artificial Sequence
  derived and/or modified sequence
atggcttctcttggcgcaaatcctcgcagaacacctcaaggaccacgccctggcgcagcctcctcaggctttccgagtccggctccagtcccaggcccaagggaggcagaggaggaagaagtggaggaggaggaggagcttgcggagattcatctgtgtgtgctatggaatagcggctacttaggaattgcttactacgacacgtcggattcgacgatccacttcatgccagatgcaccagatcatgagtcactgaagttattacaaagggtcctggatgaaatcaaccctcagagcgtggtaacctctgctaagcaggacgagaacatgactaggtttctgggcaagttggcttctcaggaacatagagagcccaagcgcccagagattatcttcctgccctctgtggatttcggtcttgaaatttcgaaacaacgtctgctttctggcaattattcgttcatccccgacgccatgacagccacagagaaaattttattcctgtcgagcatcatccccttcgactgcctgctgaccgtgagggccctgggaggtctgttaaaattcctgggacgtcgaaggattggagtcgagctggaagactataacgtgtccgttccaatcttaggtttcaagaaatttatgctgacccatcttgtcaatattgaccaggacacttactccgtgctccaaattttcaaatctgaaagtcatccgagcgtgtacaaggtggcgtcaggcctaaaagaaggcctgagtctattcgggatcttaaatcggtgtcactgtaaatggggagagaaactgttgaggttgtggttcacccgtcccacgcacgacttaggggaactgtcgagtagattagatgtcatccaattcttcctattgccacagaatttggacatggcccaaatgctccacagactgctcggccacattaaaaacgtgcctctgattttgaaacgcatgaaattgtcccatacaaaagtgtcggattggcaagtgttatacaagacggtgtactccgctctcgggctgagagacgcttgccgctccctaccacagtcgatccagctgttccgtgacatcgcgcaggaatttagcgacgatctccatcatatcgccagccttatcgggaaggtggtcgacttcgagggcagcctggcggagaaccggttcactgtgttacccaacatcgacccagagatagacgagaagaagcggagattgatgggactcccgagcttcttaaccgaggttgctcgaaaagagctcgaaaacctcgatagtcgcatccccagctgctctgtcatctacatcccactcatcggatttctcctctccatccctagactgccatccatggtagaggcaagtgatttcgagattaacggcctggatttcatgtttctgagtgaagagaagttgcactataggtctgcgcgaacgaaagaactggacgcactgctgggtgatctgcactgtgagatcagggatcaagagactctgctgatgtatcagcttcaatgtcaagtactggcaagggccgcagtgctcacacgagtacttgatcttgcttcaagactagatgtactgcttgctctggcgtccgccgctcgcgactacgggtactcacgccctcgctacagccctcaggtacttggagtgagaatccagaacggtaggcacccgctgatggaactgtgtgctcgaacattcgtgccaaattccacggagtgcggcggagataagggtagggttaaggtgatcacaggaccaaactctagtggcaaaagtatctatctcaagcaagtgggactcatcactttcatggcactggtcggatcttttgtacctgctgaagaagcagagattggtgccgtggacgccattttcacaagaatacacagctgtgaatctatcagcctgggactgtccacgtttatgatagaccttaaccagcaggtggctaaggcggtcaacaatgcaactgctcagtctcttgtactaatcgatgaattcggaaagggtacaaacaccgttgatggacttgcccttctcgccgctgtgcttcgccattggctcgccagggggcctacatgcccacatatatttgtggcgaccaatttcctctcactcgtgcagctgcagctgctgcctcagggaccgcttgtccagtatttgactatggaaacatgcgaggacggcaacgatcttgtatttttctaccaggtctgcgagggagtagccaaggcatctcacgcaagtcacactgccgctcaagccggactacctgacaaattggtcgcaaggggaaaggaagtgagcgacctgattcgcagtggcaagccaatcaaacctgtgaaggatctgctcaaaaaaaatcagatggagaattgtcagaccctggtcgacaaattcatgaaactggaccttgaagaccccaacctcgacctaaatgtgttcatgagccaggaagtgttacccgctgccacaagcatattatag

SEQ ID NO: 248259 - DNA, 2508 bp, Artificial Sequence
  derived and/or modified sequence
atggcctctctaggcgcaaacccacggagaaccccccaaggcccacggcctggggcagctagtagtggatttccatctccagcgcctgtgccagggccacgcgaagccgaggaagaggaggtggaagaggaggaagagcttgccgagatacatctatgcgtgctgtggaactccgggtatcttgggatagcctactatgatacttcagattccactatccacttcatgccggacgcccctgatcacgaatcactgaaactcttgcagagggtgctagacgaaatcaacccccagagtgtggtgacctcggcaaaacaggacgagaatatgacccggtttttgggtaaactcgcatcccaggaacatcgggagccaaagcggccagagataatcttcctgccttccgtggacttcgggctagagatttcaaagcagaggctactgagcgggaactatagcttcatccccgacgctatgaccgcaacagagaaaatattgttcctgtcttctattataccctttgactgcttattgacagttagagctcttggcggattactgaagttcctgggccgtagaagaatcggcgtcgagttagaagattataatgtgtcagttcccattctaggtttcaagaagtttatgctgacacacctggtcaacattgatcaggacacttattcagtgctgcagatattcaagagtgagtcacatccgagcgtctacaaagtcgcctccggccttaaggaaggtctctctctgttcggaatactcaaccggtgccactgtaagtggggggagaagctactgcgcctgtggtttactcgccctacccacgatttgggcgaactgtctagcagactcgacgtcatccagttcttcctactcccacagaacttagatatggcacagatgctccatcgtcttctgggccacatcaaaaacgtcccacttattctgaaaaggatgaagctgagtcacaccaaggtgtcggattggcaggtgttgtataaaacagtgtattcagccttgggccttcgggacgcttgtcgtagcctgcctcagtctattcagttattccgggacattgcacaggagttctccgatgatctccaccatatagcgtcacttatcggcaaagtcgtggacttcgagggctcgctcgccgagaataggtttaccgtcctgcctaacatcgatccggagatcgacgagaaaaagcgtagacttatgggactgcccagtttcctcactgaagtcgccaggaaggaactggaaaacttggactctcgcatcccttcctgttcagtcatatacattcctctgataggattcctgttgtccataccccgtctgccaagcatggtggaagcctccgactttgaaattaatgggctggactttatgttcctcagcgaggagaagttacattataggtccgctcgcaccaaagaacttgatgccctcctgggagatctgcactgcgaaattcgtgatcaggaaaccttgctgatgtatcagctgcagtgccaggtgctcgccagggccgcagtactgacacgagtactggacttagcatcccgcctggatgtgttactcgctcttgcttcggcagcacgcgactacggctattcgagaccgaggtactctcctcaggtcttgggcgtgaggattcagaatggtcggcaccctctgatggaactgtgcgcccgaacgttcgtccccaactcgaccgaatgtggcggtgacaaaggcagggtaaaagtgatcacgggtcctaactctagcgggaaatctatctacctcaaacaagttgggcttataaccttcatggcgctggtcggttcattcgtgcctgctgaagaagctgaaataggggctgtggatgcaatttttaccaggatccacagctgcgagagtatcagcctgggcttgtccactttcatgatagatctaaaccagcaggtcgcaaaggccgtcaacaacgctactgctcagtccctggtcctgattgatgagtttggtaagggaaccaacacagtcgatggtctcgctctgctggctgccgttcttcggcattggctggctcggggaccaacctgcccgcacatcttcgtagccaccaacttcctatcactggtccagctgcagctgctgccccagggaccactcgtgcagtatttgactatggagacgtgcgaggacggtaatgatctcgtattcttctatcaagtgtgtgaaggcgtcgcaaaagcttcacacgctagtcatacggccgcacaggccggactgcctgacaaactggtagccaggggcaaggaggtgtccgacctgatacgatctggaaagcccataaagccggtgaaagatctcttaaagaaaaaccaaatggagaactgccagactctggtagacaagttcatgaaactggacttagaagacccaaatctggatctgaatgtatttatgtcgcaggaggtccttcctgctgccaccagtatcctttag

SEQ ID NO: 248260 - DNA, 2508 bp, Artificial Sequence
  derived and/or modified sequence
atggcttcccttggggctaatccaaggaggacgccacaagggccacggccaggggctgcgagctccggctttccgtcacctgcccctgttcctggccctcgggaagccgaagaggaggaggtggaagaggaagaagagttggcagagatccacctttgcgtcctctggaactcaggatacctgggaattgcgtactacgacacctcggattcaaccattcattttatgcctgatgcacccgatcacgagtccctaaagctgctccagcgagtgctggacgagattaacccgcagtccgtggtgacctcagctaaacaggatgaaaacatgacacgcttcctaggcaagctggcaagccaggaacaccgcgagcccaagaggccagaaatcattttccttccatctgttgactttggactagaaatcagcaaacagaggctgctgtctggcaattattccttcatcccagacgctatgacagccaccgagaagattttgttcctaagctcgatcatcccctttgactgtcttttgaccgtcagggcacttggaggactcctcaaatttttgggccgacgcagaataggagtggagctggaggactataatgtaagtgtgccaatactgggatttaagaaattcatgctcacccacctggtgaacattgatcaggatacttattctgtgctccagattttcaaatcagaatcacacccctcagtttataaagtcgcaagcggtttaaaagaggggctatccctgttcgggatcctgaaccgatgtcactgcaagtggggcgaaaaactcctgcgactttggttcacaagaccgacgcatgatcttggagaactaagcagccgcctagatgtgatccaatttttcctcctgccccagaacctagacatggcgcagatgctacaccgactgctcggccacattaaaaatgtgcccttaatcctcaagcggatgaaactgtcacacacaaaggtctccgattggcaggtgctctacaagacggtgtatagtgcgctcggactgcgcgacgcctgtcgctctctgccccagtctatacagctttttcgggacatcgcccaagaattcagcgatgatctgcatcacatagcttcccttatcggaaaagtcgtagacttcgaaggctcgctggccgaaaaccgatttaccgtcttacctaatatcgaccccgagattgacgaaaagaaacggcgtctgatgggcctgcctagtttcctaacagaggtcgcacggaaagaactcgagaatctggattcgcggatccctagttgttccgttatctacatccccctgatcgggttcctgttgtccatacctcgcctacccagtatggtggaggcatccgactttgaaattaacgggttggatttcatgttcttatccgaggaaaagcttcattacaggagtgcaagaacaaaggagctagatgccttgctgggtgatctgcattgcgagatcagagatcaggaaactctcttgatgtatcagttgcagtgccaagtcctggcaagagctgctgtgttaacccgcgttttggatctggctagccggctggatgtgctgctggctctcgctagcgcagccagggattacggctactcccgaccgcgatacagccctcaggtacttggggtgaggattcagaacgggcgtcatcctttgatggagttatgtgctcggacctttgtgcccaactccactgaatgcggaggagacaagggtcgtgtgaaagtgatcaccgggcctaattctagcggtaagtcaatatatctgaagcaggttggtttaattacatttatggcgcttgtgggcagcttcgtccccgcagaagaagcggagattggagccgtggacgccatcttcacgcgcatccattcctgcgaaagcatttctctggggctttctaccttcatgatcgacctcaatcagcaggtggccaaagccgtgaacaacgcaacggcgcagtctcttgtgctgatcgacgagtttggaaagggtactaacaccgtggatggcctggcactgctagccgcagttctgcggcactggctggcccgtgggccaacatgtccccacatcttcgttgccaccaattttctaagcttagtgcaactccagttgctgcctcaaggaccactcgtgcagtacctcaccatggaaacctgtgaggatggcaacgatttggtttttttttaccaagtgtgcgagggtgttgcaaaggcttcgcatgccagtcacaccgcagcccaggccggtcttcccgataaactggttgccaggggcaaagaggtgtcagatctcatcagatccggtaaacctatcaaacctgtaaaggacctgctgaaaaagaaccagatggaaaactgtcagacgctggtagataagttcatgaagctcgacctggaagaccctaatctggatctgaatgtcttcatgtcgcaggaggtgctcccggcagctacaagcatcctctag

SEQ ID NO: 248261 - DNA, 2508 bp, Artificial Sequence
  derived and/or modified sequence
atggccagcctgggcgccaaccccagaagaaccccccagggccccagacccggcgccgccagcagcggcttccccagccccgcccccgtgcccggccccagagaggccgaggaggaggaggtggaggaggaggaggagctggccgagatccacctgtgcgtgctgtggaacagcggctacctgggcatcgcctactacgacaccagcgacagcaccatccacttcatgcccgacgcccccgaccacgagagcctgaagctgctgcagagagtgctggacgagatcaacccccagagcgtggtgaccagcgccaagcaggacgagaacatgaccagattcctgggcaagctggccagccaggagcacagagagcccaagagacccgagatcatcttcctgcccagcgtggacttcggcctggagatcagcaagcagagactgctgagcggcaactacagcttcatccccgacgccatgaccgccaccgagaagatcctgttcctgagcagcatcatccccttcgactgcctgctgaccgtgagagccctgggcggcctgctgaagttcctgggcagaagaagaatcggcgtggagctggaggactacaacgtgagcgtgcccatcctgggcttcaagaagttcatgctgacccacctggtgaacatcgaccaggacacctacagcgtgctgcagatcttcaagagcgagagccaccccagcgtgtacaaggtggccagcggcctgaaggagggcctgagcctgttcggcatcctgaacagatgccactgcaagtggggcgagaagctgctgagactgtggttcaccagacccacccacgacctgggcgagctgagcagcagactggacgtgatccagttcttcctgctgccccagaacctggacatggcccagatgctgcacagactgctgggccacatcaagaacgtgcccctgatcctgaagagaatgaagctgagccacaccaaggtgagcgactggcaggtgctgtacaagaccgtgtacagcgccctgggcctgagagacgcctgcagaagcctgccccagagcatccagctgttcagagacatcgcccaggagttcagcgacgacctgcaccacatcgccagcctgatcggcaaggtggtggacttcgagggcagcctggccgagaacagattcaccgtgctgcccaacatcgaccccgagatcgacgagaagaagagaagactgatgggcctgcccagcttcctgaccgaggtggccagaaaggagctggagaacctggacagcagaatccccagctgcagcgtgatctacatccccctgatcggcttcctgctgagcatccccagactgcccagcatggtggaggccagcgacttcgagatcaacggcctggacttcatgttcctgagcgaggagaagctgcactacagaagcgccagaaccaaggagctggacgccctgctgggcgacctgcactgcgagatcagagaccaggagaccctgctgatgtaccagctgcagtgccaggtgctggccagagccgccgtgctgaccagagtgctggacctggccagcagactggacgtgctgctggccctggccagcgccgccagagactacggctacagcagacccagatacagcccccaggtgctgggcgtgagaatccagaacggcagacaccccctgatggagctgtgcgccagaaccttcgtgcccaacagcaccgagtgcggcggcgacaagggcagagtgaaggtgatcaccggccccaacagcagcggcaagagcatctacctgaagcaggtgggcctgatcaccttcatggccctggtgggcagcttcgtgcccgccgaggaggccgagatcggcgccgtggacgccatcttcaccagaatccacagctgcgagagcatcagcctgggcctgagcaccttcatgatcgacctgaaccagcaggtggccaaggccgtgaacaacgccaccgcccagagcctggtgctgatcgacgagttcggcaagggcaccaacaccgtggacggcctggccctgctggccgccgtgctgagacactggctggccagaggccccacctgcccccacatcttcgtggccaccaacttcctgagcctggtgcagctgcagctgctgccccagggccccctggtgcagtacctgaccatggagacctgcgaggacggcaacgacctggtgttcttctaccaggtgtgcgagggcgtggccaaggccagccacgccagccacaccgccgcccaggccggcctgcccgacaagctggtggccagaggcaaggaggtgagcgacctgatcagaagcggcaagcccatcaagcccgtgaaggacctgctgaagaagaaccagatggagaactgccagaccctggtggacaagttcatgaagctggacctggaggaccccaacctggacctgaacgtgttcatgagccaggaggtgctgcccgccgccaccagcatcctgtag

SEQ ID NO: 248262 - DNA, 2187 bp, Artificial Sequence
  derived and/or modified sequence
atggccagcctgggcgccaaccccagaagaaccccccagggccccagacccggcgccgccagcagcggcttccccagccccgcccccgtgcccggccccagagaggccgaggaggaggaggtggaggaggaggaggagctggccgagatccacctgtgcgtgctgtggaacagcggctacctgggcatcgcctactacgacaccagcgacagcaccatccacttcatgcccgacgcccccgaccacgagagcctgaagctgctgcagagagtgctggacgagatcaacccccagagcgtggtgaccagcgccaagcaggacgagaacatgaccagattcctgggcaagctggccagccaggagcacagagagcccaagagacccgagatcatcttcctgcccagcgtggacttcggcctggagatcagcaagcagagactgctgagcggcaactacagcttcatccccgacgccatgaccgccaccgagaagatcctgttcctgagcagcatcatccccttcgactgcctgctgaccgtgagagccctgggcggcctgctgaagttcctgggcagaagaagaatcggcgtggagctggaggactacaacgtgagcgtgcccatcctgggcttcaagaagttcatgctgacccacctggtgaacatcgaccaggacacctacagcgtgctgcagatcttcaagagcgagagccaccccagcgtgtacaaggtggccagcggcctgaaggagggcctgagcctgttcggcatcctgaacagatgccactgcaagtggggcgagaagctgctgagactgtggttcaccagacccacccacgacctgggcgagctgagcagcagactggacgtgatccagttcttcctgctgccccagaacctggacatggcccagatgctgcacagactgctgggccacatcaagaacgtgcccctgatcctgaagagaatgaagctgagccacaccaaggtgagcgactggcaggtgctgtacaagaccgtgtacagcgccctgggcctgagagacgcctgcagaagcctgccccagagcatccagctgttcagagacatcgcccaggagttcagcgacgacctgcaccacatcgccagcctgatcggcaaggtggtggacttcgagggcagcctggccgagaacagattcaccgtgctgcccaacatcgaccccgagatcgacgagaagaagagaagactgatgggcctgcccagcttcctgaccgaggtggccagaaaggagctggagaacctggacagcagaatccccagctgcagcgtgatctacatccccctgatcggcttcctgctgagcatccccagactgcccagcatggtggaggccagcgacttcgagatcaacggcctggacttcatgttcctgagcgaggagaagctgcactacagaagcgccagaaccaaggagctggacgccctgctgggcgacctgcactgcgagatcagagaccaggagaccctgctgatgtaccagctgcagtgccaggtgctggccagagccgccgtgctgaccagagtgctggacctggccagcagactggacgtgctgctggccctggccagcgccgccagagactacggctacagcagacccagatacagcccccaggtgctgggcgtgagaatccagaacggcagacaccccctgatggagctgtgcgccagaaccttcgtgcccaacagcaccgagtgcggcggcgacaagggcagagtgaaggtgatcaccggccccaacagcagcggcaagagcatctacctgaagcaggtgggcctgatcaccttcatggccctggtgggcagcttcgtgcccgccgaggaggccgagatcggcgccgtggacgccatcttcaccagaatccacagctgcgagagcatcagcctgggcctgagcaccttcatgatcgacctgaaccagcaggtggccaaggccgtgaacaacgccaccgcccagagcctggtgctgatcgacgagttcggcaagggcaccaacaccgtggacggcctggccctgctggccgccgtgctgagacactggctggccagaggccccacctgcccccacatcttcgtggccaccaacttcctgagcctggtgcagctgcagctgctgccccagggccccctggtgcagtacctgtag

SEQ ID NO: 248263 - DNA, 1494 bp, Artificial Sequence
  derived and/or modified sequence
accgtgtacagcgccctgggcctgagagacgcctgcagaagcctgccccagagcatccagctgttcagagacatcgcccaggagttcagcgacgacctgcaccacatcgccagcctgatcggcaaggtggtggacttcgagggcagcctggccgagaacagattcaccgtgctgcccaacatcgaccccgagatcgacgagaagaagagaagactgatgggcctgcccagcttcctgaccgaggtggccagaaaggagctggagaacctggacagcagaatccccagctgcagcgtgatctacatccccctgatcggcttcctgctgagcatccccagactgcccagcatggtggaggccagcgacttcgagatcaacggcctggacttcatgttcctgagcgaggagaagctgcactacagaagcgccagaaccaaggagctggacgccctgctgggcgacctgcactgcgagatcagagaccaggagaccctgctgatgtaccagctgcagtgccaggtgctggccagagccgccgtgctgaccagagtgctggacctggccagcagactggacgtgctgctggccctggccagcgccgccagagactacggctacagcagacccagatacagcccccaggtgctgggcgtgagaatccagaacggcagacaccccctgatggagctgtgcgccagaaccttcgtgcccaacagcaccgagtgcggcggcgacaagggcagagtgaaggtgatcaccggccccaacagcagcggcaagagcatctacctgaagcaggtgggcctgatcaccttcatggccctggtgggcagcttcgtgcccgccgaggaggccgagatcggcgccgtggacgccatcttcaccagaatccacagctgcgagagcatcagcctgggcctgagcaccttcatgatcgacctgaaccagcaggtggccaaggccgtgaacaacgccaccgcccagagcctggtgctgatcgacgagttcggcaagggcaccaacaccgtggacggcctggccctgctggccgccgtgctgagacactggctggccagaggccccacctgcccccacatcttcgtggccaccaacttcctgagcctggtgcagctgcagctgctgccccagggccccctggtgcagtacctgaccatggagacctgcgaggacggcaacgacctggtgttcttctaccaggtgtgcgagggcgtggccaaggccagccacgccagccacaccgccgcccaggccggcctgcccgacaagctggtggccagaggcaaggaggtgagcgacctgatcagaagcggcaagcccatcaagcccgtgaaggacctgctgaagaagaaccagatggagaactgccagaccctggtggacaagttcatgaagctggacctggaggaccccaacctggacctgaacgtgttcatgagccaggaggtgctgcccgccgccaccagcatcctgtag

SEQ ID NO: 248264 - DNA, 2187 bp, Artificial Sequence
  derived and/or modified sequence
atggcaagcctaggcgcaaaccccagaaggaccccacagggtcctcgtccaggggccgctagctccggattcccttctcctgctccagtgccaggaccgcgcgaggctgaagaagaggaagtggaagaggaggaggagctagcggaaatccacctgtgtgtcctatggaactcggggtacctgggcatcgcttactacgacactagtgattccaccatccactttatgcccgacgccccagaccacgagtcattgaagcttctccagagagtgttagatgagattaacccccagagcgtggtcaccagcgcgaaacaagacgaaaacatgacgcggttcctgggcaaacttgcgtctcaggaacacagagaacctaaacggcccgagattatatttctccctagcgttgactttggcctggagatatccaaacagaggctgctgtctggcaactattccttcattccagatgccatgacggctaccgagaaaattcttttcctcagcagcatcataccctttgattgcctcttgacagttcgggctctgggaggtctcttgaaattcttgggccgacggcggatcggggtggaactggaggactacaatgtctccgtcccgatccttgggtttaaaaagttcatgttgacacacctcgtgaacattgatcaagacacttattctgtcctgcagatcttcaaatcagaaagtcacccatctgtgtacaaggtagccagtggcctcaaggaggggctctctctgtttggaatcctgaacaggtgccactgcaagtggggcgaaaagctactgcgcctgtggtttacccgcccaactcacgatctcggggaactctcttcacggctggacgtgattcagtttttcctgcttcctcagaacctggatatggcgcagatgctgcatagactgctcgggcacataaaaaatgtgcccttaattctgaaaagaatgaaactgtcacacactaaggtgtccgattggcaggtgctctacaaaacagtgtactctgctcttgggctgcgcgatgcgtgtaggtcgctgccccagagcatccaactattcagggacatcgcccaggaattctccgacgacttacaccatattgccagtctcattgggaaagtggttgacttcgaaggctcactggccgaaaaccggtttacggtgttacccaatattgatcccgaaattgacgaaaaaaagcgtcggctcatgggcctccccagtttcctcaccgaggtggcgcggaaggagcttgagaacctcgattcccgcatcccttcttgttctgtgatctatattcctttgatcggattcctactgtccattccacggttaccatcaatggttgaggcttctgacttcgagatcaatgggctggactttatgtttctatcggaggagaaactgcactaccgctctgcgaggaccaaggagctggacgcgctcctgggggatctacattgtgagatccgcgatcaggagacacttctcatgtaccagctacagtgccaggtgttggctagagccgccgtactgaccagagtcctggaccttgcctcaagactggacgtgttgttagcattagccagtgccgccagggattacgggtattcgaggccacgctatagccctcaggtactgggcgtgcgtattcagaatgggcgacatcccctgatggagctgtgcgcacggaccttcgtccctaatagtactgagtgtggaggggataaaggccgcgttaaggtcatcacagggccaaactcgagcggcaaatctatctatctgaagcaggtgggcctcatcacattcatggccttggtggggtctttcgtgccggctgaggaagccgagattggcgccgtggacgcaatattcacaaggatccactcgtgcgagtccatttctctgggtcttagtacatttatgattgacctgaatcagcaggtcgccaaggccgtaaacaatgcgaccgcacagtccctagtgctaatcgatgagtttgggaagggtacgaacacagttgatgggctggcacttcttgctgctgttcttaggcactggctggctcggggtccgacctgtccccacatcttcgttgcaacaaatttcctgagtctcgtgcagctccagctgctcccacaaggaccacttgtgcagtacctgtag

SEQ ID NO: 248265 - DNA, 1494 bp, Artificial Sequence
  derived and/or modified sequence
accgtatattctgctcttggactccgcgatgcctgtcggagtttaccccaatcgatccagctcttcagagatatcgcccaagagttctcagatgatctgcaccatattgcatccctgatcggtaaagtggtcgattttgaggggtccctagctgagaatcggtttaccgtactacctaatattgatccagaaatagatgagaagaagcggaggctgatgggtctgccgtcatttctgaccgaggttgcgcgtaaggaacttgaaaatcttgactccaggattccaagttgttctgtgatctacattcctctgattgggtttctgctttccattccaaggctcccctcaatggttgaggcgtcagactttgagatcaacggcctggattttatgtttctgtccgaagaaaagctccattaccgaagcgctaggaccaaggaacttgacgcactgctcggtgatctacattgcgaaataagagatcaagagactttgctgatgtaccagttacaatgtcaggtacttgcacgcgctgccgtgttgacacgagtgctagatctcgctagtagactcgacgtcctgctggccctcgccagcgctgcccgcgactatggctactctcggccaagatactcaccacaggtccttggagtccgaatccagaacggacggcacccgttgatggaactgtgcgccagaacctttgttccaaactctactgagtgcggcggcgataagggaagagtcaaagtcataaccgggcctaattcctccggtaaatccatctatctgaaacaggtgggcttgatcaccttcatggccctagtcggctcttttgtgccggctgaagaggcagagatcggtgccgttgacgcgattttcaccagaatccatagctgtgaaagtataagcctgggattgagtaccttcatgatagacctgaatcagcaggtggctaaggccgtcaacaatgctacagcccagtccttggtgcttattgatgaatttgggaaggggacgaacacggtcgatggactagctctgctagcggccgtgctgcggcattggctggcacgtggtcccacatgtccacacatcttcgtggctaccaattttctgagtctggtgcagcttcagctgcttccccagggtccgttggtccagtacttgaccatggaaacttgcgaggacggaaatgatctagtgtttttctatcaggtttgcgaaggggtggccaaggccagccacgcaagtcacactgcggcacaagcaggcctgcctgacaagcttgtggcccgcgggaaagaggtcagcgatttgatcaggtcaggtaagcctattaagcctgtgaaagatttgctcaagaaaaatcagatggagaactgtcaaaccctggtagataagtttatgaagttagatttggaggacccaaatctggacctgaacgtgttcatgtcacaggaggtgctccctgccgccacttcaatcctgtag

SEQ ID NO: 248266 - DNA, 2187 bp, Artificial Sequence
  derived and/or modified sequence
atggccagcctgggcgccaaccccaggaggaccccccagggccccaggcctggagctgccagcagcggcttccccagccctgcccctgtgcccggcccccgggaggccgaggaggaggaggtggaggaggaggaggagctggccgagatccacctgtgtgtgctgtggaacagcggctacctgggcatcgcctactatgacaccagtgacagcaccatccacttcatgccagatgccccagaccacgagagcctgaagctgctgcagagggtgctggatgagatcaacccccagagcgtggtgaccagcgccaagcaggatgagaacatgacccgcttcctgggcaagctggccagccaggagcaccgggagcccaagaggcctgagatcatcttcctgcccagcgtggactttggcctggagatcagcaagcagaggctgctgagcggcaactacagcttcatcccagatgccatgacagccacagagaagatcctcttcctgagcagcatcatcccctttgactgcctgctgactgtgcgggccctgggcggcctgctgaagttcctgggcagaagaagaattggagtggagctggaggactacaacgtgtctgtgcccatcctgggcttcaagaagttcatgctgacccacctggtgaacatcgaccaggacacctacagcgtgctgcagatcttcaagtctgagagccaccccagcgtgtacaaggtggccagcggcctgaaggagggcctgagcctgtttggcatcctgaaccgctgccactgcaagtggggcgagaagctgctgcggctgtggttcacccggcccacccatgacctgggggagctgagcagccggctggatgtgatccagttcttcctgctgccccagaacctggacatggcccagatgctgcaccggctgctgggccacatcaagaatgtgcccctcatcctgaagaggatgaagctgagccacaccaaggtgtctgactggcaggtgctgtacaagacagtgtacagcgccctgggcctgagagatgcctgccgcagcctgccccagagcatccagctgttccgggacatcgcccaggagttcagtgatgacctgcaccacatcgccagcctcatcggcaaggtggtggactttgagggcagcctggccgagaaccgcttcaccgtgctgcccaacattgatcctgagattgatgagaagaagaggcggctgatgggcctgcccagcttcctgacagaggtggccaggaaggagctggagaacctggacagccgcatccccagctgcagcgtcatctacatccccctgattggcttcctgctgagcatcccccggctgcccagcatggtggaggccagtgactttgagatcaatggcctggacttcatgttcctgtctgaggagaagctgcactaccgcagcgcccggaccaaggagctggatgccctgctgggggacctgcactgtgagatccgggaccaggagaccctgctgatgtaccagctgcagtgccaggtgctggcccgggctgctgtgctgaccagggtgctggacctggccagccggctggatgtgctgctggccctggccagcgctgcccgggactatggctacagccggccccgctacagcccccaggtgctgggcgtgcgcatccagaatggccgccaccccctgatggagctgtgtgcccggacctttgtgcccaacagcacagaatgtggcggggacaagggccgggtgaaggtgatcaccggccccaacagcagcggcaagagcatctacctgaagcaggtgggcctcatcaccttcatggccctggtgggcagctttgtgcctgctgaggaggccgagattggagctgtggatgccatcttcacccgcatccacagctgtgagagcatcagcctgggcctgagcaccttcatgattgacctgaaccagcaggtggccaaggctgtgaacaatgccacagcccagagcctggtgctgattgatgaatttgggaagggcaccaacacagtggatggcctggccctgctggccgctgtgctgcggcactggctggcccggggccccacctgcccccacatctttgtggccaccaacttcctgagcctggtgcagctgcagctgctgccccagggccccctggtgcagtacctgtag

SEQ ID NO: 248267 - DNA, 1494 bp, Artificial Sequence
  derived and/or modified sequence
actgtgtacagcgccctgggcctgagagatgcctgccgcagcctgccccagagcatccagctgttccgggacatcgcccaggagttcagtgatgacctgcaccacatcgccagcctcatcggcaaggtggtggactttgagggcagcctggccgagaaccgcttcaccgtgctgcccaacattgatcctgagattgatgagaagaagaggcggctgatgggcctgcccagcttcctgacagaggtggccaggaaggagctggagaacctggacagccgcatccccagctgcagcgtcatctacatccccctgattggcttcctgctgagcatcccccggctgcccagcatggtggaggccagtgactttgagatcaatggcctggacttcatgttcctgtctgaggagaagctgcactaccgcagcgcccggaccaaggagctggatgccctgctgggggacctgcactgtgagatccgggaccaggagaccctgctgatgtaccagctgcagtgccaggtgctggcccgggctgctgtgctgaccagggtgctggacctggccagccggctggatgtgctgctggccctggccagcgctgcccgggactatggctacagccggccccgctacagcccccaggtgctgggcgtgcgcatccagaatggccgccaccccctgatggagctgtgtgcccggacctttgtgcccaacagcacagaatgtggcggggacaagggccgggtgaaggtgatcaccggccccaacagcagcggcaagagcatctacctgaagcaggtgggcctcatcaccttcatggccctggtgggcagctttgtgcctgctgaggaggccgagattggagctgtggatgccatcttcacccgcatccacagctgtgagagcatcagcctgggcctgagcaccttcatgattgacctgaaccagcaggtggccaaggctgtgaacaatgccacagcccagagcctggtgctgattgatgaatttgggaagggcaccaacacagtggatggcctggccctgctggccgctgtgctgcggcactggctggcccggggccccacctgcccccacatctttgtggccaccaacttcctgagcctggtgcagctgcagctgctgccccagggccccctggtgcagtacctgaccatggagacctgtgaagatggaaatgacctggtgttcttctaccaggtgtgtgagggcgtggccaaggccagccacgccagccacacagctgcccaggccggcctgcctgacaagctggtggcccggggcaaggaggtgtctgacctgatccgcagcggcaagcccatcaagcctgtgaaggacctgctgaagaagaaccagatggagaactgccagaccctggtggacaagttcatgaagctggacctggaggaccccaacctggacctgaatgtgttcatgagccaggaggtgctgcctgctgccaccagcatcctgtag

SEQ ID NO: 248268 - DNA, 2187 bp, Artificial Sequence
  derived and/or modified sequence
atggccagcctgggcgccaacccccggcggaccccccagggccccaggccaggtgccgcgagttccggttttccatctcccgcccccgtgcctggcccgcgtgaagccgaggaggaagaggtagaggaagaagaggagttggccgaaatccacctctgcgtgctgtggaacagcggatacctggggatagcctattacgatacatctgattccactatccacttcatgcccgatgcccctgaccacgagagccttaaactgcttcagcgggtgcttgacgaaattaacccccaaagtgtggtgacttccgcaaaacaggacgagaacatgaccaggttcctcggaaagctagcgagccaggagcacagggagcctaagcgcccagaaattatcttcctcccttcagtagattttgggctggaaatcagtaaacagcgccttttaagtggtaattactccttcattcccgacgccatgaccgccacagagaagatattattcctctcctccattattccattcgactgtctcttaaccgtgagggctctgggcggtcttctcaagtttttgggtagaaggaggatcggcgtggaacttgaggactacaatgtttccgtccctatcctggggttcaagaagttcatgctcactcacctggtgaatattgatcaggacacttacagcgtgctacagatcttcaaatcagaaagccacccttccgtgtacaaggtcgctagtggcctcaaagaaggtctgtccctgttcggcatcctcaaccgttgtcattgtaaatggggagagaagctcctgcgactgtggttcactagaccaactcatgatctgggtgagcttagctcccggctggatgtgattcagtttttcctgctgcctcagaatctagacatggcccaaatgctgcatcggttgctgggtcatatcaaaaatgtgccgctgattctcaaacgaatgaaactttctcacaccaaagtatctgactggcaggttctctataagactgtgtacagcgcactaggccttcgcgacgcctgtcggtccctgccacagtctatccaactgttcagagacatcgctcaggagttctcagacgacttacatcacatcgcctcactcattggcaaggtcgtcgatttcgagggctctctggctgaaaatagattcacagtgcttcctaatatagatccagaaattgacgaaaaaaagcgcaggctgatgggtcttccttcatttctcacagaggttgctcgaaaggagctagagaacttagactcacggatcccatcatgttctgtcatttacatccccctgatcggcttcttgctatccatcccacggctccccagtatggtcgaggcatccgatttcgagatcaacggactggatttcatgtttctgtccgaggagaaactgcactaccgctctgctagaaccaaagaactggacgctctgttaggtgatttgcactgcgagatccgagatcaggagacactgctaatgtaccagctgcagtgtcaggtactggcaagggcggctgtcctgactagggtgttagatctcgcaagccggcttgacgtgctcctggcccttgctagcgccgccagggattatggttattctagaccacgctattccccacaggttcttggcgtgagaatacagaacggccgccatccgcttatggaattatgcgcacggacctttgtgcccaattccactgaatgtggaggtgacaagggaagagttaaagtcattaccggtccgaattcatcgggcaaatcaatctatctgaagcaggtggggttgataaccttcatggcactggtcggttccttcgtccctgctgaagaagctgaaatcggggccgtcgatgctattttcactcgtatccactcttgcgagtctatctcacttggactctcaacctttatgatcgatctcaatcaacaggtggcgaaggcagtgaataatgccacggcccaatccctagtgcttatcgatgagttcggcaaggggactaacacagttgatggtcttgccctgctggccgcggtcttgcgacattggcttgctcgcggacccacttgcccacatatattcgtcgcaaccaatttcctttccttggtgcagttgcaattgcttccccaggggccactggtccagtatctgtag

SEQ ID NO: 248269 - DNA, 1494 bp, Artificial Sequence
  derived and/or modified sequence
accgtgtacagcgccctgggcctgcgggacgcctgccggagcctgccgcagtcgatccaactgttcagagacatagctcaggagttctcagacgatctgcatcatattgcctcattaattggtaaagtggtggacttcgagggttccctggctgagaatagatttacagtgcttcctaacatcgacccagagatagatgagaagaagaggaggcttatgggactgccgtccttcctaacagaggtggcccgaaaagagttggagaatctggattcgcgcattccgagttgctcagtcatttacatccccctgattggctttttactttccatcccccgcctgcctagcatggtagaagcgtccgacttcgagatcaatggtcttgactttatgttcctgtctgaggagaagttacactatcggtccgctagaacaaaggagctcgacgcactgttaggagatctacactgtgagatcagggaccaagagaccttactcatgtaccagttgcagtgccaagtcctggctagggctgcagtactgaccagagtgctggatttggccagtcgtttggatgtattactcgctctagcgtctgccgccagggattacgggtactcaaggccacgatactcccctcaggtgttgggtgtgcgcatccagaatggtcggcatccacttatggaactgtgtgcgcggacctttgtacccaactctaccgagtgcggcggcgataaagggagagttaaagttattacaggaccaaatagtagtggtaagagtatttatttaaagcaagtgggactgatcacatttatggcgttggtggggagttttgttcccgccgaagaggctgagatcggcgctgtggatgcgatctttaccaggattcactcatgcgagtccatatctctgggcctttctacattcatgattgatctcaatcagcaggtggcaaaggccgtcaataacgccactgcacagtcacttgtcctaatagatgaattcggcaagggtaccaacacagtggatgggctagcccttcttgcagcggtcctaagacactggctggcccgcggccccacgtgcccacacatctttgtggccaccaatttcctttcattggttcagcttcaactgctcccacagggaccacttgtccaatatctgactatggagacctgtgaggatggtaacgacctggtcttcttctatcaagtctgcgaaggcgttgcgaaggccagtcacgccagccataccgcagcccaggcgggcctgcctgacaaactagttgccagaggtaaggaggtgtccgacttaatccggtccggaaaacccatcaagcctgtgaaagacctcctcaagaaaaaccagatggagaattgtcagaccctcgtcgacaagtttatgaagttagatttggaggaccccaatcttgatcttaatgtttttatgtcccaggaggttctgcccgctgctacctcaatactctag

SEQ ID NO: 248270 - DNA, 2239 bp, Artificial Sequence
  derived and/or modified sequence
gcggtcggtcagcggggcgttctcccacctgtagcgactcagagcctccaagctcatggcctccttaggagcgaacccaaggaggacaccgcagggaccgagacctggggcggcctcctccggcttccccagcccggccccagtgccgggccccagggaggccgaggaggaggaagtcgaggaggaggaggagctggccgagatccatctgtgtgtgctgtggaattcaggatacttgggcattgcctactatgatactagtgactccactatccacttcatgccagatgccccagaccacgagagcctcaagcttctccagagagttctggatgagatcaatccccagtctgttgttacgagtgccaaacaggatgagaatatgactcgatttctgggaaagcttgcctcccaggagcacagagagcctaaaagacctgaaatcatatttttgccaagtgtggattttggtctggagataagcaaacaacgcctcctttctggaaactactccttcatcccagacgccatgactgccactgagaaaatcctcttcctctcttccattattccctttgactgcctcctcacagttcgagcacttggagggctgctgaagttcctgggtcgaagaagaatcggggttgaactggaagactataatgtcagcgtccccatcctgggctttaagaaatttatgttgactcatctggtgaacatagatcaagacacttacagtgttctacagatttttaagagtgagtctcacccctcagtgtacaaagtggccagtggactgaaggaggggctcagcctctttggaatcctcaacagatgccactgtaagtggggagagaagctgctcaggctatggttcacacgtccgactcatgacctgggggagctcagttctcgtctggacgtcattcagttttttctgctgccccagaatctggacatggctcagatgctgcatcggctcctgggtcacatcaagaacgtgcctctgattctgaaacgcatgaagttgtcccacaccaaggtcagcgactggcaggttctctacaagactgtgtacagtgccctgggcctgagggatgcctgccgctccctgccgcagtccatccagctctttcgggacattgcccaagagttctctgatgacctgcaccatatcgccagcctcattgggaaagtagtggactttgagggcagccttgctgaaaatcgcttcacagtcctccccaacatagatcctgaaattgatgagaaaaagcgaagactgatgggacttcccagtttccttactgaggttgcccgcaaggagctggagaatctggactcccgtattccttcatgcagtgtcatctacatccctctgattggcttccttctttctattccccgcctgccttccatggtagaggccagtgactttgagattaatggactggacttcatgtttctctcagaggagaagctgcactatcgtagtgcccgaaccaaggagctggatgcattgctgggggacctgcactgcgagatccgggaccaggagacgctgctgatgtaccagctacagtgccaggtgctggcacgagcagctgtcttaacccgagtattggaccttgcctcccgcctggacgtcctgctggctcttgccagtgctgcccgggactatggctactcaaggccgcgttactccccacaagtccttggggtacgaatccagaatggcagacatcctctgatggaactctgtgcccgaacctttgtgcccaactccacagaatgtggtggggacaaagggagggtcaaagtcatcactggacccaactcatcagggaagagcatatacctcaaacaggtaggcttgatcacattcatggccctggtaggcagctttgtgccagcagaggaggccgaaattggggcagtagacgccatcttcacacgaattcatagctgcgaatccatctcccttggcctctccaccttcatgatcgacctcaaccagcaggtggcgaaagcagtgaacaatgccactgcacagtcgctggtccttattgatgaatttggaaagggaaccaacacggtggatgggctcgcgcttctggccgctgtgctccgacactggctggcacgtggacccacatgcccccacatctttgtggccaccaactttctgagccttgttcagctacaactgctgccacaagggcccctggtgcagtatttg

SEQ ID NO: 248271 - DNA, 1639 bp, Artificial Sequence
  derived and/or modified sequence
actgtgtacagtgccctgggcctgagggatgcctgccgctccctgccgcagtccatccagctctttcgggacattgcccaagagttctctgatgacctgcaccatatcgccagcctcattgggaaagtagtggactttgagggcagccttgctgaaaatcgcttcacagtcctccccaacatagatcctgaaattgatgagaaaaagcgaagactgatgggacttcccagtttccttactgaggttgcccgcaaggagctggagaatctggactcccgtattccttcatgcagtgtcatctacatccctctgattggcttccttctttctattccccgcctgccttccatggtagaggccagtgactttgagattaatggactggacttcatgtttctctcagaggagaagctgcactatcgtagtgcccgaaccaaggagctggatgcattgctgggggacctgcactgcgagatccgggaccaggagacgctgctgatgtaccagctacagtgccaggtgctggcacgagcagctgtcttaacccgagtattggaccttgcctcccgcctggacgtcctgctggctcttgccagtgctgcccgggactatggctactcaaggccgcgttactccccacaagtccttggggtacgaatccagaatggcagacatcctctgatggaactctgtgcccgaacctttgtgcccaactccacagaatgtggtggggacaaagggagggtcaaagtcatcactggacccaactcatcagggaagagcatatacctcaaacaggtaggcttgatcacattcatggccctggtaggcagctttgtgccagcagaggaggccgaaattggggcagtagacgccatcttcacacgaattcatagctgcgaatccatctcccttggcctctccaccttcatgatcgacctcaaccagcaggtggcgaaagcagtgaacaatgccactgcacagtcgctggtccttattgatgaatttggaaagggaaccaacacggtggatgggctcgcgcttctggccgctgtgctccgacactggctggcacgtggacccacatgcccccacatctttgtggccaccaactttctgagccttgttcagctacaactgctgccacaagggcccctggtgcagtatttgaccatggagacctgtgaggatggcaacgatcttgtcttcttctatcaggtttgcgaaggtgttgcgaaggccagccatgcctcccacacagctgcccaggctgggcttcctgacaagcttgtggctcgtggcaaggaggtctcagacttgatccgcagtggaaaacccatcaagcctgtcaaggatttgctaaagaagaaccaaatggaaaattgccagacattagtggataagtttatgaaactggatttggaagatcctaacctggacttgaacgttttcatgagccaggaagtgctgcctgctgccaccagcatcctctgagagtccttccagtgtcctccccagcctcctgagactccggtgggctgccatgccctctttgtttccttatctccctcagacgcagagtttttagtttctctagaaattttgtttcatattaggaataaagtttattttgaagaaa

SEQ ID NO: 248272 - DNA, 2187 bp, Artificial Sequence
  derived and/or modified sequence
atggccagtctcggcgctaacccccgacgtacccctcaaggccctaggccgggagctgcttcgagcggtttccccagtcccgctcctgtaccgggaccaagggaggccgaggaggaggaggtagaagaggaggaagagctggcggaaatccacctttgtgtactatggaactccggttacctgggcattgcttattacgacacctctgattctaccatacatttcatgcccgatgcgccagatcacgagagtcttaaactgctgcagagagtactcgacgaaatcaaccctcagagcgtcgtcactagcgctaagcaggacgagaacatgaccagattcttaggcaagctcgcttctcaggagcaccgcgagccaaaaagacctgagatcattttcttgccttccgttgatttcggactggagattagcaaacagcggttgttgtctgggaattatagcttcatccctgacgcaatgacagcaactgaaaagatcctgtttttgagttcgatcattccttttgactgtttactcaccgtcagggctctcgggggattactgaagttcctggggagaagaaggatcggcgttgagctggaagactacaatgtgagcgtacctatactgggcttcaagaaattcatgctgactcacctggtcaatatcgaccaagatacctacagtgttctccaaatcttcaagagcgagtcccatccttcagtctacaaagttgcgtctggcctgaaggaaggcctatccctcttcggaatactaaaccggtgccattgtaagtggggtgagaaactgctgagactgtggttcacccgaccgacacatgatttgggggaactgtcatcccggctggacgtgattcagttcttcctgctgccgcagaacctggatatggcccagatgctacataggcttcttggtcatataaagaatgttcctctgattcttaaacgaatgaaattgagccatactaaggtgtctgactggcaggtgctgtataagaccgtttacagcgcactggggctgcgggacgcctgccgttcgttgcctcagtctattcagctctttagggacatagctcaagaattcagtgatgatctgcaccacattgcatctcttattggtaaggtagttgatttcgaaggcagcctcgccgagaatcggttcactgtgctccctaatattgaccccgaaatcgatgagaagaagcgtagattaatgggactgccttcttttctcaccgaggttgcacggaaggaactggagaacctagactcccgaattcctagctgctccgtcatctacatacctctcattggatttcttttgtccattcccaggctgccctctatggtggaagcatccgattttgaaatcaatgggcttgatttcatgtttctgtcggaggaaaagcttcactacaggagcgccaggaccaaagagctcgatgcacttttgggagatttgcattgcgaaatcagggatcaggaaacccttctgatgtaccaactccaatgccaagtgctggcgcgtgcggcagtcttgacaagggtcttggacctggcctcccgactggacgtcctcctggccctcgcatctgccgctagggattacggatactcccgcccacgctattctccacaagtgctcggggtgcggatacagaacggtagacaccccctgatggagttgtgcgctcgcacttttgtgccaaacagcaccgaatgtggtggcgataaggggagagttaaagttatcacaggtcctaatagttccggaaagtccatttacctcaaacaggtgggactgattacattcatggccctagttggttccttcgtacctgcggaggaggccgagatcggcgcagttgatgcaatctttacacggatccattcctgtgaatccataagcttgggactcagtacctttatgattgacctgaaccagcaagttgctaaagccgtgaataacgccactgcgcagtccctggtgctcatcgacgagtttggcaaaggaacaaacaccgttgacggcctggccttgctcgcggctgtcctcaggcactggctggcccgtggcccaacctgtccccatattttcgtggcaaccaacttcctctccttggtgcagctgcagctgttgccccaggggccactggtccaatatctgtag

SEQ ID NO: 248273 - DNA, 1494 bp, Artificial Sequence
  derived and/or modified sequence
accgtgtacagtgcccttggcttgcgggacgcatgtcgatcccttcctcagagcatccaattgtttcgagacatcgcacaggaattcagtgacgatctacatcatatagcatccctgattggcaaggtggttgatttcgaaggctccttggcagaaaatcggttcactgtcctgcctaatatagacccagagatcgacgagaagaaaaggaggttgatgggcctgccatcctttctaacagaggtagccaggaaagagctggagaacttggattcacgaataccttcttgtagtgtcatttatatcccactcattgggttccttctgtctatcccacgtctgccatccatggttgaagctagtgactttgagataaatggactagacttcatgtttctctctgaagaaaagctccattatcgctccgcccgaacaaaagagctggacgcactgcttggagacctgcactgcgaaatccgagaccaagaaaccctcctcatgtatcagctacagtgtcaagttctcgctagagctgcagtgctaacacgagttctggatctggctagccggcttgatgtgttactggccctggcctcagccgctcgtgattacggctactcgcgaccgaggtatagcccacaggtcctaggggtcaggattcaaaatggcagacaccccctaatggaactgtgtgccagaacgtttgtgccgaacagcaccgaatgcggtggggacaagggccgtgttaaagtgatcactggaccgaactcctcagggaagagtatctatctgaaacaggtggggcttatcaccttcatggcgcttgtcggatcttttgtacccgctgaagaagcagagatcggcgcagtggatgccatcttcaccaggatccacagctgcgagagtataagtttgggtctgtccactttcatgatcgacctgaatcagcaggtggctaaagctgtcaataacgccaccgcgcagagcctggtgctgattgacgagtttggaaagggaactaacaccgtggatggactcgcactcttggccgctgtcttaagacactggctggcacgagggcctacttgcccgcatatttttgtggccacgaactttttgagcctggtgcagttgcagttgctgccacaggggccactggtgcagtatctaactatggagacatgtgaagacgggaacgacctggtgtttttttaccaagtatgcgagggcgtagctaaggcctctcacgcctcgcacactgccgcacaggcgggtctgcccgacaaactggttgctagagggaaggaggtgtccgaccttatccggtccgggaaacctatcaagcccgtgaaagatctcctgaagaaaaatcaaatggagaactgtcagacattggttgataagtttatgaaactggatctagaagatcccaacctggacttgaatgtgttcatgtctcaggaggtcctgcccgctgcaacgagtatcctgtag

SEQ ID NO: 248274 - protein, 270 aa, Artificial Sequence
  derived and/or modified sequence
MASLGANPRRTPQGPRPGAASSGFPSPAPVPGPREAEEEEVEEEEELAEIHLCVLWNSGYLGIAYYDTSDSTIHFMPDAPDHESLKLLQRVLDEINPQSVVTSAKQDENMTRFLGKLASQEHREPKRPEIIFLPSVDFGLEISKQRLLSGNYSFIPDAMTATEKILFLSSIIPFDCLLTVRALGGLLKFLGRRRIGVELEDYNVSVPILGFKKFMLTHLVNIDQDTYSVLQIFKSESHPSVYKVASGLKEGLSLFGILNRCHCKWGEKLL

SEQ ID NO: 248275 - protein, 107 aa, Artificial Sequence
  derived and/or modified sequence
KILFLSSIIPFDCLLTVRALGGLLKFLGRRRIGVELEDYNVSVPILGFKKFMLTHLVNIDQDTYSVLQIFKSESHPSVYKVASGLKEGLSLFGILNRCHCKWGEKLL

SEQ ID NO: 248276 - protein, 254 aa, Artificial Sequence
  derived and/or modified sequence
MASLGANPRRTPQGPRPGAASSGFPSPAPVPGPREAEEEEVEEEEELAEIHLCVLWNSGYLGIAYYDTSDSTIHFMPDAPDHESLKLLQRVLDEINPQSVVTSAKQDENMTRFLGKLASQEHREPKRPEIIFLPSVDFGLEISKQRLLSGNYSFIPDAMTATEKILFLSSIIPFDCLLTVRALGGLLKFLGRRRIGVELEDYNVSVPILGFKKFMLTHLVNIDQDTYRLECNGAISAQCNLCLLGSSDSPASAS

SEQ ID NO: 248277 - protein, 851 aa, Artificial Sequence
  derived and/or modified sequence
MASLGANPRRTPQGPRPGAASSGFPSPAPVPGPREAEEEEVEEEEELAEIHLCVLWNSGYLGIAYYDTSDSTIHFMPDAPDHESLKLLQRVLDEINPQSVVTSAKQDENMTRFLGKLASQEHREPKRPEIIFLPSVDFGLEISKQRLLSGNYSFIPDAMTATEKILFLSSIIPFDCLLTPPGDLRFTPIPLLIPSQVRALGGLLKFLGRRRIGVELEDYNVSVPILGFKKFMLTHLVNIDQDTYSVLQIFKSESHPSVYKVASGLKEGLSLFGILNRCHCKWGEKLLRLWFTRPTHDLGELSSRLDVIQFFLLPQNLDMAQMLHRLLGHIKNVPLILKRMKLSHTKVSDWQVLYKTVYSALGLRDACRSLPQSIQLFRDIAQEFSDDLHHIASLIGKVVDFEGSLAENRFTVLPNIDPEIDEKKRRLMGLPSFLTEVARKELENLDSRIPSCSVIYIPLIGFLLSIPRLPSMVEASDFEINGLDFMFLSEEKLHYRSARTKELDALLGDLHCEIRDQETLLMYQLQCQVLARAAVLTRVLDLASRLDVLLALASAARDYGYSRPRYSPQVLGVRIQNGRHPLMELCARTFVPNSTECGGDKGRVKVITGPNSSGKSIYLKQVGLITFMALVGSFVPAEEAEIGAVDAIFTRIHSCESISLGLSTFMIDLNQVAKAVNNATAQSLVLIDEFGKGTNTVDGLALLAAVLRHWLARGPTCPHIFVATNFLSLVQLQLLPQGPLVQYLTMETCEDGNDLVFFYQVCEGVAKASHASHTAAQAGLPDKLVARGKEVSDLIRSGKPIKPVKDLLKKNQMENCQTLVDKFMKLDLEDPNLDLNVFMSQEVLPAATSIL

SEQ ID NO: 248278 - protein, 834 aa, Artificial Sequence
  derived and/or modified sequence
MASLGANPRRTPQGPRPGAASSGFPSPAPVPGPREAEEEEVEEEEELAEIHLCVLWNSGYLGIAYYDTSDSTIHFMPDAPDHESLKLLQRVLDEINPQSVVTSAKQDENMTRFLGKLASQEHREPKRPEIIFLPSVDFGLEISKQRLLSGNYSFIPDAMTATEKILFLSSIIPFDCLLTVRALGGLLKFLGRRRIGVELEDYNVSVPILGFKKFMLTHLVNIDQDTYSVLQIFKSESHPSVYKVASGLKEGLSLFGILNRCHCKWGEKLLRLWFTRPTHDLGELSSRLDVIQFFLLPQNLDMAQMLHRLLGHIKNVPLILKRMKLSHTKVSDWQVLYKTVYSALGLRDACRSLPQSIQLFRDIAQEFSDDLHHIASLIGKVVDFEGSLAENRFTVLPNIDPEIDEKKRRLMGLPSFLTEVARKELENLDSRIPSCSVIYIPLIGFLLSIPRLPSMVEASDFEINGLDFMFLSEEKLHYRSARTKELDALLGDLHCEIRDQETLLMYQLQCQVLARAAVLTRVLDLASRLDVLLALASAARDYGYSRPRYSPQVLGVRIQNGRHPLMELCARTFVPNSTECGGDKGRVKVITGPNSSGKSIYLKQVGLITFMALVGSFVPAEEAEIGAVDAIFTRIHSCESISLGLSTFMIDLNQVAKAVNNATAQSLVLIDEFGKGTNTVDGLALLAAVLRHWLARGPTCPHIFVATNFLSLVQLQLLPQGPLVQYLTMETCEDGNDLVFFYQVCEGVAKASHASHTAAQAGLPDKLVARGKEVSDLIRSGKPIKPVKDLLKKNQMENCQTLVDKFMKLDLEDPNLDLNVFMSQEVLPAATSIL

SEQ ID NO: 248279 - protein, 271 aa, Artificial Sequence
  derived and/or modified sequence
MFLSEEKLHYRSARTKELDALLGDLHCEIRDQETLLMYQLQCQVLARAAVLTRVLDLASRLDVLLALASAARDYGYSRPRYSPQVLGVRIQNGRHPLMELCARTFVPNSTECGGDKGRVKVITGPNSSGKSIYLKQVGLITFMALVGSFVPAEEAEIGAVDAIFTRIHSCESISLGLSTFMIDLNQVAKAVNNATAQSLVLIDEFGKGTNTVDGLALLAAVLRHWLARGPTCPHIFVATNFLSLVQLQLLPQGPLVQYLDWPRVSGQEGGD

SEQ ID NO: 248280 - protein, 508 aa, Artificial Sequence
  derived and/or modified sequence
MWPVLLFVFLSQTVYSALGLRDACRSLPQSIQLFRDIAQEFSDDLHHIASLIGKVVDFEGSLAENRFTVLPNIDPEIDEKKRRLMGLPSFLTEVARKELENLDSRIPSCSVIYIPLIGFLLSIPRLPSMVEASDFEINGLDFMFLSEEKLHYRSARTKELDALLGDLHCEIRDQETLLMYQLQCQVLARAAVLTRVLDLASRLDVLLALASAARDYGYSRPRYSPQVLGVRIQNGRHPLMELCARTFVPNSTECGGDKGRVKVITGPNSSGKSIYLKQVGLITFMALVGSFVPAEEAEIGAVDAIFTRIHSCESISLGLSTFMIDLNQVAKAVNNATAQSLVLIDEFGKGTNTVDGLALLAAVLRHWLARGPTCPHIFVATNFLSLVQLQLLPQGPLVQYLTMETCEDGNDLVFFYQVCEGVAKASHASHTAAQAGLPDKLVARGKEVSDLIRSGKPIKPVKDLLKKNQMENCQTLVDKFMKLDLEDPNLDLNVFMSQEVLPAATSIL

SEQ ID NO: 248281 - protein, 533 aa, Artificial Sequence
  derived and/or modified sequence
MAQMLHRLLGHIKNVPLILKRMKLSHTKVSDWQVLYKTVYSALGLRDACRSLPQSIQLFRDIAQEFSDDLHHIASLIGKVVDFEGSLAENRFTVLPNIDPEIDEKKRRLMGLPSFLTEVARKELENLDSRIPSCSVIYIPLIGFLLSIPRLPSMVEASDFEINGLDFMFLSEEKLHYRSARTKELDALLGDLHCEIRDQETLLMYQLQCQVLARAAVLTRVLDLASRLDVLLALASAARDYGYSRPRYSPQVLGVRIQNGRHPLMELCARTFVPNSTECGGDKGRVKVITGPNSSGKSIYLKQVGLITFMALVGSFVPAEEAEIGAVDAIFTRIHSCESISLGLSTFMIDLNQVAKAVNNATAQSLVLIDEFGKGTNTVDGLALLAAVLRHWLARGPTCPHIFVATNFLSLVQLQLLPQGPLVQYLTMETCEDGNDLVFFYQVCEGVAKASHASHTAAQAGLPDKLVARGKEVSDLIRSGKPIKPVKDLLKKNQMENCQTLVDKFMKLDLEDPNLDLNVFMSQEVLPAATSIL

SEQ ID NO: 248282 - protein, 401 aa, Artificial Sequence
  derived and/or modified sequence
MWPVLLFVFLSQTVYSALGLRDACRSLPQSIQLFRDIAQEFSDDLHHIASLIGKVVDFEGSLAENRFTVLPNIDPEIDEKKRRLMGLPSFLTEVARKELENLDSRIPSCSVIYIPLIGFLLSIPRLPSMVEASDFEINGLDFMFLSEEKLHYRSARTKELDALLGDLHCEIRDQETLLMYQLQCQVLARAAVLTRVLDLASRLDVLLALASAARDYGYSRPRYSPQVLGVRIQNGRHPLMELCARTFVPNSTECGGDKGRVKVITGPNSSGKSIYLKQVGLITFMALVGSFVPAEEAEIGAVDAIFTRIHSCESISLGLSTFMIDLNQVAKAVNNATAQSLVLIDEFGKGTNTVDGLALLAAVLRHWLARGPTCPHIFVATNFLSLVQLQLLPQGPLVQYL

SEQ ID NO: 248283 - protein, 496 aa, Artificial Sequence
  derived and/or modified sequence
TVYSALGLRDACRSLPQSIQLFRDIAQEFSDDLHHIASLIGKVVDFEGSLAENRFTVLPNIDPEIDEKKRRLMGLPSFLTEVARKELENLDSRIPSCSVIYIPLIGFLLSIPRLPSMVEASDFEINGLDFMFLSEEKLHYRSARTKELDALLGDLHCEIRDQETLLMYQLQCQVLARAAVLTRVLDLASRLDVLLALASAARDYGYSRPRYSPQVLGVRIQNGRHPLMELCARTFVPNSTECGGDKGRVKVITGPNSSGKSIYLKQVGLITFMALVGSFVPAEEAEIGAVDAIFTRIHSCESISLGLSTFMIDLNQVAKAVNNATAQSLVLIDEFGKGTNTVDGLALLAAVLRHWLARGPTCPHIFVATNFLSLVQLQLLPQGPLVQYLTMETCEDGNDLVFFYQVCEGVAKASHASHTAAQAGLPDKLVARGKEVSDLIRSGKPIKPVKDLLKKNQMENCQTLVDKFMKLDLEDPNLDLNVFMSQEVLPAATSIL

SEQ ID NO: 248284 - protein, 727 aa, Artificial Sequence
  derived and/or modified sequence
MASLGANPRRTPQGPRPGAASSGFPSPAPVPGPREAEEEEVEEEEELAEIHLCVLWNSGYLGIAYYDTSDSTIHFMPDAPDHESLKLLQRVLDEINPQSVVTSAKQDENMTRFLGKLASQEHREPKRPEIIFLPSVDFGLEISKQRLLSGNYSFIPDAMTATEKILFLSSIIPFDCLLTVRALGGLLKFLGRRRIGVELEDYNVSVPILGFKKFMLTHLVNIDQDTYSVLQIFKSESHPSVYKVASGLKEGLSLFGILNRCHCKWGEKLLRLWFTRPTHDLGELSSRLDVIQFFLLPQNLDMAQMLHRLLGHIKNVPLILKRMKLSHTKVSDWQVLYKTVYSALGLRDACRSLPQSIQLFRDIAQEFSDDLHHIASLIGKVVDFEGSLAENRFTVLPNIDPEIDEKKRRLMGLPSFLTEVARKELENLDSRIPSCSVIYIPLIGFLLSIPRLPSMVEASDFEINGLDFMFLSEEKLHYRSARTKELDALLGDLHCEIRDQETLLMYQLQCQVLARAAVLTRVLDLASRLDVLLALASAARDYGYSRPRYSPQVLGVRIQNGRHPLMELCARTFVPNSTECGGDKGRVKVITGPNSSGKSIYLKQVGLITFMALVGSFVPAEEAEIGAVDAIFTRIHSCESISLGLSTFMIDLNQVAKAVNNATAQSLVLIDEFGKGTNTVDGLALLAAVLRHWLARGPTCPHIFVATNFLSLVQLQLLPQGPLVQYL

SEQ ID NO: 248285 - protein, 135 aa, Artificial Sequence
  derived and/or modified sequence
GYSRPRYSPQVLGVRIQNGRHPLMELCARTFVPNSTECGGDKGRVKVITGPNSSGKSIYLKQVAKAVNNATAQSLVLIDEFGKGTNTVDGLALLAAVLRHWLARGPTCPHIFVATNFLSLVQLQLLPQGPLVQYL

SEQ ID NO: 248286 - protein, 158 aa, Artificial Sequence
  derived and/or modified sequence
TVYSALGLRDACRSLPQSIQLFRDIAQEFSDDLHHIASLIGKVYLSPQVDFEGSLAENRFTVLPNIDPEIDEKKRRLMGLPSFLTEVARKELENLDSRIPSCSVIYIPLIGFLLSIPRLPSMVEASDFEINGLDFMFLSEEKLHYRSARTKELDALLG

SEQ ID NO: 248287 - protein, 263 aa, Artificial Sequence
  derived and/or modified sequence
HYRSARTKELDALLGDLHCEIRDQETLLMYQLQCQVLARAAVLTRVLDLASRLDVLLALASAARDYGYSRPRYSPQVLGVRIQNGRHPLMELCARTFVPNSTECGGDKGRVKVITGPNSSGKSIYLKQVGLITFMALVGSFVPAEEAEIGAVDAIFTRIHSCESISLGLSTFMIDLNQVAKAVNNATAQSLVLIDEFGKGTNTVDGLALLAAVLRHWLARGPTCPHIFVATNFLSLVQLQLLPQGPLVQYLDWPRVSGQEGGD

SEQ ID NO: 248288 - DNA, 813 bp, Artificial Sequence
  derived and/or modified sequence
atggccagcctgggcgccaaccccagaagaaccccccagggccccagacccggcgccgccagcagcggcttccccagccccgcccccgtgcccggccccagagaggccgaggaggaggaggtggaggaggaggaggagctggccgagatccacctgtgcgtgctgtggaacagcggctacctgggcatcgcctactacgacaccagcgacagcaccatccacttcatgcccgacgcccccgaccacgagagcctgaagctgctgcagagagtgctggacgagatcaacccccagagcgtggtgaccagcgccaagcaggacgagaacatgaccagattcctgggcaagctggccagccaggagcacagagagcccaagagacccgagatcatcttcctgcccagcgtggacttcggcctggagatcagcaagcagagactgctgagcggcaactacagcttcatccccgacgccatgaccgccaccgagaagatcctgttcctgagcagcatcatccccttcgactgcctgctgaccgtgagagccctgggcggcctgctgaagttcctgggcagaagaagaatcggcgtggagctggaggactacaacgtgagcgtgcccatcctgggcttcaagaagttcatgctgacccacctggtgaacatcgaccaggacacctacagcgtgctgcagatcttcaagagcgagagccaccccagcgtgtacaaggtggccagcggcctgaaggagggcctgagcctgttcggcatcctgaacagatgccactgcaagtggggcgagaagctgctgtag

SEQ ID NO: 248289 - DNA, 585 bp, Artificial Sequence
  derived and/or modified sequence
atggccagcctgggcgccaaccccagaagaaccccccagggccccagacccggcgccgccagcagcggcttccccagccccgcccccgtgcccggccccagagaggccgaggaggaggaggtggaggaggaggaggagctggccgagatccacctgtgcgtgctgtggaacagcggctacctgggcatcgcctactacgacaccagcgacagcaccatccacttcatgcccgacgcccccgaccacgagagcctgaagctgctgcagagagtgctggacgagatcaacccccagagcgtggtgaccagcgccaagcaggacgagaacatgaccagattcctgggcaagctggccagccaggagcacagagagcccaagagacccgagatcatcttcctgcccagcgtggacttcggcctggagatcagcaagcagagactgctgagcggcaactacagcttcatccccgacgccatgaccgccaccgagaagatcctgttcctgagcagcatcatccccttcgactgcctgctgaccgtgagagccctgggcggcctgctgaagttcctgggcagaagaagatag

SEQ ID NO: 248290 - DNA, 324 bp, Artificial Sequence
  derived and/or modified sequence
aagatcctgttcctgagcagcatcatccccttcgactgcctgctgaccgtgagagccctgggcggcctgctgaagttcctgggcagaagaagaatcggcgtggagctggaggactacaacgtgagcgtgcccatcctgggcttcaagaagttcatgctgacccacctggtgaacatcgaccaggacacctacagcgtgctgcagatcttcaagagcgagagccaccccagcgtgtacaaggtggccagcggcctgaaggagggcctgagcctgttcggcatcctgaacagatgccactgcaagtggggcgagaagctgctgtag

SEQ ID NO: 248291 - DNA, 765 bp, Artificial Sequence
  derived and/or modified sequence
atggccagcctgggcgccaaccccagaagaaccccccagggccccagacccggcgccgccagcagcggcttccccagccccgcccccgtgcccggccccagagaggccgaggaggaggaggtggaggaggaggaggagctggccgagatccacctgtgcgtgctgtggaacagcggctacctgggcatcgcctactacgacaccagcgacagcaccatccacttcatgcccgacgcccccgaccacgagagcctgaagctgctgcagagagtgctggacgagatcaacccccagagcgtggtgaccagcgccaagcaggacgagaacatgaccagattcctgggcaagctggccagccaggagcacagagagcccaagagacccgagatcatcttcctgcccagcgtggacttcggcctggagatcagcaagcagagactgctgagcggcaactacagcttcatccccgacgccatgaccgccaccgagaagatcctgttcctgagcagcatcatccccttcgactgcctgctgaccgtgagagccctgggcggcctgctgaagttcctgggcagaagaagaatcggcgtggagctggaggactacaacgtgagcgtgcccatcctgggcttcaagaagttcatgctgacccacctggtgaacatcgaccaggacacctacagactggagtgcaacggcgccatcagcgcccagtgcaacctgtgcctgctgggcagcagcgacagccccgccagcgccagctag

SEQ ID NO: 248292 - DNA, 813 bp, Artificial Sequence
  derived and/or modified sequence
atggccagcctgggcgccaatccaaggcggaccccacagggccctaggcctggtgcagctagcagtggcttcccatctccagcgccagtgccgggaccaagagaagccgaagaggaggaggttgaagaggaagaggagctggccgagattcacctttgtgttctatggaatagtggttacctaggtattgcctattacgataccagtgattcgaccattcattttatgcctgacgccccagatcatgaatcgcttaagctgctgcaaagagtgctggacgaaatcaatccccaatccgtggtgacctcggcaaagcaggacgagaacatgacccggttcctggggaaactcgcatcacaggagcatcgcgaacccaagagaccggaaatcatctttctccccagcgtagattttggcttggagattagcaagcagcggctgctctctggtaattactcttttattccggacgccatgaccgcaaccgaaaagattctatttctgtcatcgatcatccccttcgattgcttgctaacagttagagcccttggagggctcctgaagtttctgggccgccgcagaatcggggtggagctggaagattacaatgtgagtgttcctatcctcggcttcaaaaagttcatgttgacacatttagtgaatatcgatcaagatacatattccgtcctccagatcttcaagtccgaaagtcatcccagtgtgtataaggtggcttctggtctgaaggagggtttatcattattcggaatcttaaacaggtgccactgtaaatggggagagaagcttctgtag

SEQ ID NO: 248293 - DNA, 813 bp, Artificial Sequence
  derived and/or modified sequence
atggcatccctgggagcaaaccctcggagaacccctcagggtcccaggccgggtgcagccagctccggatttcctagccccgctccagtccctggtcctagggaagcggaagaggaggaagttgaagaggaagaggagctggccgagatacatctgtgtgttctgtggaactccgggtatctcggaatcgcctactatgacacctccgacagcacaatccatttcatgccggacgcacccgaccatgagtccctgaagcttctacagagggttctggacgagatcaacccacagtctgtagtcactagcgccaagcaggacgaaaacatgacaagattcttgggtaaacttgcatcccaggaacatcgtgagcctaaaagacccgaaatcattttcctgcccagcgtagattttggtctggagatttctaagcagagactactgagcggtaactactcatttattcctgatgctatgacagctaccgagaagatccttttcttatcttcaatcatccctttcgactgcctcctgacggttcgcgcgttaggaggacttcttaaatttctggggcgtagaagaattggcgtcgagttggaggattacaacgttagcgtgcctatattggggtttaagaagttcatgctaacccacctcgtgaatatagaccaagatacctatagcgtcctgcagattttcaagagcgagtcacatccaagcgtttataaggttgcaagcggcttgaaagaggggctgtcccttttcgggatactgaataggtgccattgtaaatggggagagaagctcctctag

SEQ ID NO: 248294 - DNA, 585 bp, Artificial Sequence
  derived and/or modified sequence
atggcctccctgggcgcaaaccccagacgaacgccccagggcccaaggccaggagccgcttcctcaggttttccctccccggcaccagtcccaggacctagagaggctgaagaagaggaagtagaggaagaggaggaactagccgaaatccatctgtgtgtgctgtggaatagcgggtatttgggaatagcttactacgacacctctgactccaccattcatttcatgcccgacgcgccggatcacgagtccctcaagcttctacaacgcgtgttagatgaaatcaatccacaatcggtcgtgactagcgccaagcaggacgagaacatgactagattcctggggaagctagcctcccaggagcaccgagaacccaagaggccagaaattatctttctgccttctgtcgattttggacttgagatctccaagcagcgattgctttccgggaattatagcttcattccagacgccatgaccgccacggaaaagatactgttcttgtcatctatcatcccgtttgactgccttctcactgtcagagccctcgggggtctgttaaaattcctgggccggaggaggtag

SEQ ID NO: 248295 - DNA, 813 bp, Artificial Sequence
  derived and/or modified sequence
atggctagtctgggtgcgaacccaagaagaaccccacaaggcccacggccaggagcggcctctagtgggtttcctagtccagcaccggttcctgggccaagggaagctgaagaagaagaagtggaggaggaagaagaactggccgaaattcacctttgcgtgctgtggaatagcggttaccttggcatcgcctactatgacaccagtgactccacgatccattttatgcctgacgccccagaccacgaatccctgaaacttcttcagcgagtgctggatgaaatcaacccacagtctgttgttaccagcgccaagcaggacgagaatatgaccaggtttctgggcaaactcgcttcccaggaacatagagaacccaagagacccgagatcatattcctgccttctgtcgatttcggtcttgagatttccaagcagcgattgctgtcaggaaattacagctttattcctgacgctatgaccgccacagagaaaatactgtttctatcttcaataatcccttttgactgcctgctgactgttcgagctctaggcggtcttctaaagtttctgggcaggcgccgaatcggtgtggaactcgaagactacaacgtctcagtgcccatccttggcttcaagaaattcatgctcacccatctagtgaatattgaccaagacacttattctgtactgcaaatcttcaagtctgagtctcacccctctgtctacaaggtggcctctggcttgaaagaaggtctctctctgttcggtatccttaaccgctgtcattgcaagtggggggaaaaactcctgtag

SEQ ID NO: 248296 - DNA, 324 bp, Artificial Sequence
  derived and/or modified sequence
aagattttgtttttaagcagcattattccttttgattgcttgttgactgttagagcccttggggggctcttgaaatttctgggccgacggagaattggcgtggaactcgaagactacaatgtatccgtgccgatactcggtttcaaaaagtttatgttaacacacctggtgaacattgatcaggacacctatagtgtgcttcagatcttcaaaagcgagtcgcaccccagtgtgtacaaagtagcctccggattgaaggaagggctgtctctgttcgggattctaaaccgatgtcattgtaaatggggcgagaaactgctatag

SEQ ID NO: 248297 - DNA, 765 bp, Artificial Sequence
  derived and/or modified sequence
atggcttcccttggcgcaaatcccagaagaacaccgcagggtccgcgcccaggtgctgcttctagtggcttccccagtcccgctcctgtgccaggcccacgcgaagctgaagaggaggaggtcgaagaggaagaagagctggccgagatccacttatgtgtcctttggaattccggatatttgggcatcgcgtattacgatacatccgactcaactattcattttatgcctgacgctccggatcatgagtcactgaagcttctccagagggtgctagacgagataaatcctcagtcggtggtgacttctgccaagcaagacgaaaatatgacacggttcctcggaaaactagcttctcaagagcacagagaacctaagcggccggagattattttcctgcctagcgttgacttcggtcttgagatcagcaaacagaggctgctgtctggcaattatagttttatcccagacgctatgaccgctactgagaagatccttttccttagcagtatcatccctttcgattgtcttctgactgtccgagccctaggaggattgttgaagtttctgggacggcgccgtattggagtggagctcgaggattacaatgtgagcgtccccatcctggggttcaaaaagtttatgcttacccacctcgtgaacatcgaccaagacacttacaggctcgaatgcaacggcgctattagcgcgcagtgcaacttatgtttgcttggtagtagtgattcacccgcaagtgcttcctag

SEQ ID NO: 248298 - DNA, 813 bp, Artificial Sequence
  derived and/or modified sequence
atggccagcctgggcgccaaccccaggaggaccccccagggccccaggcctggagctgccagcagcggcttccccagccctgcccctgtgcccggcccccgggaggccgaggaggaggaggtggaggaggaggaggagctggccgagatccacctgtgtgtgctgtggaacagcggctacctgggcatcgcctactatgacaccagtgacagcaccatccacttcatgccagatgccccagaccacgagagcctgaagctgctgcagagggtgctggatgagatcaacccccagagcgtggtgaccagcgccaagcaggatgagaacatgacccgcttcctgggcaagctggccagccaggagcaccgggagcccaagaggcctgagatcatcttcctgcccagcgtggactttggcctggagatcagcaagcagaggctgctgagcggcaactacagcttcatcccagatgccatgacagccacagagaagatcctcttcctgagcagcatcatcccctttgactgcctgctgactgtgcgggccctgggcggcctgctgaagttcctgggcagaagaagaattggagtggagctggaggactacaacgtgtctgtgcccatcctgggcttcaagaagttcatgctgacccacctggtgaacatcgaccaggacacctacagcgtgctgcagatcttcaagtctgagagccaccccagcgtgtacaaggtggccagcggcctgaaggagggcctgagcctgtttggcatcctgaaccgctgccactgcaagtggggcgagaagctgctgtag

SEQ ID NO: 248299 - DNA, 585 bp, Artificial Sequence
  derived and/or modified sequence
atggccagcctgggcgccaaccccaggaggaccccccagggccccaggcctggagctgccagcagcggcttccccagccctgcccctgtgcccggcccccgggaggccgaggaggaggaggtggaggaggaggaggagctggccgagatccacctgtgtgtgctgtggaacagcggctacctgggcatcgcctactatgacaccagtgacagcaccatccacttcatgccagatgccccagaccacgagagcctgaagctgctgcagagggtgctggatgagatcaacccccagagcgtggtgaccagcgccaagcaggatgagaacatgacccgcttcctgggcaagctggccagccaggagcaccgggagcccaagaggcctgagatcatcttcctgcccagcgtggactttggcctggagatcagcaagcagaggctgctgagcggcaactacagcttcatcccagatgccatgacagccacagagaagatcctcttcctgagcagcatcatcccctttgactgcctgctgactgtgcgggccctgggcggcctgctgaagttcctgggcagaagaagatag

SEQ ID NO: 248300 - DNA, 324 bp, Artificial Sequence
  derived and/or modified sequence
aagatcctcttcctgagcagcatcatcccctttgactgcctgctgactgtgcgggccctgggcggcctgctgaagttcctgggcagaagacgcatcggcgtggagctggaggactacaacgtgtctgtgcccatcctgggcttcaagaagttcatgctgacccacctggtgaacatcgaccaggacacctacagcgtgctgcagatcttcaagtctgagagccaccccagcgtgtacaaggtggccagcggcctgaaggagggcctgagcctgtttggcatcctgaaccgctgccactgcaagtggggcgagaagctgctgtag

SEQ ID NO: 248301 - DNA, 765 bp, Artificial Sequence
  derived and/or modified sequence
atggccagcctgggcgccaaccccaggaggaccccccagggccccaggcctggagctgccagcagcggcttccccagccctgcccctgtgcccggcccccgggaggccgaggaggaggaggtggaggaggaggaggagctggccgagatccacctgtgtgtgctgtggaacagcggctacctgggcatcgcctactatgacaccagtgacagcaccatccacttcatgccagatgccccagaccacgagagcctgaagctgctgcagagggtgctggatgagatcaacccccagagcgtggtgaccagcgccaagcaggatgagaacatgacccgcttcctgggcaagctggccagccaggagcaccgggagcccaagaggcctgagatcatcttcctgcccagcgtggactttggcctggagatcagcaagcagaggctgctgagcggcaactacagcttcatcccagatgccatgacagccacagagaagatcctcttcctgagcagcatcatcccctttgactgcctgctgactgtgcgggccctgggcggcctgctgaagttcctgggcagaagaagaattggagtggagctggaggactacaacgtgtctgtgcccatcctgggcttcaagaagttcatgctgacccacctggtgaacatcgaccaggacacctaccgcctggagtgcaatggagccatcagcgcccagtgcaacctgtgcctgctgggcagcagtgacagccctgccagcgccagctag

SEQ ID NO: 248302 - DNA, 813 bp, Artificial Sequence
  derived and/or modified sequence
atggccagcctgggcgccaacccccggcggaccccccagggcccccgcccaggggcggcaagttcaggctttccatctccagcccccgtgccggggcctcgcgaggcggaagaggaggaagttgaggaggaagaagaactggcggagatacatctctgtgttctgtggaactccggctaccttggcatcgcttactatgacaccagtgacagcacaatacacttcatgccagacgcgccggaccatgagagcctgaagctcctgcagagggtgctcgatgagatcaatccacagtccgtggttacctctgccaagcaagacgagaatatgacacgcttcctcggaaagctggcttctcaggagcacagggagcccaaaagaccggagatcatctttttacctagcgtcgacttcggattagagatcagcaagcaaaggctactgtctggtaattactctttcattccggatgctatgaccgcgaccgaaaaaatccttttcctcagttcaatcattccatttgactgcctgctgaccgtgcgagctctggggggcctgttgaagttcctcggtcggcgccgaattggggtagagctcgaagactacaatgtgtccgttcccatactaggattcaagaagttcatgctgacacaccttgtgaatattgaccaggacacatacagcgtcctgcagatattcaaatcagaaagccatccatcggtgtataaggtggcatccggccttaaggagggactgtccctctttgggattctcaataggtgccattgcaaatggggggaaaaactcctgtag

SEQ ID NO: 248303 - DNA, 813 bp, Artificial Sequence
  derived and/or modified sequence
atggccagcctgggcgccaacccccggcggaccccccagggccccaggcccggagccgctagctccggcttcccgagccccgcccctgtacctggtcccagggaggccgaggaggaagaggtggaggaagaagaggaattggctgagatccacttatgtgtgctgtggaactccggttacttagggatagcctattacgacacgtctgactcaaccattcactttatgccagacgcccctgatcacgagtccctaaagttactccagcgagtcctggatgaaataaatccccaatctgtggttaccagcgcaaagcaggacgaaaacatgaccagatttctgggtaaacttgctagccaggaacaccgcgagccaaaaaggccagagataatcttccttccttccgtggatttcggattagaaatctcaaaacaacggctgctctccgggaactattccttcatacccgacgccatgacagcgaccgaaaaaatcctgtttttgagttctattattccatttgattgcctcctgactgttagagcccttggaggactgctgaaattcctggggcggcgtcggatcggagtagaactcgaggactacaatgtgtctgtgccgatcttaggattcaagaaatttatgctgacacacctcgtgaatatcgaccaagacacatacagcgtgctgcagatcttcaagtctgagtcccacccaagcgtgtacaaggtagcatcagggcttaaggagggactatcactgtttggcatactgaatagatgccattgtaagtggggggagaaattgctgtag

SEQ ID NO: 248304 - DNA, 585 bp, Artificial Sequence
  derived and/or modified sequence
atggccagcctgggcgccaacccccggcggaccccccagggcccccggcccggagccgcttcctcaggcttccctagccccgcccctgttcctggtccccgcgaagctgaggaagaggaggtcgaggaggaagaggagctcgccgagattcacctgtgcgtcctctggaatagtggatacttaggaatagcgtactacgacacgtctgattccacaatacattttatgcctgacgcccccgatcatgaatcgctgaagctattgcagcgggttttggacgaaataaatcctcagagcgttgtcacgtctgcaaagcaagatgagaacatgacacgcttccttgggaaactggccagccaggaacaccgagaaccaaagagaccggagatcatcttcctgccttctgtggacttcgggctcgaaataagtaaacaacggctcttaagcggcaattacagctttatccctgacgctatgacagccaccgagaaaatactcttcctgagctcaatcatcccctttgattgtcttttgactgtgcgggccttggggggcctgctgaaatttctgggtaggcggcggtag

SEQ ID NO: 248305 - DNA, 813 bp, Artificial Sequence
  derived and/or modified sequence
atggccagcctgggcgccaacccccggcggaccccccagggccccaggcccggcgctgcatccagtggatttccatctcctgcacctgtcccaggaccacgggaagcggaggaggaggaggtggaggaggaggaggagctggcagaaattcatctgtgcgtactgtggaattcaggttacctgggaatagcgtattacgatacaagcgatagcacaattcacttcatgccagacgccccagaccatgagagtctaaagctcctgcaaagagtgttagacgagattaacccacaatcagtggtaacctccgctaaacaagatgagaatatgacgcgcttcctgggcaagctggcttcacaagagcatagggaaccaaagagacctgagataatttttctgccctccgtggatttcggacttgaaatatctaagcagcggctcctgagcggcaattacagtttcatccccgacgctatgaccgctactgaaaaaatactattcctatcctccatcattccctttgattgtcttctgaccgttagggcattgggcgggctgctgaagttcttgggccggagacggatcggtgtggaactggaggattacaatgtatctgtacccatcctgggttttaagaagttcatgttaacccaccttgtaaatattgatcaggacacttattctgtgctgcagatttttaagagtgaatcacacccaagcgtatacaaagtggcctcaggactgaaggagggcctgtctctgttcggtatcctgaatcgatgtcattgtaaatggggcgagaagctcttgtag

SEQ ID NO: 248306 - DNA, 324 bp, Artificial Sequence
  derived and/or modified sequence
aagatcctgttcctgagcagcatcatccccttcgactgcctgctgacggtgagggctttaggcggactgctcaaattcctgggaagacgcaggattggggtcgagctggaggattacaacgtttccgtccccatcctaggctttaagaagtttatgcttacacacttggtaaatattgatcaggatacatattcagtcctgcagatttttaagagcgagtcacatccttcggtgtacaaagttgcatccggactgaaggagggattatcacttttcgggattttgaaccgatgccattgtaaatggggggagaagttgctctag

SEQ ID NO: 248307 - DNA, 765 bp, Artificial Sequence
  derived and/or modified sequence
atggccagcctgggcgccaacccccggcggaccccccagggcccccggcctggtgccgcaagttctggtttcccctcgcccgctccggtgccagggccaagagaggccgaggaagaggaggtggaagaggaagaagaacttgcagaaattcacctatgtgtgctgtggaactctgggtacctgggtatcgcttactacgacaccagtgattctacaatccatttcatgcccgatgctcccgatcatgagtccctgaaactgttgcagcgcgtcctggacgaaatcaacccccagagcgtggtgacatcggctaagcaggacgagaatatgactagatttcttggcaaactcgcctcacaggagcaccgggagcccaaaagacctgagatcatttttctgccctccgtggacttcggactggagatatccaaacagcgattattgtcagggaactactcttttatcccagatgcaatgaccgccacagagaaaatcttgttcctgtcatcgatcatcccgtttgactgtctattaacggtgagggccttgggcggcctcttgaagtttttgggccgccgcaggattggcgtcgaactggaagattataacgttagtgtgcccatcctcggttttaaaaaatttatgttaacccatctcgtgaacattgaccaggatacttacaggctagagtgtaatggcgctataagcgcccagtgcaacttatgtctgctgggcagttctgattcacccgctagcgccagctag

SEQ ID NO: 248308 - DNA, 1046 bp, Artificial Sequence
  derived and/or modified sequence
cgctccttttgcaggctcgtggcggtcggtcagcggggcgttctcccacctgtagcgactcaggttactgaaaaggcgggaaaacgctgcgatggcggcagctgggggaggaggaagataagcgcgtgaggctggggtcctggcgcgtggttggcagaggcagagacataagacgtgcacgactcgccccacagggccctcagaccccttccttccaaaggagcctccaagctcatggcctccttaggagcgaacccaaggaggacaccgcagggaccgagacctggggcggcctcctccggcttccccagcccggccccagtgccgggccccagggaggccgaggaggaggaagtcgaggaggaggaggagctggccgagatccatctgtgtgtgctgtggaattcaggatacttgggcattgcctactatgatactagtgactccactatccacttcatgccagatgccccagaccacgagagcctcaagcttctccagagagttctggatgagatcaatccccagtctgttgttacgagtgccaaacaggatgagaatatgactcgatttctgggaaagcttgcctcccaggagcacagagagcctaaaagacctgaaatcatatttttgccaagtgtggattttggtctggagataagcaaacaacgcctcctttctggaaactactccttcatcccagacgccatgactgccactgagaaaatcctcttcctctcttccattattccctttgactgcctcctcacagttcgagcacttggagggctgctgaagttcctgggtcgaagaagaatcggggttgaactggaagactataatgtcagcgtccccatcctgggctttaagaaatttatgttgactcatctggtgaacatagatcaagacacttacagtgttctacagatttttaagagtgagtctcacccctcagtgtacaaagtggccagtggactgaaggaggggctcagcctctttggaatcctcaacagatgccactgtaagtggggagagaagctgctcag

SEQ ID NO: 248309 - DNA, 867 bp, Artificial Sequence
  derived and/or modified sequence
gcggtcggtcagcggggcgttctcccacctgtagcgactcagagcctccaagctcatggcctccttaggagcgaacccaaggaggacaccgcagggaccgagacctggggcggcctcctccggcttccccagcccggccccagtgccgggccccagggaggccgaggaggaggaagtcgaggaggaggaggagctggccgagatccatctgtgtgtgctgtggaattcaggatacttgggcattgcctactatgatactagtgactccactatccacttcatgccagatgccccagaccacgagagcctcaagcttctccagagagttctggatgagatcaatccccagtctgttgttacgagtgccaaacaggatgagaatatgactcgatttctgggaaagcttgcctcccaggagcacagagagcctaaaagacctgaaatcatatttttgccaagtgtggattttggtctggagataagcaaacaacgcctcctttctggaaactactccttcatcccagacgccatgactgccactgagaaaatcctcttcctctcttccattattccctttgactgcctcctcacagttcgagcacttggagggctgctgaagttcctgggtcgaagaagaatcggggttgaactggaagactataatgtcagcgtccccatcctgggctttaagaaatttatgttgactcatctggtgaacatagatcaagacacttacagtgttctacagatttttaagagtgagtctcacccctcagtgtacaaagtggccagtggactgaaggaggggctcagcctctttggaatcctcaacagatgccactgtaagtggggagagaagctgctcag

SEQ ID NO: 248310 - DNA, 694 bp, Artificial Sequence
  derived and/or modified sequence
gcgccggcgcgctccttttgcaggctcgtggcggtcggtcagcggggcgttctcccacctgtagcgactcagggccctcagaccccttccttccaaaggagcctccaagctcatggcctccttaggagcgaacccaaggaggacaccgcagggaccgagacctggggcggcctcctccggcttccccagcccggccccagtgccgggccccagggaggccgaggaggaggaagtcgaggaggaggaggagctggccgagatccatctgtgtgtgctgtggaattcaggatacttgggcattgcctactatgatactagtgactccactatccacttcatgccagatgccccagaccacgagagcctcaagcttctccagagagttctggatgagatcaatccccagtctgttgttacgagtgccaaacaggatgagaatatgactcgatttctgggaaagcttgcctcccaggagcacagagagcctaaaagacctgaaatcatatttttgccaagtgtggattttggtctggagataagcaaacaacgcctcctttctggaaactactccttcatcccagacgccatgactgccactgagaaaatcctcttcctctcttccattattccctttgactgcctcctcacagttcgagcacttggagggctgctgaagttcctgggtcgaagaaga

SEQ ID NO: 248311 - DNA, 891 bp, Artificial Sequence
  derived and/or modified sequence
gcgcgctccttttgcaggctcgtggcggtcggtcagcggggcgttctcccacctgtagcgactcagagcctccaagctcatggcctccttaggagcgaacccaaggaggacaccgcagggaccgagacctggggcggcctcctccggcttccccagcccggccccagtgccgggccccagggaggccgaggaggaggaagtcgaggaggaggaggagctggccgagatccatctgtgtgtgctgtggaattcaggatacttgggcattgcctactatgatactagtgactccactatccacttcatgccagatgccccagaccacgagagcctcaagcttctccagagagttctggatgagatcaatccccagtctgttgttacgagtgccaaacaggatgagaatatgactcgatttctgggaaagcttgcctcccaggagcacagagagcctaaaagacctgaaatcatatttttgccaagtgtggattttggtctggagataagcaaacaacgcctcctttctggaaactactccttcatcccagacgccatgactgccactgagaaaatcctcttcctctcttccattattccctttgactgcctcctcacagttcgagcacttggagggctgctgaagttcctgggtcgaagaagaatcggggttgaactggaagactataatgtcagcgtccccatcctgggctttaagaaatttatgttgactcatctggtgaacatagatcaagacacttacagtgttctacagatttttaagagtgagtctcacccctcagtgtacaaagtggccagtggactgaaggaggggctcagcctctttggaatcctcaacagatgccactgtaagtggggagagaagctgctcag

SEQ ID NO: 248312 - DNA, 323 bp, Artificial Sequence
  derived and/or modified sequence
aaaatcctcttcctctcttccattattccctttgactgcctcctcacagttcgagcacttggagggctgctgaagttcctgggtcgaagaagaatcggggttgaactggaagactataatgtcagcgtccccatcctgggctttaagaaatttatgttgactcatctggtgaacatagatcaagacacttacagtgttctacagatttttaagagtgagtctcacccctcagtgtacaaagtggccagtggactgaaggaggggctcagcctctttggaatcctcaacagatgccactgtaagtggggagagaagctgctcag

SEQ ID NO: 248313 - DNA, 944 bp, Artificial Sequence
  derived and/or modified sequence
cttttgcaggctcgtggcggtcggtcagcggggcgttctcccacctgtagcgactcagagcctccaagctcatggcctccttaggagcgaacccaaggaggacaccgcagggaccgagacctggggcggcctcctccggcttccccagcccggccccagtgccgggccccagggaggccgaggaggaggaagtcgaggaggaggaggagctggccgagatccatctgtgtgtgctgtggaattcaggatacttgggcattgcctactatgatactagtgactccactatccacttcatgccagatgccccagaccacgagagcctcaagcttctccagagagttctggatgagatcaatccccagtctgttgttacgagtgccaaacaggatgagaatatgactcgatttctgggaaagcttgcctcccaggagcacagagagcctaaaagacctgaaatcatatttttgccaagtgtggattttggtctggagataagcaaacaacgcctcctttctggaaactactccttcatcccagacgccatgactgccactgagaaaatcctcttcctctcttccattattccctttgactgcctcctcacagttcgagcacttggagggctgctgaagttcctgggtcgaagaagaatcggggttgaactggaagactataatgtcagcgtccccatcctgggctttaagaaatttatgttgactcatctggtgaacatagatcaagacacttacaggctggagtgcaatggtgcgatctcggctcaatgcaacctctgcctcctgggttcaagcgattctcctgcctcagcctcctgagtaactgggattacaggcacctgccaccacgcccagctaatttttgtatttttagtagagacggggtttcaccatgttgcccaggctggtcttgaactcctgacctca

SEQ ID NO: 248314 - DNA, 813 bp, Artificial Sequence
  derived and/or modified sequence
atggcatccttaggggctaatcccaggcggacaccccaggggccacggcctggcgcagcctcgtctggctttccttcaccagctcctgtgccaggacccagagaggccgaggaggaggaggtggaggaggaggaggagctggctgagatccatctctgcgtgctctggaactccgggtatctcggaatcgcatattatgacacaagcgattccacaatccactttatgcccgatgctcccgaccatgaaagtcttaagttactgcaacgcgttctggatgaaattaaccctcaaagcgtcgtcacaagcgcaaagcaggacgaaaatatgactcggttcctgggcaaattagcctcccaggaacacagagagcccaagcgccctgagattattttcctcccatcggtcgacttcggtcttgagatcagcaagcaaagactactttccggcaattattcatttatcccggacgctatgactgccacagagaaaatattgttcctgtcctctataattcctttcgactgtctgctgaccgtccgggcactgggaggtctcctaaaatttcttggcaggaggcgcatcggtgtggaactggaggactataacgtctctgtacccatattgggcttcaaaaaatttatgttgacccacctggttaatattgatcaggacacatattcagtattacagatcttcaaatccgagtcacaccctagcgtgtataaagttgcttcggggctaaaggaaggcttgagcctgttcggtatcctaaaccgatgtcactgcaaatggggcgagaaattgctgtag

SEQ ID NO: 248315 - DNA, 813 bp, Artificial Sequence
  derived and/or modified sequence
atggcgagtctaggagccaatcctagacggacaccccagggccctaggcctggtgcagcgtcctctggcttccctagcccagcgcctgttcctgggccacgtgaggctgaagaagaggaagttgaggaggaggaggagctggctgagattcacctgtgcgtactgtggaattccgggtacctagggatcgcttattacgacacatctgactccacaattcactttatgcctgacgcacctgatcacgaatctttaaagctcttacagcgggtgctggacgagattaatccacagtccgttgtcaccagtgcaaagcaggacgaaaatatgacaagatttctgggtaaactggccagccaggagcatagggagcccaaacggcctgagataatttttctgccatcagtggactttggtttggagatctctaaacagagacttttaagcggcaactattcatttattcccgatgctatgaccgccacagaaaaaatcctgtttctgtccagcatcatcccctttgattgtctgctgaccgtcagagctcttgggggactgctcaagtttctgggtaggcgacgcattggcgtcgaactggaagactacaatgtgtctgtgccaattttgggtttcaagaagttcatgctaactcatctggtgaatatcgaccaggatacgtacagcgttctgcagatcttcaaatctgaaagccacccatccgtatacaaggtggcgtctggtctgaaagaaggcctgagtctcttcgggatcttgaatcggtgtcattgcaaatggggggaaaagttgctctag

SEQ ID NO: 248316 - DNA, 585 bp, Artificial Sequence
  derived and/or modified sequence
atggcttccctgggtgccaaccctaggagaacaccccagggacccaggcccggagctgcgagctccggtttcccatctcccgcacctgtccctggaccacgggaagcagaggaggaagaggtagaggaagaggaggagctagctgagatacacttgtgcgttctgtggaacagtggatatttaggaatcgcctactatgatacctccgattcaacgatccattttatgcccgatgctccggaccacgagtctcttaaactcctccagagagtgctggatgaaatcaatcctcaatccgttgttacatctgctaagcaggatgaaaatatgacgcgcttccttgggaaactcgccagccaagagcatcgggagccaaagaggcccgagattatcttccttccttccgtcgatttcgggctagagatcagtaaacagcggctgctctcgggtaactattccttcatccccgatgccatgacagcgactgaaaagatcctttttctctcgtccataattccttttgactgcctcctcacagttcgtgctcttggcggactgcttaaattcctaggaagacgcagatag

SEQ ID NO: 248317 - DNA, 813 bp, Artificial Sequence
  derived and/or modified sequence
atggcctccctgggcgcaaaccctagaaggacacctcagggccctaggcctggcgctgcctccagtgggtttccatcacccgctccggttcctggcccaagggaggctgaagaggaggaagtggaggaggaggaggagcttgcagaaatccatctgtgtgttctgtggaactctggatacctcggtatagcctactacgatacatccgactccaccatccatttcatgccggatgctccagaccacgaaagcctgaagttactccaacgcgtgttggacgaaattaatccccagtccgtggtgacttccgcaaaacaagacgagaatatgacccgcttcctaggcaaactggcatcccaagagcacagagagcccaagcgaccggaaatcatttttctacccagtgttgattttggcttggagatctctaaacagcggctgctatctggaaattattctttcattcccgacgcaatgacagccaccgaaaagatactgtttctttctagtatcattcccttcgattgtctcctgacagtgagggctcttggtggattgctgaagtttctcggaagacgccgtattggggtagaactggaagactacaatgtgagtgtcccaatcttgggatttaagaagtttatgctcactcaccttgtgaacatcgaccaggacacttattctgtcctgcagatttttaaaagtgagagccaccccagcgtctacaaggtggcaagcgggctcaaggaggggttgagtctgttcggcatcctgaatcgctgccattgcaaatggggtgaaaagcttctgtag

SEQ ID NO: 248318 - DNA, 324 bp, Artificial Sequence
  derived and/or modified sequence
aagatcctgtttctctcatccattatacccttcgattgcctgctgaccgtgcgagcgttgggagggctgctgaagtttcttgggaggagaaggatcggcgtggaactggaagattataacgttagcgtgcctattttaggttttaaaaagttcatgctcacccacttggttaatatagaccaggacacatactcggtcttgcagatctttaagagtgagtctcatcccagtgtctataaagttgctagtggtctcaaggagggactttccttattcggcattcttaacaggtgccattgcaagtggggggaaaagttgctgtag

SEQ ID NO: 248319 - DNA, 765 bp, Artificial Sequence
  derived and/or modified sequence
atggcctctcttggcgctaaccccaggagaacacctcagggacctcgaccgggtgcggcatcctcagggtttccaagcccagcccctgtgcccggacccagggaggctgaggaagaggaggtagaggaggaggaggaattggctgagatccatttatgtgtgctttggaattctggctatttggggattgcttactatgatacttcagacagtaccatacacttcatgcctgacgcacctgaccacgagtctcttaaacttcttcagcgggtccttgatgaaatcaatcctcaaagcgttgtgactagtgctaagcaggacgagaatatgacccgcttccttggcaaactcgcgtcccaggaacacagagagcccaagcgaccagaaatcatattcctgccgagcgtggatttcggactagaaatttccaaacagagactgctttccggcaactattcattcataccagatgcaatgaccgcgaccgaaaaaattctatttctcagtagtattattccctttgactgcctgctaacagttcgagcattggggggactgctcaaattcttgggacgcaggaggatcggggtagaactggaagactacaacgttagcgtgcctatactgggcttcaagaaatttatgctgactcacctagtcaatattgatcaggacacataccgactggagtgtaatggagccatatcagcacagtgcaacctttgcctcctgggctccagtgattcccctgcttctgccagctag

SEQ ID NO: 248320 - DNA, 2556 bp, Artificial Sequence
  derived and/or modified sequence
atggcctctctgggagctaacccaaggaggactccccagggcccaagacccggtgctgcatcatcaggtttcccttctcccgcccccgttcctggtcctagagaggccgaggaagaagaggtggaggaggaggaagaacttgccgaaattcacctctgcgtgttatggaactcaggttatctgggcattgcatactatgacacctccgacagtaccattcactttatgcccgacgccccggatcatgaatctcttaagctgctccaaagagtgctagatgagatcaacccacagagcgtggtgaccagtgccaagcaggacgagaatatgacaagattcctgggcaaactagcctcacaggagcatcgcgagccaaagagacctgagatcatcttccttccttccgttgattttggactcgaaatatctaagcagcgtctgcttagtggcaattatagttttataccggatgcaatgaccgctaccgagaaaatactgttcttgtctagtattattccattcgattgcttgctgacacccccaggtgatctgagatttactccaatcccactcctcataccaagtcaagtccgcgccctgggaggactgctaaagttcctgggccgacggaggattggagtggagctggaagactacaatgtctccgtgccaattctgggattcaagaagtttatgctcacacacctggtaaatatcgaccaggacacctactccgttctgcaaatcttcaagtcagagtctcacccaagcgtctacaaggtagcctctggactgaaagaaggtctgagcctgttcggaattctcaatcgatgccattgcaagtggggcgagaaattactgaggctgtggttcactcggcctacccatgatctgggcgagcttagtagtcggctggatgtgatccagtttttcctcctgccccagaacctggatatggcacaaatgctgcaccgacttttaggacacataaagaacgtaccactcatcctgaagcgaatgaaactttcccacacgaaagtttcggactggcaggtcctgtataagactgtttattccgcgttgggcttgcgcgacgcatgtaggtccttgcctcagtcaatccagctgtttcgggatatcgcccaagagttttctgacgatctgcaccatattgcctcactcattggcaaagttgtggacttcgagggctcccttgcggaaaacagattcacagttcttcctaatatcgaccctgaaatcgatgagaaaaagcgccgcctcatgggcctgccgtccttcctgaccgaggtcgctcggaaggaacttgaaaacctggactctcggattccctcttgttcagtgatttacatcccactcatcggatttttactcagcatcccgaggttgccttccatggtggaggccagcgattttgagatcaacggccttgatttcatgtttctgtcggaagagaagctgcattatcgtagcgctcgaacaaaagagctggatgcactgctgggtgatctacactgcgaaatccgtgaccaggagaccctgctaatgtaccagctccagtgccaggtattggcaagagccgcagtgttgactcgggttctggacctggcctcgcgcctcgatgtgttgctggctctagctagtgcagcccgcgactacggatatagccgaccccgctactccccgcaggttttgggtgtcagaatacagaacggcagacatcctctaatggaactttgtgcccgcaccttcgttcctaattctacagaatgcggaggggacaaagggcgcgttaaggtcattacgggaccaaattccagcggcaagtccatatacctgaagcaggtggggctgatcacattcatggctttagttggatctttcgtgcctgcggaggaggccgagattggggcagtcgacgccatctttactagaattcattcatgcgagtcaataagtttgggtctgagtactttcatgatcgatcttaaccaggtggcaaaggccgtgaacaacgccactgcccagtccctggtactgatcgatgaatttggcaaagggacaaacaccgtggatgggctggccctccttgcagcagtgctacgccattggctcgctcggggccccacctgccctcacatattcgtcgcaactaactttctcagcctggtgcagctccagttactgcctcagggcccactggtgcagtacctgaccatggaaacttgcgaggacggtaacgacttggtttttttttaccaggtttgcgaaggcgttgccaaggcatctcacgcaagtcacaccgctgctcaagccggtctgcccgataaattggtcgcccgcgggaaggaggttagcgacttgatccggagcggcaagccaatcaaacccgtgaaagatctgctgaaaaaaaatcagatggagaattgtcagacgctcgtcgataaattcatgaagttggacctggaggatccgaacttggacctgaatgtttttatgtcgcaggaggtgctcccggcggcaacctccatcttatag

SEQ ID NO: 248321 - DNA, 2505 bp, Artificial Sequence
  derived and/or modified sequence
atggcctctctgggagctaaccctagaaggactccgcagggaccgaggcctggggccgctagctctggtttccccagccctgcccccgtgccaggtcctcgggaggcagaggaggaggaagtcgaggaggaagaagagctcgccgaaatccacctttgcgtactttggaactctggttacctcgggatagcttactatgacacaagcgactctaccatacacttcatgccggacgctccagaccacgaaagtttaaagctgctgcagagggtcctagacgagatcaatccccagtccgttgttacctcggctaagcaggatgagaacatgacccgctttcttgggaagctggcctcccaagaacacagagagccaaagagaccagagattatcttcctgcctagcgtggattttggactggagatctcaaagcagcgtttactgagtgggaactactccttcattcccgacgccatgacagcaacagaaaaaattctctttctgagttccattatcccgtttgactgtctgctcaccgtgagagccttaggggggctgcttaagttcctggggcgccgtcgcatcggcgtcgaactagaagattacaatgtgtccgttccgatcctgggcttcaagaaattcatgctgactcacttggtcaacatagaccaggacacctactctgtgcttcagatcttcaagagtgagtcccacccatctgtctataaggtggctagcgggctcaaagaaggcctctcactcttcgggatcttaaacagatgtcattgtaagtggggggaaaagttgcttagactgtggtttaccagacccacccacgacctcggcgaactgtctagccgcttggatgtgatacagttttttttattgcctcaaaacctcgatatggcccagatgctgcaccggctgcttggacacataaaaaatgtcccgctcatcctaaagagaatgaagctcagccatacaaaggtgtccgactggcaggttctgtacaaaaccgtgtatagcgccctcgggctcagagacgcctgcaggagcttacctcagagcatccagttgttcagggatatcgcccaggagtttagtgacgatctgcaccacattgcatccttaataggcaaggtcgtggactttgagggatcacttgccgagaatagattcacagttcttcccaatatcgatccagagatagatgagaaaaagaggagactaatgggtttgcccagtttcctgaccgaggtggcaaggaaggagttagaaaaccttgattcccgcataccttcatgcagcgtaatctatatccccttgatcggttttctgctctcaatccctcggcttcctagcatggtagaggcaagcgatttcgaaataaacggattggactttatgttcctcagcgaggagaaattgcattacaggtctgcacggaccaaggagttggacgcgctcctcggagatctccactgtgagatccgtgatcaagagaccttactgatgtatcaacttcagtgtcaagtgcttgcccgggccgcggtgctgacaagggttctcgacctagcaagtaggctggatgttctgctggcgctggcaagcgcagcacgggattatggttatagtcgccctagatactccccccaggttctcggtgtgcgcattcagaacggacggcaccctcttatggaactgtgcgcccgcacctttgtgccgaactccacagaatgtggaggggataagggccgcgtgaaggtcatcaccggcccgaattcatcaggaaagagcatctacctgaagcaagtcgggctgatcaccttcatggctttggtcggatcattcgtgccagccgaggaggccgaaatcggcgcagtcgatgccatcttcactcggatccacagctgcgagagtatttcactggggctgagtacttttatgatcgatctgaaccaagttgctaaggcagtcaacaatgccacagctcaaagcctcgtgctaattgatgagttcggcaaagggactaatacagtggacggtcttgccctgctggcagcagtgctgcggcactggctggccagaggcccaacttgtcctcatattttcgtggctactaattttctgtccttagtgcagctgcagctgcttccccagggacccttagtgcagtatctgaccatggagacatgcgaggacggaaacgatttggtttttttttatcaggtgtgcgaaggagttgccaaggcgtcgcatgcctctcacactgcagcccaagctggtctgcctgataaactcgtcgctcgcggcaaagaagtaagcgacctgattcgctcgggcaaacccattaaacctgtgaaagatctactgaagaagaaccagatggagaactgccagacccttgtggacaagttcatgaagcttgacttggaagatccaaacctggacctcaacgtgtttatgagccaagaagtgctgccagccgccactagtatcctctag

SEQ ID NO: 248322 - DNA, 2505 bp, Artificial Sequence
  derived and/or modified sequence
atggctagccttggagcaaatccccggcgtactccacagggtccccgacctggtgccgcctcttctggatttcctagccccgcccctgtgccaggcccccgggaggctgaagaggaagaagttgaagaggaagaagaactggcagagatccacttgtgcgtgctgtggaatagtggctatctgggcatcgcttattacgacacctccgactccactatccactttatgcctgatgcaccagaccatgagagcctgaagctcctgcagagagtccttgacgagatcaatccccagagtgtggtgaccagtgccaaacaggacgagaacatgacgcgcttcctgggtaaactggctagccaggaacatagagaaccaaagaggcctgaaatcatttttctgcctagcgtggacttcgggctggagatttccaagcaacgactgctctctggcaactatagtttcatacccgacgccatgacagccaccgaaaaaatactcttcttaagcagcatcattcctttcgattgtctgctgaccgtccgggccctcggtggattgttaaagttcttgggtcgaaggaggatcggagtggagttggaagattataacgtttcagtcccaatcctaggctttaagaagtttatgctaacacacctagtcaatattgaccaggacacttactctgtactccagatctttaagagcgaaagccatccatcagtatacaaagtcgcgagtggcctcaaggagggactatctctgtttgggatcctgaacagatgtcactgcaaatggggggagaagctgctccgcctctggtttactcggcccacccacgacctcggagagctgagcagtcggctggatgtcattcaattcttcctccttccacagaacctggacatggcccagatgctgcacagacttctgggacatattaagaacgtgcctttaattctgaagcggatgaagctctcacatacaaaggtgtcagactggcaagtgttgtataagacagtgtatagtgctctggggctgcgcgacgcttgccgttccctgccccagagtatccaactcttcagagacatagctcaggagttcagcgacgacctccaccacatcgccagcctcatcggaaaagtggtggattttgagggttcgctggctgagaaccgcttcacagttctgccaaacattgaccctgagatagacgaaaaaaaacggcgtctaatgggcttaccctcctttctgacagaggtggcacgcaaggagcttgaaaacctggactccaggatcccgagctgtagcgtgatatatattccgctcataggattcctcctttccattccaaggcttccctcaatggtcgaagctagtgacttcgagataaacggcctggatttcatgtttctgtcagaagagaaactgcactacaggagcgctagaactaaggagctggatgctcttctcggagatcttcattgtgagatcagagatcaggaaaccttgctgatgtaccaattgcaatgtcaggtcctagctcgggctgccgtactgacccgcgtactggacctggcatccaggttggatgttctattggcgctcgcctccgcagcccgcgattacgggtactcgcgccctcggtactccccacaggtgctcggcgtccgcatccagaatggtcgtcaccctcttatggagctctgcgctcggacatttgtgccaaactcaaccgaatgcggtggtgacaaagggcgtgtgaaggttattaccggtcccaactccagtggcaaaagtatctacctgaaacaggttggtctcattacattcatggctctcgtgggatcattcgtgccagctgaggaggcagagattggtgcggtggatgccatcttcacacgcatccacagctgtgagtccatttcactcgggttatcgactttcatgatcgaccttaatcaagtggcgaaagcagtaaataatgctactgcccagtccctcgtgttgatagatgagtttggaaagggaactaatacagtggatggcctggccctcctagccgcagtccttcggcactggttggcgcgcggtcctacatgcccgcacatcttcgtggccaccaatttcctgagcctcgtgcaacttcagctcttgccacagggccccctggttcagtacttaactatggagacatgcgaggatgggaatgatctcgtgttcttctaccaggtatgtgaaggtgtggctaaggcttcccatgcttctcacacagctgctcaggctggcttgcctgacaagcttgtggctcggggaaaggaagtctctgaccttataagatctggaaagccaattaaacccgtgaaggatctcttgaagaaaaaccagatggaaaattgtcagactctggtagacaagttcatgaaactcgacttggaagaccccaacctggatctgaacgtgtttatgagccaggaagtgcttcctgcagccacttcaattctgtag

SEQ ID NO: 248323 - DNA, 816 bp, Artificial Sequence
  derived and/or modified sequence
atgttcttgtctgaggaaaaacttcattacagatctgcacgcacaaaagagctggacgcccttcttggagatctgcactgcgagatcagagaccaggagaccctgcttatgtatcaacttcaatgccaggtgctggctagggccgccgttctgactcgcgtcctggatctggcctcccgacttgatgtgctgctggccctggcttcagccgctcgcgattacggctactcacgccctcgctatagcccccaggtgctcggggtcaggatccaaaatggacgtcatccactgatggaactgtgcgcgcggactttcgtgccaaatagcaccgagtgcggaggggataagggaagagtgaaggtgatcacggggcccaattccagtgggaagtccatctatctaaaacaagtagggttgatcactttcatggcactagtaggttctttcgtccccgcagaagaggctgagatcggagcggtggacgctatttttacccgtatccactcatgtgagtcaatcagtctcgggcttagcactttcatgattgatttaaaccaggtcgcgaaggccgtgaacaatgctacagcccagtctctcgttctgattgatgaattcgggaagggtacaaacaccgtcgacggactggccctgctagccgccgttctaaggcattggttggccagggggcccacatgtccacatatctttgtggctacaaacttcctgtctctggtccaactccagctccttccccagggacccttggtgcagtacctggattggccccgcgtttctggccaggagggaggtgactag

SEQ ID NO: 248324 - DNA, 1002 bp, Artificial Sequence
  derived and/or modified sequence
aagattcttttcctatccagtatcatccctttcgactgtctgctaaccgtgcgagctttaggcggactgttaaagttccttggaaggcgtcggattggagtggagctcgaggattataatgtatctgttcccatccttggtttcaaaaaatttatgctgacccacctggtaaacatcgatcaggatacgtattctgtcctgcagatcttcaagtccgaaagccatcccagtgtctacaaagtggcttccggtctcaaggaaggcctgagtctcttcgggattctgaatagatgccattgcaagtggggggagaaattgctacgactctggtttactaggcccacacatgacctcggagaacttagctcccgcctagatgtcattcagttctttctcctgccacagaatctggacatggctcagatgctgcatagattactaggccacatcaaaaacgtgcccctaattctgaaacgcatgaagctatcacatactaaggttagcgactggcaggtgttatataaaaccgtatatagcgcattaggcctacgtgacgcttgcaggtcgttacctcaatcgatccaactgtttagggatatagcccaggagttcagcgatgatctccatcacatagcgtccctgatcgggaaggtgtatttatctccacaggtcgactttgagggcagtttagccgagaacaggtttacggtgctgcccaacatcgatccagagattgatgagaaaaaaaggagactcatgggcctgccaagcttcctgaccgaggtggcccgtaaagagcttgagaatcttgacagccgcatcccaagttgctctgtgatatacattcccctaattggtttcctactgtccatacctagactcccaagtatggttgaggcatctgatttcgaaataaacggattagattttatgttcctctccgaagaaaaactgcattacaggagtgcccgcactaaggagctcgatgctcttctcggatag

SEQ ID NO: 248325 - DNA, 1527 bp, Artificial Sequence
  derived and/or modified sequence
atgtggcctgtcctcctcttcgtctttctttctcagaccgtttactcagcactgggattgcgcgatgcttgcaggtccctcccacagagcattcaactgtttagggatatcgctcaggaattcagcgacgacttgcatcatattgcgagccttattggcaaggtggtggattttgagggctctctggccgaaaataggttcaccgttctgccaaacattgatccggagatcgacgaaaagaagaggagactgatgggcctgcctagtttcctgactgaagtggcccgaaaagagctggagaatttagattctcggatacccagttgtagcgtgatttatatacctcttattgggtttttgctctctattccaaggctgccatcaatggttgaggcgtctgattttgagatcaatggcctagactttatgtttttgtctgaagagaagctccattatcggagcgcgcgcaccaaagagctggacgctcttctgggagacctgcattgtgagattcgggaccaggaaaccttgttgatgtatcagctgcagtgtcaggttctggcccgggcagcagtgctgaccagagtgctagatctggcctcaagattggatgtccttctggccttggcctctgcagccagggattatggctattcccgcccaagatattccccccaggtcctcggagtcaggattcagaacggtcggcaccctttgatggaactgtgcgcaagaacctttgtgcctaatagcaccgagtgtggcggagataagggacgggtgaaagtaataacggggccgaactctagtggaaaatccatctacctaaagcaggtggggttgattactttcatggccttagtggggtctttcgtccctgccgaagaggctgaaatcggcgctgtggatgcaatctttactcgaatccactcttgcgagagtatttctctcgggctgagcacattcatgatcgatctgaatcaggtggcgaaggcagtgaacaatgcgactgcccagagccttgtcctgattgatgaatttggcaagggaaccaacaccgttgacggactggcactcctagctgctgtcttgcgtcactggctggcacgcggccccacgtgcccacacatatttgtcgcgaccaatttcctgtcactggtccaattacagctgctccctcaaggccctctggtgcagtatctgactatggaaacgtgcgaggatggcaatgatctagtattcttttaccaggtgtgtgaaggagtcgcgaaagccagtcatgctagccacactgctgcccaagccggactgccagataagctggtcgctaggggtaaagaggtatcagatctgatccgcagcggaaagcccatcaaaccagttaaggaccttttgaagaaaaatcaaatggagaactgtcagactctggtggacaagttcatgaagctcgatttggaggacccaaacctggatctcaacgtgttcatgagccaggaagtgctcccagcggccacaagtatcttatag

SEQ ID NO: 248326 - DNA, 2505 bp, Artificial Sequence
  derived and/or modified sequence
atggcctctctcggcgccaacccgcggcgcacaccacagggaccccggcccggtgccgcctcgagtggctttccttccccggccccagtccccggccctcgagaggccgaagaggaggaggtcgaagaggaagaagaactggccgagatacatctctgtgtgctgtggaattccggctatctgggcatcgcatactatgataccagtgatagcaccatccactttatgccagacgcacccgatcatgagtcgctgaaattactgcagagggtgctggacgaaattaatcctcagagcgtagtgacaagtgccaagcaagacgaaaatatgacaaggtttctgggtaaattggcgtcccaggaacatcgagagccaaagaggcctgaaatcatctttctgcctagtgttgactttgggctggaaataagtaagcagcgactgctgtccgggaattacagcttcattccagacgctatgaccgctacagagaagatcctttttttatcgtcaattatccccttcgactgcttattaacagtgagagccctgggtggcttgctgaagttccttggccggcgcagaatcggtgttgaattggaggattataacgtgagtgttccaattcttggctttaagaagttcatgctcacccacttggtaaacatcgatcaggacacatatagtgtccttcagatcttcaagtcagaatcacacccctctgtatacaaggtggcatctgggttgaaagagggcttgtctctgttcggaatattgaatcgttgtcactgtaaatggggggagaaactcttgcgtctgtggtttacacgacctacccatgaccttggggaattgagcagccggctggacgtcatccagtttttcttgctcccacagaacctagatatggcccagatgcttcacagactgttgggccatataaagaacgttcccctgattctcaagcgcatgaagcttagccatacaaaagtgagcgattggcaggtgctgtacaaaactgtgtactccgcactgggcctgagagacgcctgcaggtcattgcctcaatccatccagctgttcagagacatcgcccaggaattcagtgatgacttacatcacattgccagccttattggtaaggtggtagacttcgaaggatcattggcagaaaacagatttactgtgctcccgaacattgatcccgagatcgacgagaaaaagcggagactgatggggttaccctcatttctaacagaagtcgccagaaaggaactagaaaatctcgactctcggattccctcttgttctgtgatctatattccgcttattggctttctgctctctatccctagactgcctagcatggtcgaggctagcgattttgaaattaatggcctggatttcatgtttttatcagaggaaaagttgcactataggtctgcacgcacaaaagagttagacgccctgcttggtgacttgcactgcgagatccgcgaccaggagaccctgctaatgtaccagctgcagtgccaggtactggctagggcagccgtactaacccgggtgctagacttggcgagtcgcctcgatgttttgctcgctcttgcgtccgccgccagggactatggctactcaagacccagatattctccgcaggtcttgggcgtaaggatccagaatgggaggcaccccctcatggagttgtgcgcgcggaccttcgtgcccaacagcaccgaatgcggaggggacaagggtcgtgtgaaggtgattaccggacctaacagctccggcaaatccatttacctgaagcaggtgggattgatcacctttatggctctggtgggatccttcgtgccggctgaggaggcagaaatcggcgctgtcgacgccattttcacccggatccactcctgcgagtctattagtctcggactgagcacatttatgatcgacctgaaccaggtggccaaggctgtgaacaacgcaacggctcagtcgttagttctcatcgacgagtttggcaaagggaccaacaccgtggatggattggcccttttagcggccgtgctgcgccattggttggcccgaggtccgacctgcccacatatattcgtagctaccaactttctcagcctggtgcagctgcagttgttacctcagggccccctggtccagtacctgaccatggaaacctgcgaggatggaaacgacctggtattcttttatcaggtttgtgaaggagtcgcgaaagccagccacgccagccacactgctgcccaggcaggacttcccgacaagttggtagcgcgaggcaaagaagttagtgacctgatcaggagtggaaagccgattaagcccgtcaaagacctccttaagaaaaatcagatggagaactgccaaaccttggtcgacaagttcatgaagctggatctggaagacccgaacttagacttgaatgtctttatgagccaggaggtgcttcccgcggctacgtccatactttag

SEQ ID NO: 248327 - DNA, 585 bp, Artificial Sequence
  derived and/or modified sequence
atggcctccctgggagccaaccctcggcggacaccccagggccctcgccctggagcagcctcatccgggtttccaagcccagctcccgtccccggcccaagggaggccgaggaagaggaggtagaggaggaggaggaactggctgaaattcacctttgcgttctgtggaactctggttacctggggattgcctattatgatacatctgattcaaccatccattttatgcctgacgccccagaccacgagagcctgaagctgttacagagagtgctagatgagattaatccacagtccgtcgtaacaagtgccaaacaggatgagaacatgacgagattcctgggcaagctagcctctcaggagcatcgagaacctaagagaccggagataatttttttgccatctgtggactttgggttggagatttccaagcagcggctgctctccggaaattattctttcatccctgatgcaatgaccgcgaccgaaaaaattttatttttgtcctctatcatccccttcgactgccttctgaccgtcagagctctgggcggcttattgaagtttctgggccggcgacggtag

SEQ ID NO: 248328 - DNA, 585 bp, Artificial Sequence
  derived and/or modified sequence
atggcgagccttggggcgaaccctagaaggacaccacaaggccctcgccctggtgccgcgtcatctggatttcccagccccgcccccgtacccggaccccgggaagccgaggaagaagaggttgaggaagaggaggagctggccgagatacatctctgcgtgttgtggaattcaggatacctggggatcgcctactacgacacttcggatagcaccatccattttatgcccgacgccccggatcacgaaagcctgaagctcttgcagagagtgctggacgaaataaacccacagtccgtcgtgacaagtgccaaacaagatgaaaatatgacaaggtttctgggcaagctggctagccaggaacatcgggagccgaagcggccggagatcatttttctgccttctgtggactttggactggaaatttctaagcaaagactgctgtcaggaaactactcattcattcctgatgccatgacagctaccgagaagattctgtttttgtcttcaattattccattcgattgtctgttgactgtgcgagcacttggcggtctgctcaaattcctgggccgaagacggtag

SEQ ID NO: 248329 - DNA, 2505 bp, Artificial Sequence
  derived and/or modified sequence
atggcctccttaggagccaaccccagacgcacccctcagggccccagaccaggagcggcttcaagcgggtttccttctcctgcccccgttccgggcccccgggaggccgaagaggaagaggtggaggaggaggaagagctggcagagattcatctgtgcgttctttggaatagtggttatcttggcattgcctactacgacactagtgatagcacaatacattttatgcccgatgcccccgatcacgaatctcttaagcttttacaacgcgtgctggatgagattaacccacagagtgtggtgacttctgccaagcaggacgaaaacatgacccggttcctcggcaagctggcctcccaggaacaccgggagccaaaaagacccgagattatctttttgcctagcgtagattttggtctcgagatcagtaaacagcgtcttctctccggtaattacagcttcatcccagatgccatgactgctacagagaaaattctatttctgtcctccattatcccctttgactgcctgctcacagtacgagccctgggcggactcctcaagtttttggggcggagaagaattggagtggaactggaagattacaatgtctctgttcccattttagggtttaagaagttcatgctcacacacttggtcaacattgaccaggacacctattccgtgctccagatatttaaaagtgagtcacacccaagcgtctataaagtggcctcaggactcaaggaggggctctcacttttcgggatcttgaatcgctgccattgcaaatggggtgagaagctgttgagactgtggtttaccaggccaacccacgaccttggggagctatccagtcgcctggatgtgatccagttcttcctactgccacaaaacctagacatggctcagatgctgcaccgcctcctgggacatataaagaacgtaccgctgatcctgaaacgtatgaagctttcacacactaaagtttctgactggcaggtcttgtacaagacggtctattccgccctaggtcttcgagatgcttgcagaagtctgcctcagagcatccaactctttcgggatattgcccaggagttttccgacgacctccaccacattgcaagtttaattggaaaggtggttgacttcgaggggagtttggcagaaaatagatttactgtgctcccaaatatagacccggagattgacgagaagaaaaggcggctgatgggtctgccgtcattcttgactgaagtagcccggaaggagcttgaaaatctagactctcgcatcccttcatgctcagtgatttatattcctctcatagggtttctcttgtccatccctaggctgccttccatggtcgaggcatcagacttcgaaattaatggcctggacttcatgttcctctccgaagagaagctccactatagatccgcccgcacaaaagagctcgatgctctactgggagatctgcattgcgagatcagggaccaggagacgctcctcatgtaccaacttcaatgccaggtcctagcgagggccgcggtgttgacccgggtgttagacttggcctctagactggatgtgctgctcgccctggcctcagcagcgagagactacggatattctaggcccaggtactcaccacaggtgctcggggtgcggattcagaatggacgccatcctctaatggaactgtgcgcccggacgttcgtccccaattccacagaatgtggaggtgataaggggagggtgaaagtgattaccggcccaaattcatctggtaagtctatctatctgaaacaggtgggcctgatcaccttcatggctctcgtgggatcgttcgtgccggctgaagaagctgaaataggagcagtggatgctatttttacgagaatacactcctgcgagagcatctccttgggcctgtcgacctttatgatagatctgaaccaggtggcaaaagcggtgaataacgccactgctcagtctttggtcctgatcgacgagttcggcaaaggcacgaacacggtggatggattagccttgcttgctgccgtcctgagacactggttggccagaggtcctacatgtccacacatcttcgtggcaactaacttcctgtctctggttcagttgcagctgttaccccagggcccactggtgcaatatctcactatggagacatgtgaggatggtaacgatctagtcttcttctaccaggtttgcgaaggggtcgcaaaggcctcacatgcatctcacacagctgcacaagccgggctgccagacaagctagtggcgcgggggaaggaagtttctgaccttatacgttccggtaagccaattaagccagtgaaggacctgctgaaaaagaaccaaatggaaaattgtcagacactggtcgataagttcatgaagcttgaccttgaagatcctaacttagacctcaatgtttttatgtctcaggaggttctcccagcagccacctcaatcctctag

SEQ ID NO: 248330 - DNA, 585 bp, Artificial Sequence
  derived and/or modified sequence
atggctagcctgggcgccaatccgcggaggaccccccagggaccacggccaggagccgctagttctggattcccttcgccagcgccagtccctgggccccgggaggccgaggaagaagaggtggaagaggaagaggaactggccgaaattcatctttgtgtgctgtggaattccggttacctcggaatagcatactacgacacctccgattcaaccattcacttcatgcctgatgcacctgaccatgaatcgcttaaactgctccagcgggtgctcgatgagatcaacccccagtctgtcgtgacaagcgctaagcaggacgaaaatatgacccgattcctcgggaagttggcgagtcaggagcatcgggaacctaagaggcctgagattatcttcctgcccagcgtggactttggccttgagatcagcaaacaacgactcctctctgggaattactcctttattccagatgccatgactgccacagaaaagatcttgttcctgtcatccatcatcccatttgactgtcttctgacggtgagggccctaggagggttattaaaatttttgggtcggcggagatag

SEQ ID NO: 248331 - DNA, 1602 bp, Artificial Sequence
  derived and/or modified sequence
atggcccagatgctgcatcgcctactaggccacattaagaacgttcctttgattctgaagagaatgaagctgagtcacacaaaagtgtcagactggcaggttttgtacaagacagtgtacagtgctcttgggctgcgggatgcttgccgttctctccctcagtcaatccagttgttccgagacattgctcaggaattcagtgacgacctgcatcacattgcctcattaatcggcaaagtggtggacttcgaggggtcccttgccgagaaccggtttaccgtgctcccaaatatagaccccgagatcgatgagaaaaagcgcagactgatgggcctgcctagcttcctcacagaagtggcgagaaaggagttggagaacctggattcgaggattcccagttgctctgtgatctacatcccattgattggtttcttgctgtcgatcccgaggttgccgagcatggtggaggcaagcgatttcgagatcaacggccttgactttatgttcctgagcgaagaaaagttgcactaccgatctgcccgaacaaaggaactcgatgcccttttgggtgatctgcactgcgagatccgcgaccaagagactctcttaatgtatcagcttcagtgccaggtcctggccagggccgccgttctgaccagagttttagatctggcatcccgccttgatgttctgctcgctcttgccagtgccgcgcgggattacgggtattctaggccccgctacagcccccaagtactgggtgtacgtatccagaacggtcgccacccccttatggagctctgtgcacggaccttcgttccaaactcaaccgaatgcggaggggataagggacgagtcaaggtgattacaggtccgaactcttccggaaagtcaatttacctgaagcaagtgggcctcattaccttcatggctctcgtgggttccttcgtacctgctgaggaagcggaaatcggtgcagtcgacgccattttcacaagaattcatagctgcgaaagcattagtctgggcctgtctacctttatgatagatctaaatcaggtggccaaggccgttaacaacgcgactgcacagtctctagtcctgatcgacgagttcggcaaaggtactaatacagttgacgggctcgccctactggctgcagtgctccgccactggcttgcaagagggccaacctgccctcacatcttcgtcgctaccaacttcttgagcctggtccagctgcagctccttccccaaggcccactcgttcagtacttaacaatggaaacctgcgaggacggcaatgacctcgtgttcttttatcaggtgtgcgagggggtggccaaagctagccatgcatcacacaccgccgctcaggccgggctgccagacaagctggtggctagaggtaaggaggtgtctgatctgattcgatcaggaaagcccatcaagccagtgaaggaccttctgaaaaagaatcagatggaaaactgccaaaccctcgtggataaatttatgaaacttgatctggaagaccccaatctggatctgaacgtgtttatgagccaggaggtgcttcctgccgctacctctatcctttag

SEQ ID NO: 248332 - DNA, 1002 bp, Artificial Sequence
  derived and/or modified sequence
aagattttattcctgagctcaattataccctttgattgtctcctgaccgttagagcactgggagggcttctcaaatttctcggccgtcgaaggataggggtggaactcgaagactataacgtatcagtgcccatcctcggtttcaagaaatttatgcttactcatttggtgaacatcgatcaggatacatattctgtgctgcagattttcaaaagcgagtcacatccctctgtgtacaaagtggcctctggtctaaaagaggggttaagtctttttggtatcctcaacaggtgtcactgtaaatggggcgaaaagctcctgagactgtggttcaccaggccaacccacgatttgggtgagcttagcagccgactggacgtcatccagttcttcctgctccctcagaacctggacatggcccagatgctccatagattgttggggcatattaaaaatgtacctctgattctgaaaagaatgaaactgtctcacactaaagtgagcgactggcaggtcctctataaaactgtgtattccgccctgggactgcgggatgcttgcagaagtctgcctcagagtatccaattattcagagacattgcacaagagttcagcgacgatctgcatcatatcgcatccctcattgggaaggtgtacttatctccccaggtcgattttgaaggttcactagccgagaaccgctttactgtgctgccaaatatcgaccccgagattgatgagaagaagagaaggctcatggggctgccgtctttcctgaccgaggtggcgagaaaagagttagagaacttggattccagaatcccaagttgctccgttatctatattccactgatcggcttcctgttgtcaataccgagattgcctagtatggttgaagcgagtgatttcgagattaatggtctcgattttatgttcctgtcagaagagaagctccactatagatctgccagaaccaaagagctggatgctctgttgggctag

SEQ ID NO: 248333 - DNA, 1527 bp, Artificial Sequence
  derived and/or modified sequence
atgtggccagtcttgctttttgtatttcttagtcagaccgtttatagcgctctgggccttcgcgatgcgtgtcggtcactcccccaaagcattcaactgtttagggatattgcccaggagtttagcgacgatcttcatcatatagcaagcctcatcggaaaggttgtggactttgagggcagcttagcggagaaccgctttacagttctgcctaacatcgatcccgagatcgacgagaagaaaaggcgtctcatgggccttcccagcttccttactgaagtcgctcggaaagagctcgagaacctggatagcagaatcccttcctgttccgtgatatatattcctcttattggcttcctcctgagcattcctcgtctgccgagtatggttgaggcgtccgatttcgagattaacggactggattttatgttcttaagtgaggagaaactacattacaggagcgctcggaccaaggaactggacgcactgctcggagacctgcattgtgaaatcagggatcaggagacactgcttatgtaccaactgcagtgccaggtactggcccgtgcagctgtgctaacaagggtcctggacctcgcaagcagactggacgtcctcctggccctggcctccgctgccagggattacggctatagtcgaccacgctactccccccaagtcctgggcgttcgcatacagaatggcaggcatccgctgatggagctctgcgcccggacattcgtccccaactctacagaatgcgggggggacaagggtagggttaaagtgataactgggccgaattcttccggaaagagcatctaccttaagcaggttgggctaatcacattcatggccttggtgggtagttttgtaccagccgaggaggcagagataggtgccgtggatgccatatttactagaatccactcatgtgagagcatctctctcgggttgagcacattcatgattgatttgaaccaagtggccaaagccgtgaataatgctacagcccagagcctcgttctcatcgacgagttcgggaagggaacaaatactgttgatggattggccttgctcgcagctgtgctccggcactggctcgcacgcggccccacctgtcctcatatctttgttgcaaccaactttctgtcattggtccagcttcagctcctgcctcagggccctctcgtgcagtacttgacaatggagacatgcgaagacggcaacgacctcgtgtttttctatcaggtttgtgagggagtcgctaaagcctctcacgcaagccacactgctgcccaggcaggtctccctgataaactggtggccagaggtaaagaggtgtccgatcttatccgcagcggcaagcccatcaagcctgtgaaagatctcctcaaaaagaaccagatggaaaactgccagactctggtcgataaattcatgaagctggatctcgaggatccaaatctggatcttaatgttttcatgagtcaagaggtcctcccagccgccacctccatcctgtag

SEQ ID NO: 248334 - DNA, 2505 bp, Artificial Sequence
  derived and/or modified sequence
atggccagcttgggggccaatcccagacggaccccacagggtcccagacccggcgctgcttcgagtggttttccctcacctgcaccagtgcctggaccccgggaagcagaggaagaggaggtggaggaggaagaggagctggctgaaattcatctctgtgttctgtggaactcaggctacctggggatagcctactatgacacaagtgatagcaccatacacttcatgccagacgctccagaccatgagtccctgaagttgctacagagggtcttggacgaaataaatccacagagcgttgtcacaagcgctaagcaagacgagaatatgacgaggtttttgggaaaattagcttcccaagagcaccgagaacccaaacggcctgagatcattttcctgccaagcgtggacttcgggctcgagatctcgaaacagcgattgttgagcggtaattacagtttcatccctgacgccatgaccgccacagaaaaaatcctgttcttaagcagtataattccattcgattgcctgctgaccgtgcgcgccctgggcggattgctgaagttcctgggcaggcgccgaattggggtcgaattagaggattataatgtgagcgtcccgatcctggggtttaaaaaatttatgcttactcatcttgtcaatatagatcaagacacgtactctgtgcttcagatatttaaatcagagtctcacccatcggtgtacaaggtggcctcaggcctcaaagaagggctctcgctcttcggtatcctgaaccgctgccattgcaaatggggcgagaagctgctacgcctttggtttacccggccaacgcacgaccttggtgagttatcaagtaggctcgatgttatacagttcttcctgctaccacagaacttggacatggctcagatgctccacaggctgctgggtcatatcaagaacgtgcctctcattctgaaaaggatgaagctgagccatactaaagtcagcgattggcaggtgctatataaaaccgtgtattctgcactgggactgcgggacgcctgccggtctctgccgcagagcatacagctcttcagagacatcgcacaagagttctccgacgatttgcaccacattgcttctctgataggaaaggtggtggatttcgagggaagcctcgctgaaaaccgcttcaccgtgctccccaacattgatcctgagattgacgagaaaaagcgtagactaatgggccttccaagttttctaaccgaggtagccaggaaagagctggaaaatctcgattctaggataccgtcctgctcagtgatttatattcccttgatagggttcctcctgtctattccacggttgccatcaatggtggaagctagcgactttgaaatcaatgggttagatttcatgttccttagcgaagagaagctgcattacagatccgccagaaccaaggaattagacgccttgctgggtgacttacactgtgagattcgagatcaggagacactgctgatgtaccagctccagtgccaggtgctcgcacgcgcggccgtgctaaccagagtgttagacctggcctcccgcctggacgtgctgcttgcactcgccagtgcagcccgtgattacgggtattccaggccccggtattctccgcaggtgctgggcgtaagaattcagaacggcaggcaccctctgatggagctttgcgcccgcacattcgtgccaaattccactgagtgcggtggggacaagggtcgggttaaagtcatcaccggccctaactcctcaggaaagagtatatacctgaagcaggtcggcctgatcacgtttatggccctcgtgggctccttcgttccagctgaggaagccgaaatcggggccgtcgacgccatctttactcgcatccactcttgtgaatccattagcttagggctctccacctttatgatcgatctgaaccaggtagccaaagccgtgaacaatgctaccgcccagtcactggtgctcatcgacgaatttggaaagggcaccaataccgtagatggactggctctcctggcagcagtcctgcggcactggctcgcaagggggccgacgtgcccacacatcttcgttgctacaaacttcctgagtctggtacagctccagttacttccacagggacccctggtccagtatctaacaatggagacttgcgaagatgggaacgatttggtctttttctaccaggtttgtgagggagtggccaaagcaagtcacgcctctcacacagcagcacaggccggcctccctgataaactggtggctcgggggaaagaggtgagcgatctgatccgttctgggaaacccatcaagcccgtcaaggatctactgaagaagaaccagatggaaaattgccaaactctggtggataagttcatgaagctggatctggaagatccaaacctggatttgaacgttttcatgagtcaggaggtactgcctgcggctacttccatcctgtag

SEQ ID NO: 248335 - DNA, 2505 bp, Artificial Sequence
  derived and/or modified sequence
atggcctctctcggggccaaccctcggagaacacctcagggccccaggccaggtgccgcatcttccggattcccgtcaccggcccccgtgccaggccccagagaggcagaagaagaagaggtcgaggaagaagaggaactcgcagaaatacacctctgcgtgctgtggaattccggctacctgggcatagcttattatgacacttctgacagcaccatccatttcatgccggatgctcctgaccatgagagtctgaagttgctccagagagtgcttgacgagattaacccacaaagtgtagtgacatctgctaaacaggatgaaaatatgacacgctttctcggaaaattagccagccaggagcatcgcgagccgaagaggcccgaaattattttcttaccaagtgtcgactttggcctcgagatatccaagcagaggctgctgagcgggaattactcctttataccggacgcaatgaccgcgactgagaaaatactgttcctgagctccataattccattcgactgcctgttgaccgtacgcgccctcggaggcttgctgaagtttctggggagaagacggattggggttgaacttgaggactataatgtgagtgttccgatcttgggatttaagaaattcatgctcacccacctggtgaatatcgatcaagatacctattctgttcttcaaatcttcaagagcgaaagccacccttccgtttataaagtggcctcgggcctgaaagaggggctgagcctttttggcatccttaatcgatgtcactgtaaatggggcgaaaagctgctcagactgtggttcacaaggcctacacatgacctgggcgaactcagcagtaggctggatgtcatccagttcttcttgcttccacagaacctcgacatggcccagatgctgcatcgactgctggggcacataaaaaatgtgccactgatactgaagcgcatgaagctatcccacacgaaagtttccgattggcaggttctgtacaagactgtgtactctgccctggggctgcgtgatgcctgtcggtcactgccccagagcatacagctttttcgcgatatcgctcaggaattttctgatgatttgcatcacatcgccagcctgattggtaaagtggtggacttcgaagggagcctcgccgaaaacaggtttacagtgctccctaatatcgatccagaaatcgatgaaaaaaaacgtcgtcttatgggcctgccatctttcctcactgaggttgccagaaaagaactggagaatctagactctaggatcccatcttgtagtgtgatatatatccctctcattgggttcctcctgagtataccaaggctgccgagcatggtagaagcgagcgactttgagattaatggattagacttcatgttccttagtgaggaaaaactgcactatcgatccgctaggaccaaagagctagacgcccttctcggtgatctccattgcgaaattcgggatcaggaaactctcctcatgtaccaattgcagtgtcaggtgctggcccgagcagctgtgctgactcgggttttggacttagcttctagactcgatgtgttgttggctcttgcctccgcggcccgggattacggttattcaagaccacgctactcacctcaggtactaggagtacggatacagaacggccggcatcccctgatggagctgtgcgccaggacatttgtaccaaacagcaccgagtgtggaggcgataaggggcgggtcaaagtgattaccggtcctaactcatcagggaaatcaatctatctcaaacaggtgggactgataaccttcatggctctagtcgggtccttcgtacccgccgaagaagcggaaattggagcggttgatgccatcttcaccagaattcatagttgtgaatcgatctcacttgggttaagtacattcatgatagatttaaatcaggtggcgaaggccgtgaataatgcaaccgctcagtccctggtcttaattgatgagtttggtaaagggaccaatacagtcgacggactggctctgctcgctgctgttttacggcattggctggccaggggcccaacatgcccgcacattttcgttgctactaactttttgagcttggtccagttgcagctgttgccccagggacccctggttcagtatttaacaatggagacatgtgaagatggcaatgatctcgtgttcttctaccaggtgtgcgagggtgtcgctaaggcttctcacgctagtcacacggcggctcaggcaggcctgcccgacaagctggtggcaaggggaaaagaggtgagtgatctcattagatctggaaaacccatcaagcctgtgaaggacctgctgaagaagaaccagatggaaaactgccagaccctggttgacaagtttatgaagctggatctcgaggaccccaatctggacctcaatgtttttatgagtcaagaggtgttaccagccgcaacatccattctgtag

SEQ ID NO: 248336 - DNA, 585 bp, Artificial Sequence
  derived and/or modified sequence
atggccagtttaggcgcaaatcccagacgcactccccagggtcctaggcccggggctgcgagctcaggatttccatcaccggcccccgtgccagggccccgcgaagcggaggaggaagaggtggaggaggaggaggagttggctgaaattcatctgtgcgtcctgtggaactccggctaccttggcatcgcctattatgatacatcagactcgacgatacacttcatgccagatgctcccgatcacgaaagtctgaagttgctacagagagtcttagacgaaataaacccacagtctgttgtgacatccgctaagcaggatgaaaatatgacgagattcctcggtaaacttgccagccaggaacaccgggagcccaaacgtcctgaaatcatatttctgccctccgtagatttcgggctggaaatctccaaacaacgcttgctgtcaggcaattattcttttatcccagatgctatgacagcaactgagaagattctgtttctgtcctcaattataccctttgactgtctgctgactgtgcgcgctctggggggcctcctcaagtttcttggccgtcgccggtag

SEQ ID NO: 248337 - DNA, 471 bp, Artificial Sequence
  derived and/or modified sequence
acagcccaatccttagtacttatagacgagtttgggaaaggcacaaatacagtggatgggctggcactattagcagctgttctgagacattggctggctaggggtcctacttgtccacacattttcgtggccaccaactttctgtccttagtacagctgcaactgctgccacagggtccgctggtgcaatatttggtgtgcgagggagtggccaaggcgtctcatgcttcccacactgctgcacaggccggactgccggataagttagtggctaggggcaaagaggtatctgacctgattcgcagcgggaagcctatcaaaccagtgaaagacctccttaaaaagaatcagatggaaaattgccagaccctagttgacaagtttatgaaacttgacttggaggacccaaacctggacttgaatgtatttatgtcacaggaggttctgcccgccgcaacctcgatcctttag

SEQ ID NO: 248338 - DNA, 2505 bp, Artificial Sequence
  derived and/or modified sequence
atggccagcctgggggctaatcccaggaggacaccacaaggaccgcgccctggtgctgccagctctggctttccttctccagctcccgtgccaggcccccgcgaggctgaggaagaggaggtggaagaggaagaagaactggcggagatccatctttgtgtcctttggaacagcggctacctcggaatcgcgtattatgatacatcagattcgacgattcattttatgcctgatgctcccgatcatgagagccttaaactgctccagcgggttctggacgagatcaacccacagagtgtggttacttccgctaagcaggatgaaaacatgacccgcttcctaggcaagctggcatctcaggaacacagagaacctaagcgccccgaaattatctttcttccatctgtggattttgggctggagatttcaaagcagcgcctgctcagtggtaattacagttttatccccgacgcaatgacagcaaccgaaaagatcctatttctctcgtctattataccatttgattgtcttttaactgtgcgggcccttggggggctcctgaagttcctgggaaggcggcggatcggcgtcgaactcgaagactataatgtgtccgtacccattctgggatttaagaaattcatgctgacccacttggtgaatatagaccaggatacttactcagtactgcagatatttaagagcgagtcacatccaagcgtctataaggtcgccagcgggcttaaggagggattgtccttgttcggtatactgaaccggtgccattgcaagtggggtgaaaaactgctaaggctgtggttcacacgcccgacacacgatctcggcgaactcagtagtcgtctggatgtaatccagttttttttgctcccccaaaaccttgacatggctcaaatgctccaccgtttgctagggcacatcaaaaatgtacccctcattctcaagagaatgaagttgtctcatactaaagttagtgactggcaggtcttatacaaaaccgtttacagcgcactgggattgcgtgacgcgtgcaggagcctcccccaatctatccagctttttagggacatagcccaggagtttagtgacgatctccaccatattgcctcccttattggtaaggtggtcgatttcgaggggagccttgctgaaaaccggtttaccgtgctgccaaatattgacccagagatcgacgagaaaaagcgccgcttgatgggactaccaagctttcttacagaggtagccagaaaagagctggagaacttagatagcagaattcccagttgttctgtaatatacattcccctgattgggtttttgctctcaatccctaggctgccttctatggtagaagcgtccgacttcgagatcaatgggctggactttatgttcctctccgaggaaaagctccactacagatcagccaggacaaaagagcttgacgccttacttggtgatctgcattgtgagatccgtgaccaagagacgctgctaatgtatcagttgcagtgtcaagtgctggcacgggcagctgtacttactagagtgctggacctggcaagcaggctggatgtgctcctcgcactagcaagtgctgctagagattacggttactctcggcccaggtattccccacaggtcctgggggtaaggattcaaaatggccggcaccctctgatggagctgtgcgcgaggaccttcgttccaaacagcaccgagtgcggcggcgacaagggtagggttaaggtcattaccggtcccaactccagcggtaaaagcatctacctgaagcaggtggggctaataacatttatggcactcgtgggttctttcgtccccgcagaggaagctgagattggcgctgtggatgccatcttcacacggatacacagctgcgagtctatctccctgggcctttccactttcatgatcgacctcaatcaagtggccaaagctgtgaataacgccaccgcgcaatcgttggttctgatcgacgagttcggaaaaggtaccaacaccgtcgatgggctggcattactggctgccgtgctccgccactggttagcaagggggcccacatgtccccacatatttgtggccactaacttcctttccctggtccagctgcagctattgccgcaaggcccactggtgcaataccttaccatggagacctgcgaggatggcaacgacttggttttcttctaccaagtttgcgagggagtcgccaaagccagccacgcttctcatactgcagcccaagcaggcctgccggataaactggttgctcggggcaaggaagtatctgaccttatcagatccggaaaaccaattaagccagtgaaagacctgctgaagaaaaatcaaatggagaattgccagacacttgttgacaagtttatgaagctggacctagaggaccccaacctggatctgaacgtttttatgtcacaagaggtgctgcccgctgccacctcaatcctgtag

SEQ ID NO: 248339 - DNA, 2505 bp, Artificial Sequence
  derived and/or modified sequence
atggcgagtctgggtgctaatcctagaagaacaccccagggtcctcgccccggtgctgctagtagtggcttcccttcacccgccccagttcctggccctagggaagccgaagaggaggaggtggaggaagaggaagaattggcagagattcatctctgcgtcttgtggaacagtgggtaccttggcatagcctactacgatacttcagattccacaatacacttcatgcccgatgcgcctgaccacgagagtctgaagctcttgcagagagtgttagacgagattaaccctcaaagtgtagtcacctccgccaaacaggatgagaatatgacccgatttctggggaagctcgcttcgcaagagcacagggaaccgaagaggcccgagattatttttctgccctctgtggattttggcctggaaatctcaaaacagaggcttctgtccgggaactacagttttatacctgatgcaatgacagcaaccgagaagatactgtttctctccagcattatcccatttgattgccttctgactgtgcgggcactcggtggtcttctaaagttcctcggtcgaaggagaattggcgtcgaacttgaagactacaatgtatcggttccaatactcggatttaagaagtttatgttgacacatttagtgaacattgaccaggacacatacagcgtgctgcaaatttttaagagtgaatctcatcctagcgtgtacaaagtagcctctggcctgaaggagggactatcactcttcggtatcttgaatcgttgccactgcaaatggggagagaagctccttcgcctctggtttaccaggcctacccatgacctgggggagctttcttctaggttggatgtgattcagtttttcctcctgccccagaacctggatatggctcaaatgctacacagactgctagggcacattaagaatgttcctcttattctgaagcgcatgaagttgagccatactaaagtctccgactggcaggttttgtataagactgtctactccgctctgggcctgagggatgcttgccggagtttgccccaaagcatccagctgtttcgtgatattgcacaggaatttagcgatgacctgcaccatatcgcaagtctcatcgggaaggtcgtcgactttgagggatccctggctgagaatcgattcaccgtcctgcccaacatcgatccagaaatagatgaaaagaagcgcagactcatgggtcttccttccttcttgacggaggtggctagaaaagagctggagaacctcgactcccgcattccatcttgtagcgtcatatatatcccactgatcggcttcctgctatctattcctcgcctcccttcaatggtggaggccagcgacttcgaaatcaacggcctggatttcatgtttttgtccgaggagaagctccactataggtccgcgcgcactaaagaactggacgctctgctgggcgatctacactgcgaaatcagggaccaggaaaccttgctgatgtaccagctccaatgccaggtgcttgctcgagctgcggtgcttaccagggttctcgatttggcttcacggctagatgtgctcctggcactcgccagtgccgctagagactacgggtattccaggccccggtattctccacaggtgctgggagtgcggattcagaacggcaggcaccctctcatggagctatgtgctaggacgtttgttcctaatagcactgaatgcggaggagataaaggcagggtcaaggtgatcactggtcctaatagtagcggaaagagcatttatttgaagcaggtgggcctgatcacctttatggccctggtgggctctttcgtccccgccgaggaagcagaaataggagccgtggacgctatctttactaggatccatagttgtgagagtatttccctaggattatccacttttatgattgatttgaaccaggttgcgaaggccgtcaacaacgccaccgcacagagcttggtcctcattgatgaattcggcaaaggcaccaataccgtcgacggcctggctctcttagcggccgtgctgcgtcattggctggcccgaggccctacttgcccgcatatattcgtggccacaaattttctttcacttgtgcaactgcagctgctcccccagggtcccctggtgcagtatttaactatggagacttgtgaagacgggaacgatctcgtgttcttctaccaggtctgcgaaggcgtggctaaagcctcacacgcgtcacacacagctgcccaggcgggcttgcctgataaactcgtcgcgcgaggcaaagaagtaagcgacctgattcgcagcgggaagcccattaaaccagtgaaagatctgctcaaaaagaatcagatggagaactgccagacgttagtggataagttcatgaaattagatctcgaagacccaaacctggacctcaacgtgtttatgtcacaggaagtgctcccagcagccacttcaattttgtag

SEQ ID NO: 248340 - DNA, 471 bp, Artificial Sequence
  derived and/or modified sequence
accgcacagtcactggtcttgatcgatgaatttggaaaaggcacgaacacagtcgacggcctggctctcctggctgcggtcctgaggcactggctcgcaagagggcccacctgtccacatatttttgtggctaccaactttcttagccttgtacagctgcaactgctccctcaagggcctctcgtacagtacttagtttgcgaaggggtggctaaggcaagccatgccagccacactgcggcccaagctggccttccggacaaactggtcgccaggggcaaagaggtgagcgatctgattaggtccggcaaacccatcaagcctgtgaaggatttgctcaagaaaaatcagatggagaattgtcagaccctggtggacaagttcatgaagctcgacctcgaggatcccaacctggacctgaacgtcttcatgtcacaagaggtcctccccgccgctacatccattctgtag

SEQ ID NO: 248341 - DNA, 2556 bp, Artificial Sequence
  derived and/or modified sequence
atggcgagcctgggcgcgaacccgcgaagaacaccacaaggtcccaggcccggcgccgccagtagcggattcccttccccggctcctgtaccagggccaagggaggctgaggaagaagaagtggaggaggaagaggagttggccgagattcatctgtgtgtgctttggaacagtggatatctcggcattgcatactacgatacctccgattctacgattcacttcatgcctgatgccccagatcacgaaagcctgaaactcctgcagcgagtgttggatgagatcaatcctcagagtgtagtgaccagcgcaaaacaggatgaaaatatgaccagattcctggggaagcttgcttcacaggagcaccgcgagcccaaaagacccgaaataatttttctgccatccgtggacttcgggctggagatttcaaaacaacgcctgctgagtggaaactatagtttcatccctgacgcgatgaccgccacagagaagatattatttctaagctcgattatcccttttgactgcctcctgacaccgccaggtgacctgcgattcacacctattcctttactgatcccatcacaggtgcgagccctgggtggattgctgaagttcctcggacgcagaaggatcggcgtcgagctcgaagattataacgtgtcagttccaatcctgggattcaagaaattcatgttaacccacctcgtcaacattgaccaagatacatactctgtactccagattttcaagtcggaatctcacccctccgtgtacaaggtagcgtcgggcttgaaggaagggctatcactgtttggcatattgaacaggtgccattgtaaatggggtgaaaaactgttgagactttggttcacacggccgacccatgacttgggcgaactgagttctaggttggacgtgatacagtttttcctgctaccacagaacctagacatggcccagatgctccacaggctgcttggacacatcaagaatgtgcctctcattctaaagcgaatgaaactgtcccacacgaaagtgtccgattggcaagtgctctacaagactgtctacagtgcacttggattgcgagacgcatgtcgctccctgccacagtccatccagttgtttagggacatcgctcaggagttttccgacgaccttcaccacatcgccagcctcattggaaaggtggttgactttgaagggtccctcgccgagaatcgcttcaccgtcttgcccaacatcgatccagagattgatgaaaagaaaagaagactcatgggactgccatcatttcttacagaggtggcccgcaaggaactggaaaatctggatagcaggatcccctcttgtagcgtcatctacattcccttaattggttttctgctgagcatccctaggttgccgagcatggtcgaggcttcagatttcgagattaatggtctcgacttcatgtttctttctgaagaaaagctgcactaccgatcagcacggactaaggaactggatgcattgttaggagatctccactgcgagatccgagatcaagaaactttactgatgtatcagctacagtgtcaggttctggcccgtgctgccgtgctcacccgtgtactggacttagcctctcgacttgacgtgcttctcgctctggcgtccgctgcacgggattacgggtactcacggcctcggtatagcccacaggtcctgggggtgcgaatacagaacggcagacaccccctcatggaactttgtgctcgcactttcgtgccaaactcaacagagtgtggtggtgacaaaggacgggttaaggttataacagggccgaattccagtggcaagtcgatctacctgaaacaggtaggcctgattacgttcatggctctggtcggaagcttcgtgcccgcagaagaggcggagatcggagctgtggacgctatttttactaggatccacagctgtgagtctatttcattagggctctctaccttcatgattgacctgaaccaggtggccaaggccgtgaacaacgccacagcccagagtctggttcttatcgatgaattcggaaagggcacaaatactgttgacgggctcgcactcctcgctgctgtcctccgccattggctggcaaggggacccacctgtccccacatctttgtagccacaaacttcctgagtctagtacagctacagctgctgccccagggtcccctggtccaataccttactatggaaacctgtgaggatggcaacgacttagtgttcttttatcaggtgtgtgaaggtgtggcaaaggcttcccacgcatcacataccgccgcccaggcaggcctgcctgacaaactagttgctcgcgggaaagaagtatctgacttgatacggtctgggaaaccgattaagccagtgaaggatctgctgaaaaagaaccagatggaaaattgtcagacactggtggacaagttcatgaaattggacctcgaggatccaaatctagacctgaatgtgttcatgtcccaagaagtgttacctgccgctacctccatcctatag

SEQ ID NO: 248342 - DNA, 1602 bp, Artificial Sequence
  derived and/or modified sequence
atggcccagatgctgcacaggctactgggccatattaaaaatgtacctctcatcttgaaacgcatgaaactgtctcacacaaaagtcagcgattggcaggtgctctacaaaactgtgtatagtgccttaggcttgcgtgatgcttgtcgtagtctgccacagtccatacaattgttcagggacattgctcaggaattcagcgatgacctgcaccacattgcatctctgatcggaaaagtggtagactttgaaggctctctcgccgaaaacaggtttacagttctcccaaacatagacccagagatcgatgaaaagaaaagacggctcatgggacttccgagctttttgactgaagttgctaggaaggaattggaaaacctggattctcgaatacctagctgctccgtcatttatatcccactgattggttttttactgtctatcccgagactccccagcatggtagaagcgagtgacttcgagattaacggcctcgactttatgtttctgtccgaagaaaagcttcactataggtccgcacgcaccaaggaactcgatgccctgctcggggatctgcattgtgagattagggatcaagaaactctgctgatgtatcaacttcagtgccaggtgttggcccgagctgcagtgctaacgcgtgtactcgacttggcatctcgactcgacgttctactggccctggcctctgcagctcgtgattacggctactcacgcccgcgctactcgccccaggtgcttggtgtgagaattcagaacggccgccatccattgatggagttatgcgcaaggacctttgtgcctaacagtacagaatgcgggggcgataaagggcgggttaaggtgatcacagggcccaactccagcggaaagagcatttatctaaagcaggtcggcctgatcacgttcatggccttagtgggttctttcgttcctgccgaggaggccgagattggggccgtggacgctatttttaccagaatccattcctgtgaatctatcagcctggggctgtcaactttcatgattgacctaaatcaggttgccaaggcagtcaataacgctacagcacaaagtttggttctgatagacgagtttgggaagggtactaacactgttgatggtttagccctcctcgccgccgtgttgagacactggctggcccgcggtcctacttgcccgcacatttttgtggctactaatttcctaagtctggtgcagctgcagctcttaccgcaagggcctttagttcagtacttgaccatggagacatgcgaggacggaaacgatctagtgtttttctatcaggtctgcgagggggttgcaaaggcctcgcatgccagccatacggctgctcaggccggtctgcccgataagctagtagcccgcggcaaggaagtgagcgatctgatacggtccggcaaaccaatcaagcctgttaaggacctgctgaaaaaaaaccagatggaaaattgccagacactagtagacaagttcatgaaattggatctcgaggatcctaacctggacctcaatgtctttatgagccaggaagtattgcccgctgcgacgagcatattgtag

SEQ ID NO: 248343 - DNA, 765 bp, Artificial Sequence
  derived and/or modified sequence
atggcctctctaggagctaaccctagacggactccccagggaccaaggcctggagccgcatcttcagggtttcctagtcctgcccccgtgcccggtcccagagaagcagaagaggaggaggttgaagaggaggaggagttggccgaaattcacttgtgcgtcctttggaactccggctacctaggtattgcatattacgacacttcagactccacgatccacttcatgccggacgctcccgaccacgagtccctgaagctgcttcaacgggttctggacgagatcaacccccaatcagtcgtgacatctgctaaacaagatgaaaatatgacaagatttctcggcaaactggcatcacaggaacaccgggagcctaaacgccccgagattatcttccttccatcagtggattttggtctggagataagcaagcagagactcctgagcggtaactactcgtttatcccagatgcaatgaccgctacggaaaaaatcttgttcctgtcttcaatcatcccctttgactgtctgctgaccgtgcgagccctcggtggcctgctgaagttcctgggtaggcgtaggataggcgtggaactcgaggattacaacgtatcggtccccatccttggctttaagaagtttatgctgactcatctcgtgaatattgaccaggacacctaccgattagaatgtaatggagcgatcagcgcccagtgcaacctgtgtctgctagggtcttcagatagcccagcttctgcttcctag

SEQ ID NO: 248344 - DNA, 816 bp, Artificial Sequence
  derived and/or modified sequence
atgttcttatcagaggagaagctccactatcgttctgcccggacaaaggaactggacgctctccttggcgatctgcactgtgaaatacgtgaccaggaaaccctgttaatgtatcagcttcagtgccaggtactcgccagggcagccgtcctgacgagagtgttggacctggcctcgcgcctagacgtgcttttagcactggcctctgccgcccgcgattacggctattctcggccaaggtatagccctcaagttctgggagtgcgcattcagaacggccgccacccacttatggaactgtgtgcccggacattcgtccctaattctacagagtgtggcggcgacaagggacgtgttaaggtgatcacagggccaaatagctctggtaaatctatatacctgaaacaggtaggcttgatcacattcatggccctcgtggggtctttcgtccctgccgaggaagcagagatcggcgctgtcgatgcaatcttcacccgcatccatagctgtgagagtatctccctgggtcttagcaccttcatgattgatctgaaccaagtggctaaagccgttaacaatgcaactgcccagtctcttgtcctgatcgatgagttcggcaagggcacgaacaccgtggatggcttagctttgcttgccgccgtcctgcgacactggctcgccaggggccccacctgcccacatattttcgtcgccacaaattttttatccctggtccaactgcagttactcccacagggacccctggtgcagtatctcgactggcctagggtctctggtcaggaggggggagattag

SEQ ID NO: 248345 - DNA, 1602 bp, Artificial Sequence
  derived and/or modified sequence
atggctcagatgctgcaccggctcctcggccatataaaaaacgtgcctctgattcttaagcgcatgaagcttagccatacaaaagtgagtgattggcaagtgctctataaaaccgtctattctgcactgggtttgagagatgcttgccgaagcctccctcagtccatccagctgttccgagatatagcccaagagttcagcgatgatctgcaccatatagcctcattaataggtaaggtcgttgactttgagggaagtcttgccgagaataggtttacagtcctacccaatatcgaccccgagatcgatgagaagaaacggcgactgatgggactgccctcatttttgaccgaggtcgcaaggaaagaactggagaacttggacagccgaatacctagttgtagcgtgatttacatacctttgatcggcttcttattgagcattcctcgacttcctagtatggtcgaggcctccgatttcgaaatcaatggcctggattttatgtttctctctgaggagaaattacactaccggagcgcaaggaccaaagaactggatgcattgttaggcgacttgcattgcgaaattagggatcaggagacgttattgatgtaccagttacagtgccaggtgctggccagggcagccgtgctcaccagggtgttggatcttgcctcccgtctggatgtgcttttggccctggccagcgcggctagggattacgggtattccagaccgagatatagccctcaggtgctgggggtacggatccagaacggcagacaccctttgatggaattatgcgcccggacctttgttcccaacagtacagaatgcggaggcgacaagggccgcgtaaaggttatcacagggcctaattcttcaggcaagtccatctacctgaagcaggtcggactaatcaccttcatggctctggtgggaagctttgtcccagcagaagaggccgaaatcggggctgtggacgctattttcacccggatccatagctgtgagtctatcagcttgggcttatcaacctttatgatcgatctgaaccaggttgccaaagccgtgaataatgccactgcacaaagtttggtgcttatcgacgagtttggtaaaggaaccaacacagtagatgggctggcgctgctcgccgcagtcctgcggcattggctggcccgtggacccacatgcccccacatctttgtagcaaccaatttcttgagcttggttcagctgcaattgctgccacaggggccactggtgcaatacttgaccatggaaacctgcgaagatgggaacgacttggttttcttttaccaggtgtgtgaaggggttgcaaaagcatcacacgctagtcacactgccgcacaggcaggactgcctgataaacttgttgcgcggggaaaagaggtgagcgacctcatacggagcgggaagccaataaaaccagtgaaggacctcctgaaaaagaatcagatggagaactgtcagaccttagtagacaaatttatgaagctggatctcgaggatcccaacttggatttgaatgtatttatgtcacaggaggttcttcccgctgcaactagtattctgtag

SEQ ID NO: 248346 - DNA, 816 bp, Artificial Sequence
  derived and/or modified sequence
atgttcctttcagaggagaagctgcactataggagtgcccgcacgaaagagttagacgcactgttaggagatttgcactgcgagattcgtgatcaagaaactctgctgatgtaccagctccagtgccaggtgctggcccgagccgccgttctcacaagagtgcttgatttggcctcccgactggacgtgctgctcgccctagcctcagctgcccgggactacggatactccaggccacggtactctccacaagtcttgggggttaggatacagaatggacgccatcccctaatggaactgtgtgctcgcacctttgtgcccaattcgaccgaatgcggcggcgataagggccgcgttaaggtgatcacaggccctaactcctctggaaaatctatttacctgaagcaggtgggcttgattacttttatggctttagtcggttccttcgtgcccgccgaagaggcagaaatcggtgcagtagatgccattttcacgaggattcactcatgtgagtccatcagtctagggctgtctacttttatgattgacctgaaccaggtggcaaaggccgtgaacaatgccactgcccagagcctggtgcttatcgatgaatttggcaaaggaacaaacaccgtcgacggtcttgccctccttgcagcagtgctgcggcactggcttgcccggggacctacttgcccccatatcttcgtagccaccaactttctgagtctcgtccagctgcagcttctgcctcagggacctctggtgcagtacctggactggccacgcgtgagcggccaggaaggaggcgattag

SEQ ID NO: 248347 - DNA, 765 bp, Artificial Sequence
  derived and/or modified sequence
atggcatcactaggggcaaatcccaggcgcaccccacagggtcctcggcctggtgctgcgagtagcggttttccgtcacctgcacctgtgccaggacctcgagaagcagaagaagaagaagtcgaggaagaggaagagttggctgagattcatctgtgtgtgctgtggaactccggctacctcggcatcgcctactacgacacttccgatagtactatccactttatgccagacgcacccgatcatgaaagcctgaagctgctgcagagggtgctggatgagatcaatccccagagtgttgtcacatctgccaaacaggatgaaaacatgacgagatttcttggaaagctcgcgtcgcaagagcaccgcgagccaaagcgccccgaaattatttttctccccagcgttgattttgggcttgaaatctcaaaacagagactactgtcagggaactactctttcatacctgatgcgatgacagccactgaaaagattctattcctgtccagcataataccattcgattgtctgctaactgtgagggctctggggggcctgttgaagtttttgggaaggcgcaggatcggtgtcgagctagaggactataatgttagtgttccaatcctgggattcaaaaaattcatgttgactcatttagtgaacatcgatcaggatacttaccggttggaatgtaacggcgccatctctgctcagtgcaacctttgccttctgggctccagcgacagcccggctagcgcctcttag

SEQ ID NO: 248348 - DNA, 765 bp, Artificial Sequence
  derived and/or modified sequence
atggcttctctaggtgcaaatcctcgtagaacaccacagggtccccgcccaggggcagcctcctctgggtttccgtccccggcccctgtgcccggcccacgggaagcggaggaggaggaggtggaagaagaggaagagttagccgaaattcatttgtgcgtgctctggaattccggctacctaggcatcgcctattacgatacgtccgattcaacaattcatttcatgccggacgcccccgaccacgagagccttaaactcctgcaaagagtactggacgagatcaacccacaatccgtggtgacaagcgccaagcaggacgaaaatatgacgcggtttcttggaaaactcgctagccaggagcacagagagccgaaacgaccagagattatattcctgcccagcgtggatttcggtctggaaatatcaaagcagaggctgctgagtggaaattattcctttattccagacgcgatgacggctacagagaagatcctgtttctgagctcaatcattccctttgactgcctcctcactgtgcgagcattggggggcttgctcaaatttcttgggagaaggcgcatcggagtggaactcgaggattataacgtcagcgtaccaattctggggtttaagaaattcatgttgacacacctggtaaatatcgaccaggatacatacaggctggaatgcaacggagctatatccgcccaatgtaatctgtgcctcctgggctctagtgattctccagcctcagccagttag

SEQ ID NO: 248349 - DNA, 1602 bp, Artificial Sequence
  derived and/or modified sequence
atggcgcagatgctgcacaggttactcgggcacataaagaatgttcccctcattctaaagagaatgaagctttcccatacaaaggtgtcagactggcaggtactatataaaaccgtgtactctgccttgggattacgggacgcgtgtcgctctcttccccaaagtattcagcttttccgggacatcgctcaggagtttagtgacgatctacatcatatcgcctcactgattggaaaggtggtcgacttcgaggggagcctggcagagaacagattcaccgtgctccccaatatcgatcccgagattgacgagaagaaacgaagactaatggggctgccgtccttccttaccgaggtggcccgcaaggagctggagaatttggatagcagaatccccagctgctccgtaatctacatccctctcataggctttttactctctataccacggctgccttcaatggtggaggcctctgattttgaaatcaatggacttgacttcatgtttctatccgaagagaagctgcactatcgttcagctaggaccaaagaactggacgctttgttgggagaccttcattgtgagatacgagaccaggaaacgttgctcatgtatcagctccagtgtcaagtgttagcaagagctgcagttctcactagggtgctcgaccttgcctccaggcttgatgtgctcctggcacttgcttctgcagccagagattacgggtactcacgtccgagatactccccccaagttctcggagtcagaatacagaacggacgacatcctttaatggagttatgtgcgcgtacattcgtgcccaatagcacagaatgcgggggcgataagggccgggtaaaagtgattaccggccccaattctagcggaaagagtatctatctaaaacaggtcggcctgattacttttatggcgcttgtgggctcttttgtcccggccgaagaggcagaaattggcgccgtcgatgccatttttacacggatccactcatgcgagtccatcagcctgggactcagcaccttcatgattgaccttaatcaggttgcaaaggcggtgaataatgcaaccgcacagtctctcgtgctgattgatgagtttggaaaagggaccaataccgtcgacggtctcgccttgctggccgccgtgctaaggcactggctcgcgagagggcccacctgtccccatattttcgtggccacaaatttcctcagcctggtccagctccagctcctcccacaggggccactagtccagtatctcacaatggaaacctgcgaggacgggaatgacctcgttttcttttaccaggtatgcgagggcgtggcgaaagctagccacgctagtcatactgcagcacaagctggtcttcctgacaaactcgtggcccgaggtaaggaggtctctgatcttatcagatcgggtaagccaattaagcctgtcaaggacctccttaagaagaaccagatggaaaattgtcagacattagtggataagttcatgaaacttgacctagaggatccaaacttagatctgaacgttttcatgtctcaagaggtgctgcccgcggcaactagcattctgtag

SEQ ID NO: 248350 - DNA, 2556 bp, Artificial Sequence
  derived and/or modified sequence
atggctagccttggcgccaaccccagacgcacccctcaggggcctcgccccggcgctgcaagtagcgggtttccaagccctgcgcccgtgcctgggcctcgtgaggcagaggaagaggaggtcgaggaggaggaggagttagcagagattcacctctgcgtgctctggaatagcggctacttaggtattgcttattatgatacttctgattccactatccacttcatgcctgacgcgccggaccacgaaagtctgaagctacttcagagagttttagatgaaattaacccacaatccgtcgtgacatctgccaagcaggacgagaacatgacccggtttctaggtaagctggctagccaggaacaccgggaacctaagaggcctgagataatttttctgccctcggtggacttcggtctcgaaatcagtaagcaaaggctactctcaggcaactacagctttatacctgacgccatgactgccacagagaagatcctctttcttagttcaattattccgttcgattgcttactgactccccccggcgatctacggtttactccaattcctctgctcattccctctcaggttcgcgctctaggcgggctactcaagttcctggggcgacgacgcataggggtagaacttgaagattacaatgtaagcgtgcccatactgggattcaagaaattcatgctgactcatctagtgaacatagatcaggatacgtattccgttctccagatctttaaatctgaatcccacccctcggtgtataaggtggcaagtggcctgaaggagggtttgtctttgttcggaatcttgaaccggtgtcattgcaagtggggggagaagctgctgagactgtggttcacgcgacctacccacgacctgggcgagctgagcagcagattggacgtgattcagtttttcttgctaccccaaaatttagatatggctcaaatgctccacaggcttctcgggcacattaaaaacgtcccattgatcctaaaacgcatgaaactgtcccatacgaaggtgtccgattggcaggtgctgtataaaacagtttattccgctttggggctgagggatgcttgcagatctctaccccagtcgatccaactgtttcgagatatcgcacaggagttcagtgatgacctgcatcatattgcatccttgatcgggaaagttgtggattttgaagggtctctggccgaaaatcgcttcactgtactgcctaatatcgacccggaaattgacgaaaaaaaacgtcggttaatgggcctccctagctttctgacagaagtggccagaaaggaactggagaacctggactctcgaatcccatcttgctcagtaatttatataccacttatcggttttctcctgtctataccaaggttaccctcgatggtggaagcttccgactttgagattaacggactagattttatgtttctgtccgaagagaagctccattatcgatccgcaagaaccaaggagctggatgcactcttaggcgatctgcactgtgagattcgcgatcaagaaacccttttgatgtatcagctgcagtgccaagttctggccagggccgccgtgctcactcgcgtgctggatttggcatcaaggctggacgtgctgctggccctggcttctgccgcaagggactacggatactcccgcccaagatatagtccacaggtgttgggcgtaaggatccagaacgggcgccatccactgatggaactttgtgcacgaacctttgttcctaattctacagagtgtggaggagacaaagggcgggtgaaggtcattaccgggcctaatagcagtggaaaatctatttacctgaagcaggtgggtctgataactttcatggcactagttggatccttcgtgccagccgaagaggctgaaataggagctgtcgatgcaatcttcacaaggatccattcctgtgagtcaattagcctgggtctcagcaccttcatgatcgatttaaaccaggttgctaaagccgtcaataacgcaacagcacagagtcttgtgctgatcgatgagttcgggaagggcacaaacacagtggatggcttggcgctcctggctgcggtacttaggcactggctagcaagagggcccacttgcccccatatatttgtggcaaccaacttcctgagcctggtgcaactgcagctgcttccacagggcccactcgtgcaatacctcaccatggagacttgtgaggatggcaatgaccttgtgttcttttatcaagtgtgtgaaggcgttgccaaagcatcacacgcctcacacaccgcggcccaggcgggcctgcctgacaagctggtggccagaggaaaagaggtgagtgacctgatcaggagcggaaagccaataaagccagtgaaagatctgctgaaaaagaaccagatggagaactgtcagacattggtagacaaattcatgaaattagatctggaagacccgaacctcgacctgaatgtgtttatgtctcaggaggtgctccccgcggccaccagtattctctag

SEQ ID NO: 248351 - DNA, 2823 bp, Artificial Sequence
  derived and/or modified sequence
agcggttaggagggcggggcgcgtgcgcgcgcacctcgctcacgcgccggcgcgctccttttgcaggctcgtggcggtcggtcagcggggcgttctcccacctgtagcgactcagagcctccaagctcatggcctccttaggagcgaacccaaggaggacaccgcagggaccgagacctggggcggcctcctccggcttccccagcccggccccagtgccgggccccagggaggccgaggaggaggaagtcgaggaggaggaggagctggccgagatccatctgtgtgtgctgtggaattcaggatacttgggcattgcctactatgatactagtgactccactatccacttcatgccagatgccccagaccacgagagcctcaagcttctccagagagttctggatgagatcaatccccagtctgttgttacgagtgccaaacaggatgagaatatgactcgatttctgggaaagcttgcctcccaggagcacagagagcctaaaagacctgaaatcatatttttgccaagtgtggattttggtctggagataagcaaacaacgcctcctttctggaaactactccttcatcccagacgccatgactgccactgagaaaatcctcttcctctcttccattattccctttgactgcctcctcacacccccaggagatttaagatttaccccgattccactgctgatcccctcccaggttcgagcacttggagggctgctgaagttcctgggtcgaagaagaatcggggttgaactggaagactataatgtcagcgtccccatcctgggctttaagaaatttatgttgactcatctggtgaacatagatcaagacacttacagtgttctacagatttttaagagtgagtctcacccctcagtgtacaaagtggccagtggactgaaggaggggctcagcctctttggaatcctcaacagatgccactgtaagtggggagagaagctgctcaggctatggttcacacgtccgactcatgacctgggggagctcagttctcgtctggacgtcattcagttttttctgctgccccagaatctggacatggctcagatgctgcatcggctcctgggtcacatcaagaacgtgcctctgattctgaaacgcatgaagttgtcccacaccaaggtcagcgactggcaggttctctacaagactgtgtacagtgccctgggcctgagggatgcctgccgctccctgccgcagtccatccagctctttcgggacattgcccaagagttctctgatgacctgcaccatatcgccagcctcattgggaaagtagtggactttgagggcagccttgctgaaaatcgcttcacagtcctccccaacatagatcctgaaattgatgagaaaaagcgaagactgatgggacttcccagtttccttactgaggttgcccgcaaggagctggagaatctggactcccgtattccttcatgcagtgtcatctacatccctctgattggcttccttctttctattccccgcctgccttccatggtagaggccagtgactttgagattaatggactggacttcatgtttctctcagaggagaagctgcactatcgtagtgcccgaaccaaggagctggatgcattgctgggggacctgcactgcgagatccgggaccaggagacgctgctgatgtaccagctacagtgccaggtgctggcacgagcagctgtcttaacccgagtattggaccttgcctcccgcctggacgtcctgctggctcttgccagtgctgcccgggactatggctactcaaggccgcgttactccccacaagtccttggggtacgaatccagaatggcagacatcctctgatggaactctgtgcccgaacctttgtgcccaactccacagaatgtggtggggacaaagggagggtcaaagtcatcactggacccaactcatcagggaagagcatatacctcaaacaggtaggcttgatcacattcatggccctggtaggcagctttgtgccagcagaggaggccgaaattggggcagtagacgccatcttcacacgaattcatagctgcgaatccatctcccttggcctctccaccttcatgatcgacctcaaccaggtggcgaaagcagtgaacaatgccactgcacagtcgctggtccttattgatgaatttggaaagggaaccaacacggtggatgggctcgcgcttctggccgctgtgctccgacactggctggcacgtggacccacatgcccccacatctttgtggccaccaactttctgagccttgttcagctacaactgctgccacaagggcccctggtgcagtatttgaccatggagacctgtgaggatggcaacgatcttgtcttcttctatcaggtttgcgaaggtgttgcgaaggccagccatgcctcccacacagctgcccaggctgggcttcctgacaagcttgtggctcgtggcaaggaggtctcagacttgatccgcagtggaaaacccatcaagcctgtcaaggatttgctaaagaagaaccaaatggaaaattgccagacattagtggataagtttatgaaactggatttggaagatcctaacctggacttgaacgttttcatgagccaggaagtgctgcctgctgccaccagcatcctctgagagtccttccagtgtcctccccagcctcctgagactccggtgggctgccatgccctctttgtttccttatctccctcagacgcagagtttttagtttctctagaaattttgtttcatattaggaataaagtttattttg

SEQ ID NO: 248352 - DNA, 2775 bp, Artificial Sequence
  derived and/or modified sequence
ggttaggagggcggggcgcgtgcgcgcgcacctcgctcacgcgccggcgcgctccttttgcaggctcgtggcggtcggtcagcggggcgttctcccacctgtagcgactcagagcctccaagctcatggcctccttaggagcgaacccaaggaggacaccgcagggaccgagacctggggcggcctcctccggcttccccagcccggccccagtgccgggccccagggaggccgaggaggaggaagtcgaggaggaggaggagctggccgagatccatctgtgtgtgctgtggaattcaggatacttgggcattgcctactatgatactagtgactccactatccacttcatgccagatgccccagaccacgagagcctcaagcttctccagagagttctggatgagatcaatccccagtctgttgttacgagtgccaaacaggatgagaatatgactcgatttctgggaaagcttgcctcccaggagcacagagagcctaaaagacctgaaatcatatttttgccaagtgtggattttggtctggagataagcaaacaacgcctcctttctggaaactactccttcatcccagacgccatgactgccactgagaaaatcctcttcctctcttccattattccctttgactgcctcctcacagttcgagcacttggagggctgctgaagttcctgggtcgaagaagaatcggggttgaactggaagactataatgtcagcgtccccatcctgggctttaagaaatttatgttgactcatctggtgaacatagatcaagacacttacagtgttctacagatttttaagagtgagtctcacccctcagtgtacaaagtggccagtggactgaaggaggggctcagcctctttggaatcctcaacagatgccactgtaagtggggagagaagctgctcaggctatggttcacacgtccgactcatgacctgggggagctcagttctcgtctggacgtcattcagttttttctgctgccccagaatctggacatggctcagatgctgcatcggctcctgggtcacatcaagaacgtgcctctgattctgaaacgcatgaagttgtcccacaccaaggtcagcgactggcaggttctctacaagactgtgtacagtgccctgggcctgagggatgcctgccgctccctgccgcagtccatccagctctttcgggacattgcccaagagttctctgatgacctgcaccatatcgccagcctcattgggaaagtagtggactttgagggcagccttgctgaaaatcgcttcacagtcctccccaacatagatcctgaaattgatgagaaaaagcgaagactgatgggacttcccagtttccttactgaggttgcccgcaaggagctggagaatctggactcccgtattccttcatgcagtgtcatctacatccctctgattggcttccttctttctattccccgcctgccttccatggtagaggccagtgactttgagattaatggactggacttcatgtttctctcagaggagaagctgcactatcgtagtgcccgaaccaaggagctggatgcattgctgggggacctgcactgcgagatccgggaccaggagacgctgctgatgtaccagctacagtgccaggtgctggcacgagcagctgtcttaacccgagtattggaccttgcctcccgcctggacgtcctgctggctcttgccagtgctgcccgggactatggctactcaaggccgcgttactccccacaagtccttggggtacgaatccagaatggcagacatcctctgatggaactctgtgcccgaacctttgtgcccaactccacagaatgtggtggggacaaagggagggtcaaagtcatcactggacccaactcatcagggaagagcatatacctcaaacaggtaggcttgatcacattcatggccctggtaggcagctttgtgccagcagaggaggccgaaattggggcagtagacgccatcttcacacgaattcatagctgcgaatccatctcccttggcctctccaccttcatgatcgacctcaaccaggtggcgaaagcagtgaacaatgccactgcacagtcgctggtccttattgatgaatttggaaagggaaccaacacggtggatgggctcgcgcttctggccgctgtgctccgacactggctggcacgtggacccacatgcccccacatctttgtggccaccaactttctgagccttgttcagctacaactgctgccacaagggcccctggtgcagtatttgaccatggagacctgtgaggatggcaacgatcttgtcttcttctatcaggtttgcgaaggtgttgcgaaggccagccatgcctcccacacagctgcccaggctgggcttcctgacaagcttgtggctcgtggcaaggaggtctcagacttgatccgcagtggaaaacccatcaagcctgtcaaggatttgctaaagaagaaccaaatggaaaattgccagacattagtggataagtttatgaaactggatttggaagatcctaacctggacttgaacgttttcatgagccaggaagtgctgcctgctgccaccagcatcctctgagagtccttccagtgtcctccccagcctcctgagactccggtgggctgccatgccctctttgtttccttatctccctcagacgcagagtttttagtttctctagaaattttgtttcatattaggaataaagtttattttgaagaaa

SEQ ID NO: 248353 - DNA, 3094 bp, Artificial Sequence
  derived and/or modified sequence
agcggttaggagggcggggcgcgtgcgcgcgcacctcgctcacgcgccggcgcgctccttttgcaggctcgtggcggtcggtcagcggggcgttctcccacctgtagcgactcaggttactgaaaaggcgggaaaacgctgcgatggcggcagctgggggaggaggaagataagcgcgtgaggctggggtcctggcgcgtggttggcagaggcagagacataagacgtgcacgactcgccccacagggccctcagaccccttccttccaaaggagcctccaagctcatggcctccttaggagcgaacccaaggaggacaccgcagggaccgagacctggggcggcctcctccggcttccccagcccggccccagtgccgggccccagggaggccgaggaggaggaagtcgaggaggaggaggagctggccgagatccatctgtgtgtgctgtggaattcaggatacttgggcattgcctactatgatactagtgactccactatccacttcatgccagatgccccagaccacgagagcctcaagcttctccagagagttctggatgagatcaatccccagtctgttgttacgagtgccaaacaggatgagaatatgactcgatttctgggaaagcttgcctcccaggagcacagagagcctaaaagacctgaaatcatatttttgccaagtgtggattttggtctggagataagcaaacaacgcctcctttctggaaactactccttcatcccagacgccatgactgccactgagaaaatcctcttcctctcttccattattccctttgactgcctcctcacagttcgagcacttggagggctgctgaagttcctgggtcgaagaagaatcggggttgaactggaagactataatgtcagcgtccccatcctgggctttaagaaatttatgttgactcatctggtgaacatagatcaagacacttacagtgttctacagatttttaagagtgagtctcacccctcagtgtacaaagtggccagtggactgaaggaggggctcagcctctttggaatcctcaacagatgccactgtaagtggggagagaagctgctcaggctatggttcacacgtccgactcatgacctgggggagctcagttctcgtctggacgtcattcagttttttctgctgccccagaatctggacatggctcagatgctgcatcggctcctgggtcacatcaagaacgtgcctctgattctgaaacgcatgaagttgtcccacaccaaggtcagcgactggcaggttctctacaagactgtgtacagtgccctgggcctgagggatgcctgccgctccctgccgcagtccatccagctctttcgggacattgcccaagagttctctgatgacctgcaccatatcgccagcctcattgggaaagtagtggactttgagggcagccttgctgaaaatcgcttcacagtcctccccaacatagatcctgaaattgatgagaaaaagcgaagactgatgggacttcccagtttccttactgaggttgcccgcaaggagctggagaatctggactcccgtattccttcatgcagtgtcatctacatccctctgattggcttccttctttctattccccgcctgccttccatggtagaggccagtgactttgagattaatggactggacttcatgtttctctcagaggagaagctgcactatcgtagtgcccgaaccaaggagctggatgcattgctgggggacctgcactgcgagatccgggaccaggagacgctgctgatgtaccagctacagtgccaggtgctggcacgagcagctgtcttaacccgagtattggaccttgcctcccgcctggacgtcctgctggctcttgccagtgctgcccgggactatggctactcaaggccgcgttactccccacaagtccttggggtacgaatccagaatggcagacatcctctgatggaactctgtgcccgaacctttgtgcccaactccacagaatgtggtggggacaaagggagggtcaaagtcatcactggacccaactcatcagggaagagcatatacctcaaacaggtaggcttgatcacattcatggccctggtaggcagctttgtgccagcagaggaggccgaaattggggcagtagacgccatcttcacacgaattcatagctgcgaatccatctcccttggcctctccaccttcatgatcgacctcaaccaggtggcgaaagcagtgaacaatgccactgcacagtcgctggtccttattgatgaatttggaaagggaaccaacacggtggatgggctcgcgcttctggccgctgtgctccgacactggctggcacgtggacccacatgcccccacatctttgtggccaccaactttctgagccttgttcagctacaactgctgccacaagggcccctggtgcagtatttgaccatggagacctgtgaggatggcaacgatcttgtcttcttctatcaggtttgcgaaggtgttgcgaaggccagccatgcctcccacacagctgcccaggctgggcttcctgacaagcttgtggctcgtggcaaggaggtctcagacttgatccgcagtggaaaacccatcaagcctgtcaaggatttgctaaagaagaaccaaatggaaaattgccagacattagtggataagtttatgaaactggatttggaagatcctaacctggacttgaacgttttcatgagccaggaagtgctgcctgctgccaccagcatcctctgagagtccttccagtgtcctccccagcctcctgagactccggtgggctgccatgccctctttgtttccttatctccctcagacgcagagtttttagtttctctagaaattttgtttcatattaggaataaagtttattttgaagaaagatattgtttctttagtctcaaaacaagagactaggaaagatccaaaacacagagcaggagtccacaggggaacctgccctgcctcagtaaaaatacagtgttgttgctgtaggaagactcccggattctaccccaggatacttcatgagaacgaacc

SEQ ID NO: 248354 - DNA, 2348 bp, Artificial Sequence
  derived and/or modified sequence
agcggttaggagggcggggcgcgtgcgcgcgcacctcgctcacgcgccggcgcgctccttttgcaggctcgtggcggtcggtcagcggggcgttctcccacctgtagcgactcagagcctccaagctcatggcctccttaggagcgaacccaaggaggacaccgcagggaccgagacctggggcggcctcctccggcttccccagcccggccccagtgccgggccccagggaggccgaggaggaggaagtcgaggaggaggaggagctggccgagatccatctgtgtgtgctgtggaattcaggatacttgggcattgcctactatgatactagtgactccactatccacttcatgccagatgccccagaccacgagagcctcaagcttctccagagagttctggatgagatcaatccccagtctgttgttacgagtgccaaacaggatgagaatatgactcgatttctgggaaagcttgcctcccaggagcacagagagcctaaaagacctgaaatcatatttttgccaagtgtggattttggtctggagataagcaaacaacgcctcctttctggaaactactccttcatcccagacgccatgactgccactgagaaaatcctcttcctctcttccattattccctttgactgcctcctcacagttcgagcacttggagggctgctgaagttcctgggtcgaagaagaatcggggttgaactggaagactataatgtcagcgtccccatcctgggctttaagaaatttatgttgactcatctggtgaacatagatcaagacacttacagtgttctacagatttttaagagtgagtctcacccctcagtgtacaaagtggccagtggactgaaggaggggctcagcctctttggaatcctcaacagatgccactgtaagtggggagagaagctgctcaggctatggttcacacgtccgactcatgacctgggggagctcagttctcgtctggacgtcattcagttttttctgctgccccagaatctggacatggctcagatgctgcatcggctcctgggtcacatcaagaacgtgcctctgattctgaaacgcatgaagttgtcccacaccaaggtcagcgactggcaggttctctacaagactgtgtacagtgccctgggcctgagggatgcctgccgctccctgccgcagtccatccagctctttcgggacattgcccaagagttctctgatgacctgcaccatatcgccagcctcattgggaaagtagtggactttgagggcagccttgctgaaaatcgcttcacagtcctccccaacatagatcctgaaattgatgagaaaaagcgaagactgatgggacttcccagtttccttactgaggttgcccgcaaggagctggagaatctggactcccgtattccttcatgcagtgtcatctacatccctctgattggcttccttctttctattccccgcctgccttccatggtagaggccagtgactttgagattaatggactggacttcatgtttctctcagaggagaagctgcactatcgtagtgcccgaaccaaggagctggatgcattgctgggggacctgcactgcgagatccgggaccaggagacgctgctgatgtaccagctacagtgccaggtgctggcacgagcagctgtcttaacccgagtattggaccttgcctcccgcctggacgtcctgctggctcttgccagtgctgcccgggactatggctactcaaggccgcgttactccccacaagtccttggggtacgaatccagaatggcagacatcctctgatggaactctgtgcccgaacctttgtgcccaactccacagaatgtggtggggacaaagggagggtcaaagtcatcactggacccaactcatcagggaagagcatatacctcaaacaggtaggcttgatcacattcatggccctggtaggcagctttgtgccagcagaggaggccgaaattggggcagtagacgccatcttcacacgaattcatagctgcgaatccatctcccttggcctctccaccttcatgatcgacctcaaccaggtggcgaaagcagtgaacaatgccactgcacagtcgctggtccttattgatgaatttggaaagggaaccaacacggtggatgggctcgcgcttctggccgctgtgctccgacactggctggcacgtggacccacatgcccccacatctttgtggccaccaactttctgagccttgttcagctacaactgctgccacaagggcccctggtgcagtatttggattggccaagggtttcaggacaggaaggaggtgattga

SEQ ID NO: 248355 - DNA, 1000 bp, Artificial Sequence
  derived and/or modified sequence
aaaatcctcttcctctcttccattattccctttgactgcctcctcacagttcgagcacttggagggctgctgaagttcctgggtcgaagaagaatcggggttgaactggaagactataatgtcagcgtccccatcctgggctttaagaaatttatgttgactcatctggtgaacatagatcaagacacttacagtgttctacagatttttaagagtgagtctcacccctcagtgtacaaagtggccagtggactgaaggaggggctcagcctctttggaatcctcaacagatgccactgtaagtggggagagaagctgctcaggctatggttcacacgtccgactcatgacctgggggagctcagttctcgtctggacgtcattcagttttttctgctgccccagaatctggacatggctcagatgctgcatcggctcctgggtcacatcaagaacgtgcctctgattctgaaacgcatgaagttgtcccacaccaaggtcagcgactggcaggttctctacaagactgtgtacagtgccctgggcctgagggatgcctgccgctccctgccgcagtccatccagctctttcgggacattgcccaagagttctctgatgacctgcaccatatcgccagcctcattgggaaagtatacttatctcctcaggtggactttgagggcagccttgctgaaaatcgcttcacagtcctccccaacatagatcctgaaattgatgagaaaaagcgaagactgatgggacttcccagtttccttactgaggttgcccgcaaggagctggagaatctggactcccgtattccttcatgcagtgtcatctacatccctctgattggcttccttctttctattccccgcctgccttccatggtagaggccagtgactttgagattaatggactggacttcatgtttctctcagaggagaagctgcactatcgtagtgcccgaaccaaggagctggatgcattgctggggg

SEQ ID NO: 248356 - DNA, 2704 bp, Artificial Sequence
  derived and/or modified sequence
gtgatagaaatcatatagaaatacagaaaattgcttgatatttcccccactcttttttttttgagacagagtcttgctctgtcaccaggctggagtgcagtggcacaatcttggctcactgcaacctccacctcccgggttgggtttcaagtgattctcctgcctcagcctcccgagtagctgggactataggcgtgtgccaccatgcctggctaatttttgtatttttagtagagacagggtttcaccatgatggccaggatggtcttgatctcttgacctcgtgatccacccgcctcggcctcccaaagtgctgggattacaggtgtgagccaccgcgcccggccctgatagccaatgaggtttttttgtcattgttcttcttgtatcattacagactcatggccttttgtagctatatttctctttctcccgactctgtacaaactcctttgttttagagtttgcacaaccctctatcaaagcacctaccacctcacttttaaatcttctgcatgtatttctgtcttccttcctagactgtgagcacatctgggacagggaccatatctttttttgtttatttgttttgttttgagacagagtctcgctctgtcggccaggctggagtgcaatggcgtgatctggctataacctccacctcccgggttcaagagattctcctgcctcagcctcccaagtagctggaattacatgtgcatgccaccaagcccagttaatttttgtattttgagtagagacagggtttcaccatgttggtgaggctgatctcgaactcctgacctcaggtgatctacccacctcagcctcccaaagtgctgggattacaggcatgagccactgtgcctggccaggaccatatcttaattgtctttgtagtttcagtgtttggtacagtgcctctcactgtttctttttgcctttgagatcttccctctttgttactgtgatcttccctactggtctttgttcttctgagtctgtccctatcaccacctcaacccgagctggatgtggcctgtcctcctttttgtgtttctctcacagactgtgtacagtgccctgggcctgagggatgcctgccgctccctgccgcagtccatccagctctttcgggacattgcccaagagttctctgatgacctgcaccatatcgccagcctcattgggaaagtagtggactttgagggcagccttgctgaaaatcgcttcacagtcctccccaacatagatcctgaaattgatgagaaaaagcgaagactgatgggacttcccagtttccttactgaggttgcccgcaaggagctggagaatctggactcccgtattccttcatgcagtgtcatctacatccctctgattggcttccttctttctattccccgcctgccttccatggtagaggccagtgactttgagattaatggactggacttcatgtttctctcagaggagaagctgcactatcgtagtgcccgaaccaaggagctggatgcattgctgggggacctgcactgcgagatccgggaccaggagacgctgctgatgtaccagctacagtgccaggtgctggcacgagcagctgtcttaacccgagtattggaccttgcctcccgcctggacgtcctgctggctcttgccagtgctgcccgggactatggctactcaaggccgcgttactccccacaagtccttggggtacgaatccagaatggcagacatcctctgatggaactctgtgcccgaacttttgtgcccaactccacagaatgtggtggggacaaagggagggtcaaagtcatcactggacccaactcatcagggaagagcatatacctcaaacaggtaggcttgatcacattcatggccctggtaggcagctttgtgccagcagaggaggccgaaattggggcagtagacgccatcttcacacgaattcatagctgcgaatccatctcccttggcctctccaccttcatgatcgacctcaaccaggtggcgaaagcagtgaacaatgccactgcacagtcgctggtccttattgatgaatttggaaagggaaccaacacggtggatgggctcgcgcttctggccgctgtgctccgacactggctggcacgtggacccacatgcccccacatctttgtggccaccaactttctgagccttgttcagctacagctgctgccacaagggcccctggtgcagtatttgaccatggagacctgtgaggatggcaacgatcttgtcttcttctatcaggtttgcgaaggtgttgcgaaggccagccatgcctcccacacagctgcccaggctgggcttcctgacaagcttgtggctcgtggcaaggaggtctcagacttgatccgcagtggaaaacccatcaagcctgtcaaggatttgctaaagaagaaccaaatggaaaattgccagacattagtggataagtttatgaaactggatttggaagatcctaacctggacttgaacgttttcatgagccaggaagtgctgcctgctgccaccagcatcctctgagagtccttccagtgtcctccccagcctcctgagactccggtgggctgccatgccctctttgtttccttatctccctcagacgcagagtttttagtttctctagaaattttgtttcatattaggaataaagtttattttgaagaaa

SEQ ID NO: 248357 - DNA, 2729 bp, Artificial Sequence
  derived and/or modified sequence
gcgcgctccttttgcaggctcgtggcggtcggtcagcggggcgttctcccacctgtagcgactcagagcctccaagctcatggcctccttaggagcgaacccaaggaggacaccgcagggaccgagacctggggcggcctcctccggcttccccagcccggccccagtgccgggccccagggaggccgaggaggaggaagtcgaggaggaggaggagctggccgagatccatctgtgtgtgctgtggaattcaggatacttgggcattgcctactatgatactagtgactccactatccacttcatgccagatgccccagaccacgagagcctcaagcttctccagagagttctggatgagatcaatccccagtctgttgttacgagtgccaaacaggatgagaatatgactcgatttctgggaaagcttgcctcccaggagcacagagagcctaaaagacctgaaatcatatttttgccaagtgtggattttggtctggagataagcaaacaacgcctcctttctggaaactactccttcatcccagacgccatgactgccactgagaaaatcctcttcctctcttccattattccctttgactgcctcctcacagttcgagcacttggagggctgctgaagttcctgggtcgaagaagaatcggggttgaactggaagactataatgtcagcgtccccatcctgggctttaagaaatttatgttgactcatctggtgaacatagatcaagacacttacagtgttctacagatttttaagagtgagtctcacccctcagtgtacaaagtggccagtggactgaaggaggggctcagcctctttggaatcctcaacagatgccactgtaagtggggagagaagctgctcaggctatggttcacacgtccgactcatgacctgggggagctcagttctcgtctggacgtcattcagttttttctgctgccccagaatctggacatggctcagatgctgcatcggctcctgggtcacatcaagaacgtgcctctgattctgaaacgcatgaagttgtcccacaccaaggtcagcgactggcaggttctctacaagactgtgtacagtgccctgggcctgagggatgcctgccgctccctgccgcagtccatccagctctttcgggacattgcccaagagttctctgatgacctgcaccatatcgccagcctcattgggaaagtagtggactttgagggcagccttgctgaaaatcgcttcacagtcctccccaacatagatcctgaaattgatgagaaaaagcgaagactgatgggacttcccagtttccttactgaggttgcccgcaaggagctggagaatctggactcccgtattccttcatgcagtgtcatctacatccctctgattggcttccttctttctattccccgcctgccttccatggtagaggccagtgactttgagattaatggactggacttcatgtttctctcagaggagaagctgcactatcgtagtgcccgaaccaaggagctggatgcattgctgggggacctgcactgcgagatccgggaccaggagacgctgctgatgtaccagctacagtgccaggtgctggcacgagcagctgtcttaacccgagtattggaccttgcctcccgcctggacgtcctgctggctcttgccagtgctgcccgggactatggctactcaaggccgcgttactccccacaagtccttggggtacgaatccagaatggcagacatcctctgatggaactctgtgcccgaacttttgtgcccaactccacagaatgtggtggggacaaagggagggtcaaagtcatcactggacccaactcatcagggaagagcatatacctcaaacaggtaggcttgatcacattcatggccctggtaggcagctttgtgccagcagaggaggccgaaattggggcagtagacgccatcttcacacgaattcatagctgcgaatccatctcccttggcctctccaccttcatgatcgacctcaaccaggtggcgaaagcagtgaacaatgccactgcacagtcgctggtccttattgatgaatttggaaagggaaccaacacggtggatgggctcgcgcttctggccgctgtgctccgacactggctggcacgtggacccacatgcccccacatctttgtggccaccaactttctgagccttgttcagctacagctgctgccacaagggcccctggtgcagtatttgaccatggagacctgtgaggatggcaacgatcttgtcttcttctatcaggtttgcgaaggtgttgcgaaggccagccatgcctcccacacagctgcccaggctgggcttcctgacaagcttgtggctcgtggcaaggaggtctcagacttgatccgcagtggaaaacccatcaagcctgtcaaggatttgctaaagaagaaccaaatggaaaattgccagacattagtggataagtttatgaaactggatttggaagatcctaacctggacttgaacgttttcatgagccaggaagtgctgcctgctgccaccagcatcctctgagagtccttccagtgtcctccccagcctcctgagactccggtgggctgccatgccctctttgtttccttatctccctcagacgcagagtttttagtttctctagaaattttgtttcatattaggaataaagtttattttgaagaaa

SEQ ID NO: 248358 - DNA, 2729 bp, Artificial Sequence
  derived and/or modified sequence
gcgcgctccttttgcaggctcgtggcggtcggtcagcggggcgttctcccacctgtagcgactcagagcctccaagctcatggcctccttaggagcgaacccaaggaggacaccgcagggaccgagacctggggcggcctcctccggcttccccagcccggccccagtgccgggccccagggaggccgaggaggaggaagtcgaggaggaggaggagctggccgagatccatctgtgtgtgctgtggaattcaggatacttgggcattgcctactatgatactagtgactccactatccacttcatgccagatgccccagaccacgagagcctcaagcttctccagagagttctggatgagatcaatccccagtctgttgttacgagtgccaaacaggatgagaatatgactcgatttctgggaaagcttgcctcccaggagcacagagagcctaaaagacctgaaatcatatttttgccaagtgtggattttggtctggagataagcaaacaacgcctcctttctggaaactactccttcatcccagacgccatgactgccactgagaaaatcctcttcctctcttccattattccctttgactgcctcctcacagttcgagcacttggagggctgctgaagttcctgggtcgaagaagaatcggggttgaactggaagactataatgtcagcgtccccatcctgggctttaagaaatttatgttgactcatctggtgaacatagatcaagacacttacagtgttctacagatttttaagagtgagtctcacccctcagtgtacaaagtggccagtggactgaaggaggggctcagcctctttggaatcctcaacagatgccactgtaagtggggagagaagctgctcaggctatggttcacacgtccgactcatgacctgggggagctcagttctcgtctggacgtcattcagttttttctgctgccccagaatctggacatggctcagatgctgcatcggctcctgggtcacatcaagaacgtgcctctgattctgaaacgcatgaagttgtcccacaccaaggtcagcgactggcaggttctctacaagactgtgtacagtgccctgggcctgagggatgcctgccgctccctgccgcagtccatccagctctttcgggacattgcccaagagttctctgatgacctgcaccatatcgccagcctcattgggaaagtagtggactttgagggcagccttgctgaaaatcgcttcacagtcctccccaacatagatcctgaaattgatgagaaaaagcgaagactgatgggacttcccagtttccttactgaggttgcccgcaaggagctggagaatctggactcccgtattccttcatgcagtgtcatctacatccctctgattggcttccttctttctattccccgcctgccttccatggtagaggccagtgactttgagattaatggactggacttcatgtttctctcagaggagaagctgcactatcgtagtgcccgaaccaaggagctggatgcattgctgggggacctgcactgcgagatccgggaccaggagacgctgctgatgtaccagctacagtgccaggtgctggcacgagcagctgtcttaacccgagtattggaccttgcctcccgcctggacgtcctgctggctcttgccagtgctgcccgggactatggctactcaaggccgcgttactccccacaagtccttggggtacgaatccagaatggcagacatcctctgatggaactctgtgcccgaacctttgtgcccaactccacagaatgtggtggggacaaagggagggtcaaagtcatcactggacccaactcatcagggaagagcatatacctcaaacaggtaggcttgatcacattcatggccctggtaggcagctttgtgccagcagaggaggccgaaattggggcagtagacgccatcttcacacgaattcatagctgcgaatccatctcccttggcctctccaccttcatgatcgacctcaaccaggtggcgaaagcagtgaacaatgccactgcacagtcgctggtccttattgatgaatttggaaagggaaccaacacggtggatgggctcgcgcttctggccgctgtgctccgacactggctggcacgtggacccacatgcccccacatctttgtggccaccaactttctgagccttgttcagctacaactgctgccacaagggcccctggtgcagtatttgaccatggagacctgtgaggatggcaacgatcttgtcttcttctatcaggtttgcgaaggtgttgcgaaggccagccatgcctcccacacagctgcccaggctgggcttcctgacaagcttgtggctcgtggcaaggaggtctcagacttgatccgcagtggaaaacccatcaagcctgtcaaggatttgctaaagaagaaccaaatggaaaattgccagacattagtggataagtttatgaaactggatttggaagatcctaacctggacttgaacgttttcatgagccaggaagtgctgcctgctgccaccagcatcctctgagagtccttccagtgtcctccccagcctcctgagactccggtgggctgccatgccctctttgtttccttatctccctcagacgcagagtttttagtttctctagaaattttgtttcatattaggaataaagtttattttgaagaaa

SEQ ID NO: 248359 - DNA, 1879 bp, Artificial Sequence
  derived and/or modified sequence
gactcatctggtgaacatagatcaagacacttacaggaatcctcaacagatgccactgtaagtggggagagaagctgctcaggctatggttcacacgtccgactcatgacctgggggagctcagttctcgtctggacgtcattcagttttttctgctgccccagaatctggacatggctcagatgctgcatcggctcctgggtcacatcaagaacgtgcctctgattctgaaacgcatgaagttgtcccacaccaaggtcagcgactggcaggttctctacaagactgtgtacagtgccctgggcctgagggatgcctgccgctccctgccgcagtccatccagctctttcgggacattgcccaagagttctctgatgacctgcaccatatcgccagcctcattgggaaagtagtggactttgagggcagccttgctgaaaatcgcttcacagtcctccccaacatagatcctgaaattgatgagaaaaagcgaagactgatgggacttcccagtttccttactgaggttgcccgcaaggagctggagaatctggactcccgtattccttcatgcagtgtcatctacatccctctgattggcttccttctttctattccccgcctgccttccatggtagaggccagtgactttgagattaatggactggacttcatgtttctctcagaggagaagctgcactatcgtagtgcccgaaccaaggagctggatgcattgctgggggacctgcactgcgagatccgggaccaggagacgctgctgatgtaccagctacagtgccaggtgctggcacgagcagctgtcttaacccgagtattggaccttgcctcccgcctggacgtcctgctggctcttgccagtgctgcccgggactatggctactcaaggccgcgttactccccacaagtccttggggtacgaatccagaatggcagacatcctctgatggaactctgtgcccgaacctttgtgcccaactccacagaatgtggtggggacaaagggagggtcaaagtcatcactggacccaactcatcagggaagagcatatacctcaaacaggtaggcttgatcacattcatggccctggtaggcagctttgtgccagcagaggaggccgaaattggggcagtagacgccatcttcacacgaattcatagctgcgaatccatctcccttggcctctccaccttcatgatcgacctcaaccaggtggcgaaagcagtgaacaatgccactgcacagtcgctggtccttattgatgaatttggaaagggaaccaacacggtggatgggctcgcgcttctggccgctgtgctccgacactggctggcacgtggacccacatgcccccacatctttgtggccaccaactttctgagccttgttcagctacaactgctgccacaagggcccctggtgcagtatttgaccatggagacctgtgaggatggcaacgatcttgtcttcttctatcaggtttgcgaaggtgttgcgaaggccagccatgcctcccacacagctgcccaggctgggcttcctgacaagcttgtggctcgtggcaaggaggtctcagacttgatccgcagtggaaaacccatcaagcctgtcaaggatttgctaaagaagaaccaaatggaaaattgccagacattagtggataagtttatgaaactggatttggaagatcctaacctggacttgaacgttttcatgagccaggaagtgctgcctgctgccaccagcatcctctgagagtccttccagtgtcctccccagcctcctgagactccggtgggctgccatgccctctttgtttccttatctccctcagacgcagagtttttagtttctctaga

SEQ ID NO: 248360 - DNA, 2704 bp, Artificial Sequence
  derived and/or modified sequence
gtgatagaaatcatatagaaatacagaaaattgcttgatatttcccccactcttttttttttgagacagagtcttgctctgtcaccaggctggagtgcagtggcacaatcttggctcactgcaacctccacctcccgggttgggtttcaagtgattctcctgcctcagcctcccgagtagctgggactataggcgtgtgccaccatgcctggctaatttttgtatttttagtagagacagggtttcaccatgatggccaggatggtcttgatctcttgacctcgtgatccacccgcctcggcctcccaaagtgctgggattacaggtgtgagccaccgcgcccggccctgatagccgatgaggtttttttgtcattgttcttcttgtatcattacagactcatggccttttatagctatatttctctttctcccgactctgtacaaactcctttgttttagagtttgcacaaccctctatcaaagcacctaccacctcacttttaaatcttctgcatgtatttctgtcttccttcctagactgtgagcacatctgggacagggaccatatctttttttgtttatttgttttgttttgagacagagtctcgctctgtcggccaggctggagtgcaatggcgtgatctggctataacctccacctcccgggttcaagagattctcctgcctcagcctcccaagtagctggaattacatgtgcatgccaccaagcccagttaatttttgtattttgagtagagacagggtttcaccatgttggtgaggctgatctcgaactcctgacctcaggtgatctacccacctcagcctcccaaagtgctgggattacaggcatgagccactgtgcctggccaggaccatatcttaattgtctttgtagtttcagtgtttggtacagtgcctctcactgtttctttttgcctttgagatcttccctctttgttactgtgatcttccctactggtctttgttcttctgagtctgtccctatcaccacctcaacccgagctggatgtggcctgtcctcctttttgtgtttctctcacagactgtgtacagtgccctgggcctgagggatgcctgccgctccctgccgcagtccatccagctctttcgggacattgcccaagagttctctgatgacctgcaccatatcgccagcctcattgggaaagtagtggactttgagggcagccttgctgaaaatcgcttcacagtcctccccaacatagatcctgaaattgatgagaaaaagcgaagactgatgggacttcccagtttccttactgaggttgcccgcaaggagctggagaatctggactcccgtattccttcatgcagtgtcatctacatccctctgattggcttccttctttctattccccgcctgccttccatggtagaggccagtgactttgagattaatggactggacttcatgtttctctcagaggagaagctgcactatcgtagtgcccgaaccaaggagctggatgcattgctgggggacctgcactgcgagatccgggaccaggagacgctgctgatgtaccagctacagtgccaggtgctggcacgagcagctgtcttaacccgagtattggaccttgcctcccgcctggacgtcctgctggctcttgccagtgctgcccgggactatggctactcaaggccgcgttactccccacaagtccttggggtacgaatccagaatggcagacatcctctgatggaactctgtgcccgaacctttgtgcccaactccacagaatgtggtggggacaaagggagggtcaaagtcatcactggacccaactcatcagggaagagcatatacctcaaacaggtaggcttgatcacattcatggccctggtaggcagctttgtgccagcagaggaggccgaaattggggcagtagacgccatcttcacacgaattcatagctgcgaatccatctcccttggcctctccaccttcatgatcgacctcaaccaggtggcgaaagcagtgaacaatgccactgcacagtcgctggtccttattgatgaatttggaaagggaaccaacacggtggatgggctcgcgcttctggccgctgtgctccgacactggctggcacgtggacccacatgcccccacatctttgtggccaccaactttctgagccttgttcagctacaactgctgccacaagggcccctggtgcagtatttgaccatggagacctgtgaggatggcaacgatcttgtcttcttctatcaggtttgcgaaggtgttgcgaaggccagccatgcctcccacacagctgcccaggctgggcttcctgacaagcttgtggctcgtggcaaggaggtctcagacttgatccgcagtggaaaacccatcaagcctgtcaaggatttgctaaagaagaaccaaatggaaaattgccagacattagtggataagtttatgaaactggatttggaagatcctaacctggacttgaacgttttcatgagccaggaagtgctgcctgctgccaccagcatcctctgagagtccttccagtgtcctccccagcctcctgagactccggtgggctgccatgccctctttgtttccttatctccctcagacgcagagtttttagtttctctagaaattttgtttcatattaggaataaagtttattttgaagaaa

SEQ ID NO: 248361 - DNA, 2884 bp, Artificial Sequence
  derived and/or modified sequence
cgctccttttgcaggctcgtggcggtcggtcagcggggcgttctcccacctgtagcgactcaggttactgaaaaggcgggaaaacgctgcgatggcggcagctgggggaggaggaagataagcgcgtgaggctggggtcctggcgcgtggttggcagaggcagagacataagacgtgcacgactcgccccacagggccctcagaccccttccttccaaaggagcctccaagctcatggcctccttaggagcgaacccaaggaggacaccgcagggaccgagacctggggcggcctcctccggcttccccagcccggccccagtgccgggccccagggaggccgaggaggaggaagtcgaggaggaggaggagctggccgagatccatctgtgtgtgctgtggaattcaggatacttgggcattgcctactatgatactagtgactccactatccacttcatgccagatgccccagaccacgagagcctcaagcttctccagagagttctggatgagatcaatccccagtctgttgttacgagtgccaaacaggatgagaatatgactcgatttctgggaaagcttgcctcccaggagcacagagagcctaaaagacctgaaatcatatttttgccaagtgtggattttggtctggagataagcaaacaacgcctcctttctggaaactactccttcatcccagacgccatgactgccactgagaaaatcctcttcctctcttccattattccctttgactgcctcctcacagttcgagcacttggagggctgctgaagttcctgggtcgaagaagaatcggggttgaactggaagactataatgtcagcgtccccatcctgggctttaagaaatttatgttgactcatctggtgaacatagatcaagacacttacagtgttctacagatttttaagagtgagtctcacccctcagtgtacaaagtggccagtggactgaaggaggggctcagcctctttggaatcctcaacagatgccactgtaagtggggagagaagctgctcaggctatggttcacacgtccgactcatgacctgggggagctcagttctcgtctggacgtcattcagttttttctgctgccccagaatctggacatggctcagatgctgcatcggctcctgggtcacatcaagaacgtgcctctgattctgaaacgcatgaagttgtcccacaccaaggtcagcgactggcaggttctctacaagactgtgtacagtgccctgggcctgagggatgcctgccgctccctgccgcagtccatccagctctttcgggacattgcccaagagttctctgatgacctgcaccatatcgccagcctcattgggaaagtagtggactttgagggcagccttgctgaaaatcgcttcacagtcctccccaacatagatcctgaaattgatgagaaaaagcgaagactgatgggacttcccagtttccttactgaggttgcccgcaaggagctggagaatctggactcccgtattccttcatgcagtgtcatctacatccctctgattggcttccttctttctattccccgcctgccttccatggtagaggccagtgactttgagattaatggactggacttcatgtttctctcagaggagaagctgcactatcgtagtgcccgaaccaaggagctggatgcattgctgggggacctgcactgcgagatccgggaccaggagacgctgctgatgtaccagctacagtgccaggtgctggcacgagcagctgtcttaacccgagtattggaccttgcctcccgcctggacgtcctgctggctcttgccagtgctgcccgggactatggctactcaaggccgcgttactccccacaagtccttggggtacgaatccagaatggcagacatcctctgatggaactctgtgcccgaacctttgtgcccaactccacagaatgtggtggggacaaagggagggtcaaagtcatcactggacccaactcatcagggaagagcatatacctcaaacaggtaggcttgatcacattcatggccctggtaggcagctttgtgccagcagaggaggccgaaattggggcagtagacgccatcttcacacgaattcatagctgcgaatccatctcccttggcctctccaccttcatgatcgacctcaaccaggtggcgaaagcagtgaacaatgccactgcacagtcgctggtccttattgatgaatttggaaagggaaccaacacggtggatgggctcgcgcttctggccgctgtgctccgacactggctggcacgtggacccacatgcccccacatctttgtggccaccaactttctgagccttgttcagctacaactgctgccacaagggcccctggtgcagtatttgaccatggagacctgtgaggatggcaacgatcttgtcttcttctatcaggtttgcgaaggtgttgcgaaggccagccatgcctcccacacagctgcccaggctgggcttcctgacaagcttgtggctcgtggcaaggaggtctcagacttgatccgcagtggaaaacccatcaagcctgtcaaggatttgctaaagaagaaccaaatggaaaattgccagacattagtggataagtttatgaaactggatttggaagatcctaacctggacttgaacgttttcatgagccaggaagtgctgcctgctgccaccagcatcctctgagagtccttccagtgtcctccccagcctcctgagactccggtgggctgccatgccctctttgtttccttatctccctcagacgcagagtttttagtttctctagaaattttgtttcatattaggaataaagtttattttgaagaaa

SEQ ID NO: 248362 - DNA, 616 bp, Artificial Sequence
  derived and/or modified sequence
actgcacagtcgctggtccttattgatgaatttggaaagggaaccaacacggtggatgggctcgcgcttctggccgctgtgctccgacactggctggcacgtggacccacatgcccccacatctttgtggccaccaactttctgagccttgttcagctacaactgctgccacaagggcccctggtgcagtatttggtttgcgaaggtgttgcgaaggccagccatgcctcccacacagctgcccaggctgggcttcctgacaagcttgtggctcgtggcaaggaggtctcagacttgatccgcagtggaaaacccatcaagcctgtcaaggatttgctaaagaagaaccaaatggaaaattgccagacattagtggataagtttatgaaactggatttggaagatcctaacctggacttgaacgttttcatgagccaggaagtgctgcctgctgccaccagcatcctctgagagtccttccagtgtcctccccagcctcctgagactccggtgggctgccatgccctctttgtttccttatctccctcagacgcagagtttttagtttctctagaaattttgtttcatattaggaataaagtttattttgaagaaa

SEQ ID NO: 248363 - DNA, 2884 bp, Artificial Sequence
  derived and/or modified sequence
cgctccttttgcaggctcgtggcggtcggtcagcggggcgttctcccacctgtagcgactcaggttactgaaaaggcgggaaaacgctgcgatggcggcagctgggggaggaggaagataagcgcgtgaggctggggtcctggcgcgtggttggcagaggcagagacataagacgtgcacgactcgccccacagggccctcagaccccttccttccaaaggagcctccaagctcatggcctccttaggagcgaacccaaggaggacaccgcagggaccgagacctggggcggcctcctccggcttccccagcccggccccagtgccgggccccagggaggccgaggaggaggaagtcgaggaggaggaggagctggccgagatccatctgtgtgtgctgtggaattcaggatacttgggcattgcctactatgatactagtgactccactatccacttcatgccagatgccccagaccacgagagcctcaagcttctccagagagttctggatgagatcaatccccagtctgttgttacgagtgccaaacaggatgagaatatgactcgatttctgggaaagcttgcctcccaggagcacagagagcctaaaagacctgaaatcatatttttgccaagtgtggattttggtctggagataagcaaacaacgcctcctttctggaaactactccttcatcccagacgccatgactgccactgagaaaatcctcttcctctcttccattattccctttgactgcctcctcacagttcgagcacttggagggctgctgaagttcctgggtcgaagaagaatcggggttgaactggaagactataatgtcagcgtccccatcctgggctttaagaaatttatgttgactcatctggtgaacatagatcaagacacttacagtgttctacagatttttaagagtgagtctcacccctcagtgtacaaagtggccagtggactgaaggaggggctcagcctctttggaatcctcaacagatgccactgtaagtggggagagaagctgctcaggctatggttcacacgtccgactcatgacctgggggagctcagttctcgtctggacgtcattcagttttttctgctgccccagaatctggacatggctcagatgctgcatcggctcctgggtcacatcaagaacgtgcctctgattctgaaacgcatgaagttgtcccacaccaaggtcagcgactggcaggttctctacaagactgtgtacagtgccctgggcctgagggatgcctgccgctccctgccgcagtccatccagctctttcgggacattgcccaagagttctctgatgacctgcaccatatcgccagcctcattgggaaagtagtggactttgagggcagccttgctgaaaatcgcttcacagtcctccccaacatagatcctgaaattgatgagaaaaagcgaagactgatgggacttcccagtttccttactgaggttgcccgcaaggagctggagaatctggactcccgtattccttcatgcagtgtcatctacatccctctgattggcttccttctttctattccccgcctgccttccatggtagaggccagtgactttgagattaatggactggacttcatgtttctctcagaggagaagctgcactatcgtagtgcccgaaccaaggagctggatgcattgctgggggacctgcactgcgagatccgggaccaggagacgctgctgatgtaccagctacagtgccaggtgctggcacgagcagctgtcttaacccgagtattggaccttgcctcccgcctggacgtcctgctggctcttgccagtgctgcccgggactatggctactcaaggccgcgttactccccacaagtccttggggtacgaatccagaatggcagacatcctctgatggaactctgtgcccgaacttttgtgcccaactccacagaatgtggtggggacaaagggagggtcaaagtcatcactggacccaactcatcagggaagagcatatacctcaaacaggtaggcttgatcacattcatggccctggtaggcagctttgtgccagcagaggaggccgaaattggggcagtagacgccatcttcacacgaattcatagctgcgaatccatctcccttggcctctccaccttcatgatcgacctcaaccaggtggcgaaagcagtgaacaatgccactgcacagtcgctggtccttattgatgaatttggaaagggaaccaacacggtggatgggctcgcgcttctggccgctgtgctccgacactggctggcacgtggacccacatgcccccacatctttgtggccaccaactttctgagccttgttcagctacagctgctgccacaagggcccctggtgcagtatttgaccatggagacctgtgaggatggcaacgatcttgtcttcttctatcaggtttgcgaaggtgttgcgaaggccagccatgcctcccacacagctgcccaggctgggcttcctgacaagcttgtggctcgtggcaaggaggtctcagacttgatccgcagtggaaaacccatcaagcctgtcaaggatttgctaaagaagaaccaaatggaaaattgccagacattagtggataagtttatgaaactggatttggaagatcctaacctggacttgaacgttttcatgagccaggaagtgctgcctgctgccaccagcatcctctgagagtccttccagtgtcctccccagcctcctgagactccggtgggctgccatgccctctttgtttccttatctccctcagacgcagagtttttagtttctctagaaattttgtttcatattaggaataaagtttattttgaagaaa

SEQ ID NO: 248364 - DNA, 616 bp, Artificial Sequence
  derived and/or modified sequence
actgcacagtcgctggtccttattgatgaatttggaaagggaaccaacacggtggatgggctcgcgcttctggccgctgtgctccgacactggctggcacgtggacccacatgcccccacatctttgtggccaccaactttctgagccttgttcagctacagctgctgccacaagggcccctggtgcagtatttggtttgcgaaggtgttgcgaaggccagccatgcctcccacacagctgcccaggctgggcttcctgacaagcttgtggctcgtggcaaggaggtctcagacttgatccgcagtggaaaacccatcaagcctgtcaaggatttgctaaagaagaaccaaatggaaaattgccagacattagtggataagtttatgaaactggatttggaagatcctaacctggacttgaacgttttcatgagccaggaagtgctgcctgctgccaccagcatcctctgagagtccttccagtgtcctccccagcctcctgagactccggtgggctgccatgccctctttgtttccttatctccctcagacgcagagtttttagtttctctagaaattttgtttcatattaggaataaagtttattttgaagaaa

SEQ ID NO: 248365 - DNA, 3986 bp, Artificial Sequence
  derived and/or modified sequence
ggcggtcggtcagcggggcgttctcccacctgtagcgactcagagcctccaagctcatggcctccttaggagcgaacccaaggaggacaccgcagggaccgagacctggggcggcctcctccggcttccccagcccggccccagtgccgggccccagggaggccgaggaggaggaagtcgaggaggaggaggagctggccgagatccatctgtgtgtgctgtggaattcaggatacttgggcattgcctactatgatactagtgactccactatccacttcatgccagatgccccagaccacgagagcctcaagcttctccagagagttctggatgagatcaatccccagtctgttgttacgagtgccaaacaggatgagaatatgactcgatttctgggaaagcttgcctcccaggagcacagagagcctaaaagacctgaaatcatatttttgccaagtgtggattttggtctggagataagcaaacaacgcctcctttctggaaactactccttcatcccagacgccatgactgccactgagaaaatcctcttcctctcttccattattccctttgactgcctcctcacacccccaggagatttaagatttaccccgattccactgctgatcccctcccaggttcgagcacttggagggctgctgaagttcctgggtcgaagaagaatcggggttgaactggaagactataatgtcagcgtccccatcctgggctttaagaaatttatgttgactcatctggtgaacatagatcaagacacttacagtgttctacagatttttaagagtgagtctcacccctcagtgtacaaagtggccagtggactgaaggaggggctcagcctctttggaatcctcaacagatgccactgtaagtggggagagaagctgctcaggctatggttcacacgtccgactcatgacctgggggagctcagttctcgtctggacgtcattcagttttttctgctgccccagaatctggacatggctcagatgctgcatcggctcctgggtcacatcaagaacgtgcctctgattctgaaacgcatgaagttgtcccacaccaaggtcagcgactggcaggttctctacaagactgtgtacagtgccctgggcctgagggatgcctgccgctccctgccgcagtccatccagctctttcgggacattgcccaagagttctctgatgacctgcaccatatcgccagcctcattgggaaagtagtggactttgagggcagccttgctgaaaatcgcttcacagtcctccccaacatagatcctgaaattgatgagaaaaagcgaagactgatgggacttcccagtttccttactgaggttgcccgcaaggagctggagaatctggactcccgtattccttcatgcagtgtcatctacatccctctgattggcttccttctttctattccccgcctgccttccatggtagaggccagtgactttgagattaatggactggacttcatgtttctctcagaggagaagctgcactatcgtagtgcccgaaccaaggagctggatgcattgctgggggacctgcactgcgagatccgggaccaggagacgctgctgatgtaccagctacagtgccaggtgctggcacgagcagctgtcttaacccgagtattggaccttgcctcccgcctggacgtcctgctggctcttgccagtgctgcccgggactatggctactcaaggccgcgttactccccacaagtccttggggtacgaatccagaatggcagacatcctctgatggaactctgtgcccgaacctttgtgcccaactccacagaatgtggtggggacaaagggagggtcaaagtcatcactggacccaactcatcagggaagagcatatacctcaaacaggtaggcttgatcacattcatggccctggtaggcagctttgtgccagcagaggaggccgaaattggggcagtagacgccatcttcacacgaattcatagctgcgaatccatctcccttggcctctccaccttcatgatcgacctcaaccaggtggcgaaagcagtgaacaatgccactgcacagtcgctggtccttattgatgaatttggaaagggaaccaacacggtggatgggctcgcgcttctggccgctgtgctccgacactggctggcacgtggacccacatgcccccacatctttgtggccaccaactttctgagccttgttcagctacaactgctgccacaagggcccctggtgcagtatttgaccatggagacctgtgaggatggcaacgatcttgtcttcttctatcaggtttgcgaaggtgttgcgaaggccagccatgcctcccacacagctgcccaggctgggcttcctgacaagcttgtggctcgtggcaaggaggtctcagacttgatccgcagtggaaaacccatcaagcctgtcaaggatttgctaaagaagaaccaaatggaaaattgccagacattagtggataagtttatgaaactggatttggaagatcctaacctggacttgaacgttttcatgagccaggaagtgctgcctgctgccaccagcatcctctgagagtccttccagtgtcctccccagcctcctgagactccggtgggctgccatgccctctttgtttccttatctccctcagacgcagagtttttagtttctctagaaattttgtttcatattaggaataaagtttattttgaagaaagatattgtttctttagtctcaaaacaagagactaggaaagatccaaaacacagagcaggagtccacaggggaacctgccctgcctcagtaaaaatacagtgttgttgctgtaggaagactcccggattctaccccaggatacttcatgagaacgaaccccttcagagaggccctacaaaacagattagagggaagacagaggggtccaagggagatggtctctcttctcaagtaggaacaccccagcctcagacagacacagcaggaaggggcctgagaggctgacagaggcaggatgggtgcaaggcaggggtggaggggagggaccagcccgggctgcaccagtgggagtggctccacccttcccacctcagagccatggggagccagggctctggcggggtgcccttggtgcaggctccctacacagtcctgctgctgccgctggggacaagccgccaagacccaggggcccagagcttcttcctttggctacgcaggatgcaggctctggagagagaacaggatgccctgtggcagggtctggagctgctacagcatggccaggcctggtttgaagaccatctgagggaggcacagcgacagcagctgcatctaggggcccttggtgagaattttctaacagatttacactcagagcctggtcgccccccgttagcccagattcaaaaggtgaacatctgtttgcagaatctgattcatgagaagttctccccaagtccactgaacaaggctagttcctgcaccacccaggattcaaaggaaagacgaagggagcagaacttgtggcagcaacaggagttgtcaaggcagcagaaaggagtcacccagccaaaggaggagatggctcagcggggctgcaccaaggggccaagaggccctacccgtgtctaaaccctcctctcactcccctaagcctggtgaaagagtcagaagccccaggctcctttttctgtttcttaactcaacagctaaaaaatggctccaggtagtgagtcaatgaagttcagacatgttggtgtaaagtttctcctctgctcctgaaaacttcatcttcttggtgtctcatgtcctcattctcccctatatgacatgcaaaaacgatctttctttgaaatccctctgggaagaagcatgtttattgaaactgtccttcagccttaaatacaaaaataaaactgaaactgctccagaaagcagctttctcc

SEQ ID NO: 248366 - DNA, 944 bp, Artificial Sequence
  derived and/or modified sequence
cttttgcaggctcgtggcggtcggtcagcggggcgttctcccacctgtagcgactcagagcctccaagctcatggcctccttaggagcgaacccaaggaggacaccgcagggaccgagacctggggcggcctcctccggcttccccagcccggccccagtgccgggccccagggaggccgaggaggaggaagtcgaggaggaggaggagctggccgagatccatctgtgtgtgctgtggaattcaggatacttgggcattgcctactatgatactagtgactccactatccacttcatgccagatgccccagaccacgagagcctcaagcttctccagagagttctggatgagatcaatccccagtctgttgttacgagtgccaaacaggatgagaatatgactcgatttctgggaaagcttgcctcccaggagcacagagagcctaaaagacctgaaatcatatttttgccaagtgtggattttggtctggagataagcaaacaacgcctcctttctggaaactactccttcatcccagacgccatgactgccactgagaaaatcctcttcctctcttccattattccctttgactgcctcctcacagttcgagcacttggagggctgctgaagttcctgggtcgaagaagaatcggggttgaactggaagactataatgtcagcgtccccatcctgggctttaagaaatttatgttgactcatctggtgaacatagatcaagacacttacaggctggagtgcaatggtgcgatctcggctcaatgcaacctctgcctcctgggttcaagcgattctcctgcctcagcctcctgagtaactgggattacaggcacctgccaccacacccagctaatttttgtatttttagtagagacggggtttcaccatgttgcccaggctggtcttgaactcctgacctca

SEQ ID NO: 248367 - DNA, 2348 bp, Artificial Sequence
  derived and/or modified sequence
agcggctaggagggcggggcgcgtgcgcgcgcacctcgctcacgcgccggcgcgctccttttgcaggctcgtggcggtcggtcagcggggcgttctcccacctgtagcgactcagagcctccaagctcatggcctccttaggagcgaacccaaggaggacaccgcagggaccgagacctggggcggcctcctccggcttccccagcccggccccagtgccgggccccagggaggccgaggaggaggaagtcgaggaggaggaggagctggccgagatccatctgtgtgtgctgtggaattcaggatacttgggcattgcctactatgatactagtgactccactatccacttcatgccagatgccccagaccacgagagcctcaagcttctccagagagttctggatgagatcaatccccagtctgttgttacgagtgccaaacaggatgagaatatgactcgatttctgggaaagcttgcctcccaggagcacagagagcctaaaagacctgaaatcatatttttgccaagtgtggattttggtctggagataagcaaacaacgcctcctttctggaaactactccttcatcccagacgccatgactgccactgagaaaatcctcttcctctcttccattattccctttgactgcctcctcacagttcgagcacttggagggctgctgaagttcctgggtcgaagaagaatcggggttgaactggaagactataatgtcagcgtccccatcctgggctttaagaaatttatgttgactcatctggtgaacatagatcaagacacttacagtgttctacagatttttaagagtgagtctcacccctcagtgtacaaagtggccagtggactgaaggaggggctcagcctctttggaatcctcaacagatgccactgtaagtggggagagaagctgctcaggctatggttcacacgtccgactcatgacctgggggagctcagttctcgtctggacgtcattcagttttttctgctgccccagaatctggacatggctcagatgctgcatcggctcctgggtcacatcaagaacgtgcctctgattctgaaacgcatgaagttgtcccacaccaaggtcagcgactggcaggttctctacaagactgtgtacagtgccctgggcctgagggatgcctgccgctccctgccgcagtccatccagctctttcgggacattgcccaagagttctctgatgacctgcaccatatcgccagcctcattgggaaagtagtggactttgagggcagccttgctgaaaatcgcttcacagtcctccccaacatagatcctgaaattgatgagaaaaagcgaagactgatgggacttcccagtttccttactgaggttgcccgcaaggagctggagaatctggactcccgtattccttcatgcagtgtcatctacatccctctgattggcttccttctttctattccccgcctgccttccatggtagaggccagtgactttgagattaatggactggacttcatgtttctctcagaggagaagctgcactatcgtagtgcccgaaccaaggagctggatgcattgctgggggacctgcactgcgagatccgggaccaggagacgctgctgatgtaccagctacagtgccaggtgctggcacgagcagctgtcttaacccgagtattggaccttgcctcccgcctggacgtcctgctggctcttgccagtgctgcccgggactatggctactcaaggccgcgttactccccacaagtccttggggtacgaatccagaatggcagacatcctctgatggaactctgtgcccgaacctttgtgcccaactccacagaatgtggtggggacaaagggagggtcaaagtcatcactggacccaactcatcagggaagagcatatacctcaaacaggtaggcttgatcacattcatggccctggtaggcagctttgtgccagcagaggaggccgaaattggggcagtagacgccatcttcacacgaattcatagctgcgaatccatctcccttggcctctccaccttcatgatcgacctcaaccaggtggcgaaagcagtgaacaatgccactgcacagtcgctggtccttattgatgaatttggaaagggaaccaacacggtggatgggctcgcgcttctggccgctgtgctccgacactggctggcacgtggacccacatgcccccacatctttgtggccaccaactttctgagccttgttcagctacaactgctgccacaagggcccctggtgcagtatttggattggccaagggtttcaggacaggaaggaggtgattga

SEQ ID NO: 248368 - DNA, 1879 bp, Artificial Sequence
  derived and/or modified sequence
gactcatctggtgaacatagatcaagacacttacaggaatcctcaacagatgccactgtaagtggggagagaagctgctcaggctatggttcacacgtccgactcatgacctgggggagctcagttctcgtctggacgtcattcagttttttctgctgccccagaatctggacatggctcagatgctgcatcggctcctgggtcacatcaagaacgtgcctctgattctgaaacgcatgaagttgtcccacaccaaggtcagcgactggcaggttctctacaagactgtgtacagtgccctgggcctgagggatgcctgccgctccctgccgcagtccatccagctctttcgggacattgcccaagagttctctgatgacctgcaccatatcgccagcctcattgggaaagtagtggactttgagggcagccttgctgaaaatcgcttcacagtcctccccaacatagatcctgaaattgatgagaaaaagcgaagactgatgggacttcccagtttccttactgaggttgcccgcaaggagctggagaatctggactcccgtattccttcatgcagtgtcatctacatccctctgattggcttccttctttctattccccgcctgccttccatggtagaggccagtgactttgagattaatggactggacttcatgtttctctcagaggagaagctgcactatcgtagtgcccgaaccaaggagctggatgcattgctgggggacctgcactgcgagatccgggaccaggagacgctgctgatgtaccagctacagtgccaggtgctggcacgagcagctgtcttaacccgagtattggaccttgcctcccgcctggacgtcctgctggctcttgccagtgctgcccgggactatggctactcaaggccgcgttactccccacaagtccttggggtacgaatccagaatggcagacatcctctgatggaactctgtgcccgaacttttgtgcccaactccacagaatgtggtggggacaaagggagggtcaaagtcatcactggacccaactcatcagggaagagcatatacctcaaacaggtaggcttgatcacattcatggccctggtaggcagctttgtgccagcagaggaggccgaaattggggcagtagacgccatcttcacacgaattcatagctgcgaatccatctcccttggcctctccaccttcatgatcgacctcaaccaggtggcgaaagcagtgaacaatgccactgcacagtcgctggtccttattgatgaatttggaaagggaaccaacacggtggatgggctcgcgcttctggccgctgtgctccgacactggctggcacgtggacccacatgcccccacatctttgtggccaccaactttctgagccttgttcagctacagctgctgccacaagggcccctggtgcagtatttgaccatggagacctgtgaggatggcaacgatcttgtcttcttctatcaggtttgcgaaggtgttgcgaaggccagccatgcctcccacacagctgcccaggctgggcttcctgacaagcttgtggctcgtggcaaggaggtctcagacttgatccgcagtggaaaacccatcaagcctgtcaaggatttgctaaagaagaaccaaatggaaaattgccagacattagtggataagtttatgaaactggatttggaagatcctaacctggacttgaacgttttcatgagccaggaagtgctgcctgctgccaccagcatcctctgagagtccttccagtgtcctccccagcctcctgagactccggtgggctgccatgccctctttgtttccttatctccctcagacgcagagtttttagtttctctaga

SEQ ID NO: 248369 - DNA, 3987 bp, Artificial Sequence
  derived and/or modified sequence
ggcggtcggtcagcggggcgttctcccacctgtagcgactcagagcctccaagctcatggcctccttaggagcgaacccaaggaggacaccgcagggaccgagacctggggcggcctcctccggcttccccagcccggccccagtgccgggccccagggaggccgaggaggaggaagtcgaggaggaggaggagctggccgagatccatctgtgtgtgctgtggaattcaggatacttgggcattgcctactatgatactagtgactccactatccacttcatgccagatgccccagaccacgagagcctcaagcttctccagagagttctggatgagatcaatccccagtctgttgttacgagtgccaaacaggatgagaatatgactcgatttctgggaaagcttgcctcccaggagcacagagagcctaaaagacctgaaatcatatttttgccaagtgtggattttggtctggagataagcaaacaacgcctcctttctggaaactactccttcatcccagacgccatgactgccactgagaaaatcctcttcctctcttccattattccctttgactgcctcctcacacccccaggagatttaagatttaccccgattccactgctgatcccctcccaggttcgagcacttggagggctgctgaagttcctgggtcgaagaagaatcggggttgaactggaagactataatgtcagcgtccccatcctgggctttaagaaatttatgttgactcatctggtgaacatagatcaagacacttacagtgttctacagatttttaagagtgagtctcacccctcagtgtacaaagtggccagtggactgaaggaggggctcagcctctttggaatcctcaacagatgccactgtaagtggggagagaagctgctcaggctatggttcacacgtccgactcatgacctgggggagctcagttctcgtctggacgtcattcagttttttctgctgccccagaatctggacatggctcagatgctgcatcggctcctgggtcacatcaagaacgtgcctctgattctgaaacgcatgaagttgtcccacaccaaggtcagcgactggcaggttctctacaagactgtgtacagtgccctgggcctgagggatgcctgccgctccctgccgcagtccatccagctctttcgggacattgcccaagagttctctgatgacctgcaccatatcgccagcctcattgggaaagtagtggactttgagggcagccttgctgaaaatcgcttcacagtcctccccaacatagatcctgaaattgatgagaaaaagcgaagactgatgggacttcccagtttccttactgaggttgcccgcaaggagctggagaatctggactcccgtattccttcatgcagtgtcatctacatccctctgattggcttccttctttctattccccgcctgccttccatggtagaggccagtgactttgagattaatggactggacttcatgtttctctcagaggagaagctgcactatcgtagtgcccgaaccaaggagctggatgcattgctgggggacctgcactgcgagatccgggaccaggagacgctgctgatgtaccagctacagtgccaggtgctggcacgagcagctgtcttaacccgagtattggaccttgcctcccgcctggacgtcctgctggctcttgccagtgctgcccgggactatggctactcaaggccgcgttactccccacaagtccttggggtacgaatccagaatggcagacatcctctgatggaactctgtgcccgaacttttgtgcccaactccacagaatgtggtggggacaaagggagggtcaaagtcatcactggacccaactcatcagggaagagcatatacctcaaacaggtaggcttgatcacattcatggccctggtaggcagctttgtgccagcagaggaggccgaaattggggcagtagacgccatcttcacacgaattcatagctgcgaatccatctcccttggcctctccaccttcatgatcgacctcaaccaggtggcgaaagcagtgaacaatgccactgcacagtcgctggtccttattgatgaatttggaaagggaaccaacacggtggatgggctcgcgcttctggccgctgtgctccgacactggctggcacgtggacccacatgcccccacatctttgtggccaccaactttctgagccttgttcagctacagctgctgccacaagggcccctggtgcagtatttgaccatggagacctgtgaggatggcaacgatcttgtcttcttctatcaggtttgcgaaggtgttgcgaaggccagccatgcctcccacacagctgcccaggctgggcttcctgacaagcttgtggctcgtggcaaggaggtctcagacttgatccgcagtggaaaacccatcaagcctgtcaaggatttgctaaagaagaaccaaatggaaaattgccagacattagtggataagtttatgaaactggatttggaagatcctaacctggacttgaacgttttcatgagccaggaagtgctgcctgctgccaccagcatcctctgagagtccttccagtgtcctccccagcctcctgagactccggtgggctgccatgccctctttgtttccttatctccctcagacgcagagtttttagtttctctagaaattttgtttcatattaggaataaagtttattttgaagaaagatattgtttctttagtctcaaaacaagagactaggaaagatccaaaacacagagcaggagtccacaggggaacctgccctgcctcagtaaaaatacagtgttgttgctgtaggaagactcccggattctaccccaggatacttcatgagaacgaaccccttcagagaggccctacaaaacagattagagggaagacagaggggtccaagggagatggtctctcttctcaagtaggaacaccccagcctcagacagacacagcaggaaggggcctgagaggctgacagaggcaggatgggtgcaaggcaggggtggaggggagggaccagcccgggctgcaccagtgggagtggctccacccttcccacctcagagccatggggagccagggctctggcggggtgcccttggtgcaggctccctacacagtcctgctgctgccgctggggacaagccgccaagacccaggggcccagagcttcttcctttggctacgcaggatgcaggctctggagagagaacaggatgccctgtggcagggtctggagctgctacagcatggccaggcctggtttgaagaccatctgagggaggcacagcgacagcagctgcatctaggggcccttggtgagaattttctaacagatttacactcagagcctggtcgccccccgttagcccagattcaaaaggtgaacatctgtttgcagaatctgattcatgagaagttctccccaagtccactgaacaaggctagttcctgcaccacccaggattcaaaggaaagacgaagggagcagaacttgtggcagcaacaggagttgtcaaggcagcagaaaggagtcacccagccaaaggaggagatggctcagcggggctgcaccaaggggccaagaggccctacccgtgtctaaaccctcctctcactcccctaagcctggtgaaagagtcagaagccccaggctcctttttctgtttcttaactcaacagctaaaaaatggctccaggtagtgagtcaatgaagttcagacatgttggtgtaaagtttctcctctgctcctgaaaacttcatcttcttggtgtctcatgtcctcattctcccctatatgacatgcaaaaacgatctttctttgaaatccctctgggaagaagacatgtttattgaaactgtccttcagccttaaatacaaaaataaaactgaaactgctccagaaagcagctttctcc

SEQ ID NO: 248370 - DNA, 2556 bp, Artificial Sequence
  derived and/or modified sequence
atggccagcctgggcgccaaccccaggaggaccccccagggccccaggcctggagctgccagcagcggcttccccagccctgcccctgtgcccggcccccgggaggccgaggaggaggaggtggaggaggaggaggagctggccgagatccacctgtgtgtgctgtggaacagcggctacctgggcatcgcctactatgacaccagtgacagcaccatccacttcatgccagatgccccagaccacgagagcctgaagctgctgcagagggtgctggatgagatcaacccccagagcgtggtgaccagcgccaagcaggatgagaacatgacccgcttcctgggcaagctggccagccaggagcaccgggagcccaagaggcctgagatcatcttcctgcccagcgtggactttggcctggagatcagcaagcagaggctgctgagcggcaactacagcttcatcccagatgccatgacagccacagagaagatcctcttcctgagcagcatcatcccctttgactgcctgctgaccccacctggggacctgcgcttcacccccatccccctgctgatccccagccaggtgcgggccctgggcggcctgctgaagttcctgggcagaagacgcatcggcgtggagctggaggactacaacgtgtctgtgcccatcctgggcttcaagaagttcatgctgacccacctggtgaacatcgaccaggacacctacagcgtgctgcagatcttcaagtctgagagccaccccagcgtgtacaaggtggccagcggcctgaaggagggcctgagcctgtttggcatcctgaaccgctgccactgcaagtggggcgagaagctgctgcggctgtggttcacccggcccacccatgacctgggggagctgagcagccggctggatgtgatccagttcttcctgctgccccagaacctggacatggcccagatgctgcaccggctgctgggccacatcaagaatgtgcccctcatcctgaagaggatgaagctgagccacaccaaggtgtctgactggcaggtgctgtacaagacagtgtacagcgccctgggcctgagagatgcctgccgcagcctgccccagagcatccagctgttccgggacatcgcccaggagttcagtgatgacctgcaccacatcgccagcctgattggcaaggtggtggactttgagggcagcctggctgaaaatcgcttcaccgtgctgcccaacatcgaccctgagattgatgagaagaagaggcggctgatgggcctgcccagcttcctgacagaggtggccaggaaggagctggagaacctggacagccgcatccccagctgcagcgtcatctacatccccctcatcggcttcctgctgagcatcccccggctgcccagcatggtggaggccagtgactttgagatcaatggcctggacttcatgttcctgtctgaggagaagctgcactacagaagtgcccggaccaaggagctggatgccctgctgggggacctgcactgtgagatccgggaccaggagaccctgctgatgtaccagctgcagtgccaggtgctggcccgggctgctgtgctgaccagggtgctggacctggccagccggctggatgtgctgctggccctggccagcgctgcccgggactatggctacagccggccccgctacagcccccaggtgctgggcgtgcgcatccagaatggccgccaccccctgatggagctgtgtgcccggacctttgtgcccaacagcacagaatgtggcggggacaagggccgggtgaaggtgatcaccggccccaacagcagcggcaagagcatctacctgaagcaggtgggcctcatcaccttcatggccctggtgggcagctttgtgcctgctgaggaggccgagatcggggctgtggatgccatcttcacccgcatccacagctgtgagagcatcagcctgggcctgagcaccttcatgattgacctgaaccaggtggccaaggctgtgaacaatgccacagcccagagcctggtgctgattgatgaatttgggaagggcaccaacacagtggatggcctggccctgctggccgctgtgctgcggcactggctggcccggggccccacctgcccccacatctttgtggccaccaacttcctgagcctggtgcagctgcagctgctgccccagggccccctggtgcagtacctgaccatggagacctgtgaagatggaaatgacctggtgttcttctaccaggtgtgtgagggcgtggccaaggccagccacgccagccacacagctgcccaggccggcctgcctgacaagctggtggcccggggcaaggaggtgtctgacctgatccgcagcggcaagcccatcaagcctgtgaaggacctgctgaagaagaaccagatggagaactgccagaccctggtggacaagttcatgaagctggacctggaggaccccaacctggacctgaatgtgttcatgagccaggaggtgctgcctgctgccaccagcatcctgtag

SEQ ID NO: 248371 - DNA, 2505 bp, Artificial Sequence
  derived and/or modified sequence
atggccagcctgggcgccaaccccaggaggaccccccagggccccaggcctggagctgccagcagcggcttccccagccctgcccctgtgcccggcccccgggaggccgaggaggaggaggtggaggaggaggaggagctggccgagatccacctgtgtgtgctgtggaacagcggctacctgggcatcgcctactatgacaccagtgacagcaccatccacttcatgccagatgccccagaccacgagagcctgaagctgctgcagagggtgctggatgagatcaacccccagagcgtggtgaccagcgccaagcaggatgagaacatgacccgcttcctgggcaagctggccagccaggagcaccgggagcccaagaggcctgagatcatcttcctgcccagcgtggactttggcctggagatcagcaagcagaggctgctgagcggcaactacagcttcatcccagatgccatgacagccacagagaagatcctcttcctgagcagcatcatcccctttgactgcctgctgactgtgcgggccctgggcggcctgctgaagttcctgggcagaagaagaattggagtggagctggaggactacaacgtgtctgtgcccatcctgggcttcaagaagttcatgctgacccacctggtgaacatcgaccaggacacctacagcgtgctgcagatcttcaagtctgagagccaccccagcgtgtacaaggtggccagcggcctgaaggagggcctgagcctgtttggcatcctgaaccgctgccactgcaagtggggcgagaagctgctgcggctgtggttcacccggcccacccatgacctgggggagctgagcagccggctggatgtgatccagttcttcctgctgccccagaacctggacatggcccagatgctgcaccggctgctgggccacatcaagaatgtgcccctcatcctgaagaggatgaagctgagccacaccaaggtgtctgactggcaggtgctgtacaagacagtgtacagcgccctgggcctgagagatgcctgccgcagcctgccccagagcatccagctgttccgggacatcgcccaggagttcagtgatgacctgcaccacatcgccagcctcatcggcaaggtggtggactttgagggcagcctggccgagaaccgcttcaccgtgctgcccaacattgatcctgagattgatgagaagaagaggcggctgatgggcctgcccagcttcctgacagaggtggccaggaaggagctggagaacctggacagccgcatccccagctgcagcgtcatctacatccccctgattggcttcctgctgagcatcccccggctgcccagcatggtggaggccagtgactttgagatcaatggcctggacttcatgttcctgtctgaggagaagctgcactaccgcagcgcccggaccaaggagctggatgccctgctgggggacctgcactgtgagatccgggaccaggagaccctgctgatgtaccagctgcagtgccaggtgctggcccgggctgctgtgctgaccagggtgctggacctggccagccggctggatgtgctgctggccctggccagcgctgcccgggactatggctacagccggccccgctacagcccccaggtgctgggcgtgcgcatccagaatggccgccaccccctgatggagctgtgtgcccggacctttgtgcccaacagcacagaatgtggcggggacaagggccgggtgaaggtgatcaccggccccaacagcagcggcaagagcatctacctgaagcaggtgggcctcatcaccttcatggccctggtgggcagctttgtgcctgctgaggaggccgagattggagctgtggatgccatcttcacccgcatccacagctgtgagagcatcagcctgggcctgagcaccttcatgattgacctgaaccaggtggccaaggctgtgaacaatgccacagcccagagcctggtgctgattgatgaatttgggaagggcaccaacacagtggatggcctggccctgctggccgctgtgctgcggcactggctggcccggggccccacctgcccccacatctttgtggccaccaacttcctgagcctggtgcagctgcagctgctgccccagggccccctggtgcagtacctgaccatggagacctgtgaagatggaaatgacctggtgttcttctaccaggtgtgtgaaggagtggccaaggccagccacgccagccacacagctgcccaggccggcctgcctgacaagctggtggcccggggcaaggaggtgtctgacctgatccgcagcggcaagcccatcaagcctgtgaaggacctgctgaagaagaaccagatggagaactgccagaccctggtggacaagttcatgaagctggacctggaggaccccaacctggacctgaatgtgttcatgagccaggaggtgctgcctgctgccaccagcatcctgtag

SEQ ID NO: 248372 - DNA, 816 bp, Artificial Sequence
  derived and/or modified sequence
atgttcctgtctgaggagaagctgcactaccgcagcgcccggaccaaggagctggatgccctgctgggggacctgcactgtgagatccgggaccaggagaccctgctgatgtaccagctgcagtgccaggtgctggcccgggctgctgtgctgaccagggtgctggacctggccagccggctggatgtgctgctggccctggccagcgctgcccgggactatggctacagccggccccgctacagcccccaggtgctgggcgtgcgcatccagaatggccgccaccccctgatggagctgtgtgcccggacctttgtgcccaacagcacagaatgtggcggggacaagggccgggtgaaggtgatcaccggccccaacagcagcggcaagagcatctacctgaagcaggtgggcctcatcaccttcatggccctggtgggcagctttgtgcctgctgaggaggccgagattggagctgtggatgccatcttcacccgcatccacagctgtgagagcatcagcctgggcctgagcaccttcatgattgacctgaaccaggtggccaaggctgtgaacaatgccacagcccagagcctggtgctgattgatgaatttgggaagggcaccaacacagtggatggcctggccctgctggccgctgtgctgcggcactggctggcccggggccccacctgcccccacatctttgtggccaccaacttcctgagcctggtgcagctgcagctgctgccccagggccccctggtgcagtacctggactggccccgggtgtctggccaggagggcggggactag

SEQ ID NO: 248373 - DNA, 1002 bp, Artificial Sequence
  derived and/or modified sequence
aagatcctcttcctgagcagcatcatcccctttgactgcctgctgactgtgcgggccctgggcggcctgctgaagttcctgggcagaagacgcatcggcgtggagctggaggactacaacgtgtctgtgcccatcctgggcttcaagaagttcatgctgacccacctggtgaacatcgaccaggacacctacagcgtgctgcagatcttcaagtctgagagccaccccagcgtgtacaaggtggccagcggcctgaaggagggcctgagcctgtttggcatcctgaaccgctgccactgcaagtggggcgagaagctgctgcggctgtggttcacccggcccacccatgacctgggggagctgagcagccggctggatgtgatccagttcttcctgctgccccagaacctggacatggcccagatgctgcaccggctgctgggccacatcaagaatgtgcccctcatcctgaagaggatgaagctgagccacaccaaggtgtctgactggcaggtgctgtacaagacagtgtacagcgccctgggcctgagagatgcctgccgcagcctgccccagagcatccagctgttccgggacatcgcccaggagttcagtgatgacctgcaccacatcgccagcctgattggcaaggtgtacctgagcccccaggtggactttgagggcagcctggccgagaaccgcttcaccgtgctgcccaacattgatcctgagattgatgagaagaagaggcggctgatgggcctgcccagcttcctgacagaggtggccaggaaggagctggagaacctggacagccgcatccccagctgcagcgtcatctacatccccctgattggcttcctgctgagcatcccccggctgcccagcatggtggaggccagtgactttgagatcaatggcctggacttcatgttcctgtctgaggagaagctgcactaccgcagcgcccggaccaaggagctggatgccctgctgggctag

SEQ ID NO: 248374 - DNA, 1527 bp, Artificial Sequence
  derived and/or modified sequence
atgtggcctgtgctgctgtttgtgttcctgagccagacagtgtacagcgccctgggcctgagagatgcctgccgcagcctgccccagagcatccagctgttccgggacatcgcccaggagttcagtgatgacctgcaccacatcgccagcctcatcggcaaggtggtggactttgagggcagcctggccgagaaccgcttcaccgtgctgcccaacattgatcctgagattgatgagaagaagaggcggctgatgggcctgcccagcttcctgacagaggtggccaggaaggagctggagaacctggacagccgcatccccagctgcagcgtcatctacatccccctgattggcttcctgctgagcatcccccggctgcccagcatggtggaggccagtgactttgagatcaatggcctggacttcatgttcctgtctgaggagaagctgcactaccgcagcgcccggaccaaggagctggatgccctgctgggggacctgcactgtgagatccgggaccaggagaccctgctgatgtaccagctgcagtgccaggtgctggcccgggctgctgtgctgaccagggtgctggacctggccagccggctggatgtgctgctggccctggccagcgctgcccgggactatggctacagccggccccgctacagcccccaggtgctgggcgtgcgcatccagaatggccgccaccccctgatggagctgtgtgcccggacctttgtgcccaacagcacagaatgtggcggggacaagggccgggtgaaggtgatcaccggccccaacagcagcggcaagagcatctacctgaagcaggtgggcctcatcaccttcatggccctggtgggcagctttgtgcctgctgaggaggccgagattggagctgtggatgccatcttcacccgcatccacagctgtgagagcatcagcctgggcctgagcaccttcatgattgacctgaaccaggtggccaaggctgtgaacaatgccacagcccagagcctggtgctgattgatgaatttgggaagggcaccaacacagtggatggcctggccctgctggccgctgtgctgcggcactggctggcccggggccccacctgcccccacatctttgtggccaccaacttcctgagcctggtgcagctgcagctgctgccccagggccccctggtgcagtacctgaccatggagacctgtgaagatggaaatgacctggtgttcttctaccaggtgtgtgaaggagtggccaaggccagccacgccagccacacagctgcccaggccggcctgcctgacaagctggtggcccggggcaaggaggtgtctgacctgatccgcagcggcaagcccatcaagcctgtgaaggacctgctgaagaagaaccagatggagaactgccagaccctggtggacaagttcatgaagctggacctggaggaccccaacctggacctgaatgtgttcatgagccaggaggtgctgcctgctgccaccagcatcctgtag

SEQ ID NO: 248375 - DNA, 1602 bp, Artificial Sequence
  derived and/or modified sequence
atggcccagatgctgcaccggctgctgggccacatcaagaatgtgcccctcatcctgaagaggatgaagctgagccacaccaaggtgtctgactggcaggtgctgtacaagacagtgtacagcgccctgggcctgagagatgcctgccgcagcctgccccagagcatccagctgttccgggacatcgcccaggagttcagtgatgacctgcaccacatcgccagcctgattggcaaggtggtggactttgagggcagcctggctgaaaatcgcttcaccgtgctgcccaacatcgaccctgagattgatgagaagaagaggcggctgatgggcctgcccagcttcctgacagaggtggccaggaaggagctggagaacctggacagccgcatccccagctgcagcgtcatctacatccccctcatcggcttcctgctgagcatcccccggctgcccagcatggtggaggccagtgactttgagatcaatggcctggacttcatgttcctgtctgaggagaagctgcactacagaagtgcccggaccaaggagctggatgccctgctgggggacctgcactgtgagatccgggaccaggagaccctgctgatgtaccagctgcagtgccaggtgctggcccgggctgctgtgctgaccagggtgctggacctggccagccggctggatgtgctgctggccctggccagcgctgcccgggactatggctacagccggccccgctacagcccccaggtgctgggcgtgcgcatccagaatggccgccaccccctgatggagctgtgtgcccggacctttgtgcccaacagcacagaatgtggcggggacaagggccgggtgaaggtgatcaccggccccaacagcagcggcaagagcatctacctgaagcaggtgggcctcatcaccttcatggccctggtgggcagctttgtgcctgctgaggaggccgagatcggggctgtggatgccatcttcacccgcatccacagctgtgagagcatcagcctgggcctgagcaccttcatgattgacctgaaccaggtggccaaggctgtgaacaatgccacagcccagagcctggtgctgattgatgaatttgggaagggcaccaacacagtggatggcctggccctgctggccgctgtgctgcggcactggctggcccggggccccacctgcccccacatctttgtggccaccaacttcctgagcctggtgcagctgcagctgctgccccagggccccctggtgcagtacctgaccatggagacctgtgaagatggaaatgacctggtgttcttctaccaggtgtgtgagggcgtggccaaggccagccacgccagccacacagctgcccaggccggcctgcctgacaagctggtggcccggggcaaggaggtgtctgacctgatccgcagcggcaagcccatcaagcctgtgaaggacctgctgaagaagaaccagatggagaactgccagaccctggtggacaagttcatgaagctggacctggaggaccccaacctggacctgaatgtgttcatgagccaggaggtgctgcctgctgccaccagcatcctgtag

SEQ ID NO: 248376 - DNA, 471 bp, Artificial Sequence
  derived and/or modified sequence
acagcccagagcctggtgctgattgatgaatttgggaagggcaccaacacagtggatggcctggccctgctggccgctgtgctgcggcactggctggcccggggccccacctgcccccacatctttgtggccaccaacttcctgagcctggtgcagctgcagctgctgccccagggccccctggtgcagtacctggtgtgtgaaggagtggccaaggccagccacgccagccacacagctgcccaggccggcctgcctgacaagctggtggcccggggcaaggaggtgtctgacctgatccgcagcggcaagcccatcaagcctgtgaaggacctgctgaagaagaaccagatggagaactgccagaccctggtggacaagttcatgaagctggacctggaggaccccaacctggacctgaatgtgttcatgagccaggaggtgctgcctgctgccaccagcatcctgtag

SEQ ID NO: 248377 - DNA, 2556 bp, Artificial Sequence
  derived and/or modified sequence
atggccagcctgggcgccaacccccggcggaccccccagggccccagaccaggtgccgcatcctcagggttcccctcacccgctcccgtccctggccctagggaggccgaggaagaggaggttgaggaggaggaagagctggcagaaatccacctgtgtgtgctctggaacagcgggtaccttggtatcgcatactatgacactagcgactccacgattcacttcatgcctgacgcacccgaccatgagtccctgaaactactgcagagagtccttgacgagattaacccacaaagcgtggtgacaagcgccaagcaggacgaaaacatgacaaggtttctgggaaaactggcaagccaggaacaccgggagcctaaaaggcctgaaattatcttcctgccatctgtggactttggactagagatttcaaaacaaaggctcctatccggcaattattctttcatcccggatgcgatgacagcaactgagaaaattctttttctgagctccattattccctttgactgtctgttgacgccgcccggcgacctgcggtttacgccgattccactgttgattccctctcaggtacgcgccctgggaggactgctgaaatttcttggcaggaggaggatcggagttgaattggaggactataacgtttccgtgcccatacttgggtttaagaagtttatgttaactcacttagtaaatattgaccaggatacctattcagttctgcaaattttcaaatcagagtcccatccctccgtctataaagtagcaagcggcctgaaagagggtctctcactgttcgggatcttaaacagatgtcactgcaagtggggcgaaaagctgctccgcctgtggtttacaaggcctacacatgatttaggtgagttatccagcagactggatgtcatccagtttttcctgctgcctcagaatctcgacatggctcagatgcttcatcgcctgctcgggcacataaaaaatgtcccactcatccttaagcggatgaaactgagtcacacaaaggtgtccgactggcaggttctgtataaaactgtgtacagtgccttgggcttgcgggatgcatgccgcagcctcccgcagagtatccagctgtttcgagacatagctcaggagttctctgatgacctccatcacatagccagcctaatcgggaaggttgtagatttcgaaggcagtttggctgaaaatcgattcaccgtattgccgaacattgatcccgagatcgacgagaagaaacgccgacttatgggcctccccagtttcctaactgaggtcgcacgcaaagagctagaaaacttagactcccgcatcccgtcttgtagcgtgatttacattccccttataggtttcctgctcagtatacctagactgccaagcatggttgaggcttctgattttgagattaatggtctcgattttatgtttctctcagaggagaaactgcactaccgctcagctcggaccaaagagcttgatgctcttctcggggatctgcattgtgaaattcgtgaccaagaaaccctcttaatgtatcaattgcagtgtcaggtgctggcgcgggctgctgttctgacccgagtgctggatctcgccagtagactggacgtgctgttggcattagcctctgctgctcgcgattacgggtacagccgaccgaggtactcacctcaggttctcggcgtccggatccagaacggcaggcacccactcatggagttatgcgctaggaccttcgttccaaacagcactgaatgtggcggcgacaaaggtcgggtcaaagtgattactgggccgaatagttcagggaagtccatctacctgaaacaagtcggactgattaccttcatggccctggtaggcagcttcgttccggcagaagaggcagaaattggagccgttgatgccatttttactagaatccacagttgcgagagtatcagtctgggtttaagtaccttcatgattgatctaaatcaagtggctaaagctgtcaataatgcaactgcccagtccctggttttgattgatgaatttggtaaggggacgaacactgtagacggcctcgccctgctggctgctgtgctgaggcactggttggctcggggacctacctgtccccacatttttgtggcaactaattttctgagtctggtgcagctccaactactgccacagggacccctcgtccagtatctaaccatggagacatgtgaggacggtaatgatctggtgttcttctaccaggtgtgcgagggtgtggcgaaagcatcccatgccagccacaccgccgcgcaagccgggttaccagataagcttgtggcccggggcaaagaggtttctgacttaattcggtcaggaaagcccatcaagcccgtgaaggatctgctgaaaaagaaccagatggagaactgtcagacactggtggacaagttcatgaagctcgacctcgaagatccgaatcttgacctgaatgtctttatgtcccaggaggttctccctgcagccactagcattctgtag

SEQ ID NO: 248378 - DNA, 2505 bp, Artificial Sequence
  derived and/or modified sequence
atggccagcctgggcgccaacccccggcggaccccccagggccccaggcctggtgccgcttcctcgggttttcccagccccgcccctgtccctggccctagggaagccgaagaagaggaggtagaggaggaagaggagctggccgagattcacctttgtgtactgtggaactccgggtatctaggcattgcttattatgacaccagcgacagcacaattcactttatgccagatgcccccgaccatgagtcgctcaagttgctgcagcgcgtcctcgatgagattaaccctcagtcggttgtaacctcagccaagcaggacgagaacatgactcgatttctggggaagttggcaagtcaggaacatcgcgagccaaaaagaccagagattatcttcctaccgtccgttgatttcgggttagaaatctccaaacagagactactgtcaggaaattattcctttattcctgacgcaatgacggcaaccgaaaagatcctctttctgtcctccattatccctttcgactgccttctgacggtccgagcgcttggaggtttgctcaaattcctcggcagacgaaggatcggtgtggagctagaagattacaatgtgtctgtgcctatactcggatttaaaaaattcatgctgacgcacttggtgaatatcgaccaggacacatattcagtactccagatctttaagagtgaaagccatcctagcgtgtataaagtggccagcggtctgaaagaggggttgtcattgttcgggatcttgaataggtgccactgcaaatggggcgaaaagttactgcgcctctggtttactcggcctactcacgatctcggcgaactttcttccaggctcgatgtcatccaattctttttactgccacagaatttggacatggcccagatgctacatagactcctcggacacatcaaaaacgtcccgctgatcctgaagcgcatgaagctgtcacacacaaaagtttcagattggcaggtgctttacaaaaccgtgtattctgccctgggactgcgggatgcctgtcgtagtctccctcagtcaatccagctgttccgagatattgcccaggagttctcggacgacctacatcatattgcgtccctgatcggcaaggtggtggactttgagggctcgctggctgaaaaccgctttactgtgttgcctaacatagacccagagatagacgaaaagaaaagaagacttatgggcttaccaagttttctgacggaagtggctagaaaggagctggagaacttagattccagaattcccagctgctcggtgatttatatcccactgatcggcttcctcctgagtattccccggctgcctagcatggtggaggcctcagattttgaaattaatggtcttgatttcatgtttctgtctgaagaaaagctacattaccgcagcgcgcggacaaaggagctcgacgctctgctgggcgacctccactgcgagattcgagaccaggagacactgctcatgtaccaacttcaatgtcaggttctggctcgcgctgccgtcctcacacgagtcctggacctggcaagtcgcttggatgtacttttggcgctcgcatccgcggcgagggactacgggtatagtcggcctaggtactcacctcaagttctgggggttcggatacagaacggtaggcaccctcttatggaactctgcgctaggacgtttgtccctaatagtactgaatgtggcggggataaggggcgtgtgaaggtgattaccgggcccaactcttcaggtaagagcatctacctcaagcaggttggcttgatcacgtttatggccttagtggggagtttcgttcctgcagaagaagccgagattggcgccgtggatgcaatttttacacgcattcattcgtgtgagtctatctctctcgggctctcaacatttatgattgatcttaatcaggtcgccaaagccgttaacaacgccacagctcagtccctggttctgatcgacgaattcggaaaggggacaaatacagttgacgggttagccctcctcgccgcagtcctacgccactggctcgcaagaggcccaacctgcccccatatatttgtggccactaatttcctatctctggtacagctgcaactgcttccacaggggcctctagtgcagtacctgacaatggagacatgcgaagatggcaacgaccttgtgttcttttatcaggtttgtgaaggagttgcaaaagcaagccacgcgtcgcacacagccgcccaggccggtctgcctgacaagttagtggctagaggcaaggaagttagtgatctgatccgaagtggtaaacctatcaaacccgtgaaggatttgctgaagaagaatcaaatggagaactgtcaaacactggttgacaagttcatgaagttagacttggaggatcctaatctggacctcaatgtgttcatgagtcaggaagtgctgcctgctgctacctcaattctgtag

SEQ ID NO: 248379 - DNA, 2505 bp, Artificial Sequence
  derived and/or modified sequence
atggccagcctgggcgccaacccccggcggaccccccagggccccagaccgggagccgcatcatctggcttcccctctcccgcaccagtgcccggaccaagggaagccgaagaagaagaagtagaggaggaagaagaactagctgaaatccacctgtgcgtcctgtggaactcaggatacctgggcattgcttactatgatacctccgactctaccatacacttcatgccagacgcacctgatcatgagtcgctcaagctgctgcagcgcgtgctggacgaaatcaatccacagagcgtggtcacgtccgccaagcaggacgaaaatatgaccagattccttggcaaattggcttcacaggagcatagagagcccaaaagacctgaaattatttttttacccagcgtcgacttcggactggagatttctaagcagcgactactgtcaggcaattactccttcatccccgacgccatgacagccactgagaagattctttttctgagttctatcattcccttcgattgtctgctcactgtccgagccctaggagggcttctcaaattcctgggtcgtagaagaatcggagtggagctggaagactataacgtgtctgttcccatcctcgggttcaagaaatttatgctgactcaccttgtcaatattgaccaggatacgtactctgtgctgcagatcttcaagtctgagagccatcccagcgtgtataaagtggcgtccgggctgaaggaagggctttcattgttcggtattctaaatagatgccactgtaagtggggagagaaactacttaggctgtggttcacgcgccccactcacgatctaggcgagctaagttccagactggacgtgatacagttttttctcctcccccaaaacctggacatggcccagatgctgcacagactgctggggcatattaaaaacgttccactaatcctcaaacgaatgaaactgtcccatactaaggtgagtgactggcaagtcctttacaagacagtttactccgcactgggcctgcgtgacgcatgccgctcactgccccagagcatacagctattccgggacattgctcaggagttctccgatgacttgcatcatatcgcttccctgatagggaaagtagttgactttgaagggtcactggctgagaatagatttaccgtgttacctaacatagatccagagatcgacgaaaagaagcgacgattaatggggttgccttcattccttacggaagtggcaaggaaagagctggagaacttggattcccgtatcccaagttgctctgtgatttatatccctctcatcgggttccttctgtctatcccccggctccccagtatggtagaagcaagcgacttcgagattaatggcctggatttcatgtttctgagtgaggaaaaactccactatagatcagcaagaaccaaagagttggatgctctgctgggcgacctgcattgcgaaattagggaccaggagactctcttaatgtaccagttgcaatgccaggtcctggcacgcgcagccgtgcttacacgagtgctcgacctggcctcccgtcttgatgtgctccttgccctggccagtgcagcccgggactatggttactccaggcctcgctactcaccccaggtcttgggggttagaatccagaacggacggcatccgctcatggagctgtgtgcccggaccttcgttcccaactcaaccgagtgtggaggcgacaaagggcgcgtcaaggttattaccggacctaactccagcggaaagagcatttatctgaagcaggtgggcctgattaccttcatggcactggttggatccttcgtgcccgcagaggaagccgagataggtgcagtggatgccatcttcacaaggattcacagctgtgagagcattagccttggattgtcaacttttatgatcgacctcaatcaggtcgccaaagccgtgaacaacgccacggcacagtcactggtcctaattgacgagtttggcaaaggcacaaacacagtggacgggctcgcactgctggccgctgtgctaagacactggctggcaagggggccaacgtgcccgcacatttttgtagcaacaaacttcctatcccttgttcagctccagctgcttccacagggccctctggttcagtatctgaccatggagacctgtgaagatggcaatgacctggtatttttttaccaggtctgtgagggagttgctaaggctagtcacgctagtcatacagccgcgcaggccgggctcccagacaaactggtggctaggggcaaggaagtcagcgatttaattaggtccggcaagccgattaagccagtgaaggacctgttaaagaagaatcaaatggaaaactgccagaccctagtcgataagttcatgaagttggacctggaggatccaaacctggacctgaatgtctttatgtcccaagaagttctgcccgcagcgactagtatactgtag

SEQ ID NO: 248380 - DNA, 816 bp, Artificial Sequence
  derived and/or modified sequence
atgttcctgagcgaggagaagctgcactaccggagcgcccggaccaaagaactcgatgcactgctcggtgatctccattgcgagattcgagaccaagaaaccctcttgatgtaccaactccagtgccaggtcctggccagggcggccgtgctcacacgggtactcgatctggcgtcacggctggacgtgcttctcgcacttgcctctgcagctagagactatggatatagtcggccaaggtattctccacaagttcttggcgtgagaattcagaatgggaggcatcctctgatggaactttgcgctaggacctttgtccctaattctacagaatgtgggggagacaaaggccgggtaaaggtgataacgggacctaatagttctggcaagagcatttacctaaagcaggtcggtctgatcacattcatggccctagtgggatcattcgtccctgcagaagaagctgagattggggcggttgatgccatattcacccgcattcacagctgcgagtctatttctctaggtctatctacattcatgatcgacctgaaccaggtggctaaggcagtgaacaatgccacagctcagagcctcgttttgatcgacgaattcggcaaagggaccaatacagtggatggcttggcactgctcgcggctgtcctcagacactggcttgcaaggggccctacgtgcccacatatcttcgtcgctaccaactttctgagcctggtacagctacaattactcccacaggggccactcgttcagtacctggactggcctcgggttagcggccaggagggcggtgattag

SEQ ID NO: 248381 - DNA, 1002 bp, Artificial Sequence
  derived and/or modified sequence
aagatcctgttcctgagcagcatcatccccttcgactgcctgctgacagtgagggctttgggtgggctcctgaaattcctgggaagacgaaggataggagtcgaactagaggattataacgtgagtgtgccaatcctcggatttaaaaaatttatgcttacccacctggtcaacatagaccaggacacctattctgttctgcaaatttttaaatccgagagccaccccagtgtgtacaaagtggcatccggacttaaggaaggcctcagcctttttgggattttaaaccgatgtcactgtaagtggggtgaaaagctcctcagactctggttcacacggcccacccacgatctgggggagctgtcaagccggcttgacgtcattcaattcttccttctgccccagaacctggacatggcgcaaatgcttcacaggttattgggccacatcaaaaacgtcccgctcattctgaagcgcatgaagctgtcccacacaaaagtttctgattggcaagtgctgtataagaccgtatacagtgctctcgggctgcgcgatgcatgcaggtcccttccacagagtatacaacttttccgggatatagcacaggaattttcagatgacctacatcacatcgcatctctcatcggaaaagtttatctgtctccgcaggtggatttcgaaggctctctggcggaaaatcgattcaccgtcttacccaatatcgatcctgaaatagacgagaaaaagaggcgcctgatgggattgccgagtttcctcaccgaagtggctcggaaagaattggaaaaccttgactctaggatcccaagttgcagcgtcatctatattcctcttataggctttctgttgtctattcctcggctgccttcaatggtcgaagcctctgacttcgagattaatggcctggatttcatgttcctctccgaagagaagttgcactacaggtcagctcgaactaaggagctcgatgcactcctcggttag

SEQ ID NO: 248382 - DNA, 1527 bp, Artificial Sequence
  derived and/or modified sequence
atgtggcccgtgctgctgttcgtgttcctgagccagaccgtgtactccgccctgggccttcgcgatgcgtgccgatccctgccacagtccattcagctgtttagggatatagcccaagagttttcagacgatctgcatcatatcgccagcctgatcggcaaggtcgttgatttcgagggaagcttagcagaaaacagatttaccgtgctgccgaacatagatcccgaaatcgatgaaaaaaaacgacggttgatgggattacccagcttcctgacggaagtggctagaaaagagcttgagaatttagactcacggataccgtcctgttccgtaatctatattcctctgattggctttcttctctccatcccccgcctgcctagtatggtggaagctagcgatttcgaaattaatggcctcgattttatgtttttgagcgaggaaaaattacactaccgcagcgctagaactaaggagttggacgcccttctaggcgaccttcactgtgaaatacgggatcaggaaacacttttgatgtatcaattgcagtgtcaggtgctcgctagggccgccgtgctgacaagagtgttggacctggcctcccgcctcgatgtcctgcttgccctcgcatcagccgctcgcgactatggctatagtaggcctcgctactcccctcaggtgctgggcgttaggatccaaaatggacgccacccactgatggagttatgcgccaggactttcgtcccaaattccactgagtgtggaggcgataagggacgggtcaaggttatcactggccctaactcatccggcaaatccatctatctgaagcaggtgggcctgattacttttatggccctggtaggctctttcgtgccagcagaggaagctgagatcggggctgtagacgctatctttactcgcattcacagctgtgaaagcatctctttgggcctgagcacatttatgatcgacctaaatcaggtggctaaggcagttaacaatgcgacagctcagagcttagtgttgatcgatgaattcggtaaaggtaccaacacggtggacgggcttgctttactggctgccgtgctcaggcattggctagcccgcggacctacctgcccccacatttttgtggccactaactttctgtctctcgtgcagctccaactgctccctcagggtccgctggtgcagtacctgaccatggagacttgcgaggatggcaatgatctggttttcttctaccaggtgtgcgaaggcgtcgccaaagcaagccacgcatcacacacagccgcacaggcaggactcccagacaagctcgttgcaaggggcaaagaggtctcagatctgattaggtctggcaagccaataaaacccgtgaaggatcttctgaaaaagaaccagatggagaactgtcaaacacttgtagacaagtttatgaagctcgacctggaggatcctaacctggacttgaatgttttcatgtctcaggaagtgctgccggccgcaacctctattctgtag

SEQ ID NO: 248383 - DNA, 2505 bp, Artificial Sequence
  derived and/or modified sequence
atggccagcctgggcgccaacccccggcggaccccccagggccccaggccaggggctgcttcctcagggttccccagcccagcaccagtgcctgggccaagggaagctgaggaagaagaggtcgaggaagaggaggaactggctgaaatacatctgtgcgtgctctggaatagcggttacctgggcatcgcatactatgatacctccgatagtactattcatttcatgcccgacgcccccgaccacgagtcacttaagcttctccagagggtgctcgatgagattaatccccagagcgtcgtgacctcagccaaacaagatgaaaacatgaccaggttcttaggtaagctggcctcccaggaacatcgggagccaaagagaccagagatcatctttctcccctctgtggactttgggctcgaaatctccaagcagcggctgctgtcaggcaattatagcttcatcccagatgcgatgaccgcaactgagaaaattctgttcctgtcctctataataccctttgactgcctcctcacagtgcgcgcccttggagggcttctcaagttcctgggaagacgcagaatcggagtggagctggaggactacaacgtgagtgtccctattcttggttttaagaagtttatgttaacccatctcgttaacatcgatcaggatacttactccgttctgcaaatctttaagtcagagagtcatccgtctgtttacaaagtggcctccggcctcaaagagggactgtcattgtttggaattctaaatcgttgccactgcaagtggggcgagaaactcctgcgcctgtggttcacaaggcccacacatgacctcggggagttgtcgtctagactggacgtgattcagttctttctcttacctcaaaatctcgacatggcacaaatgctgcatcggctccttgggcacattaagaacgtaccactgatcctcaagcgaatgaaactgagccacacaaaggttagcgactggcaggtattgtataaaaccgtctattctgccctgggtctgcgcgacgcatgcaggagcctgcctcagagcattcagctgtttcgggacatcgcgcaggagtttagcgatgacttacaccacatcgcgtctctcattggtaaggtagtagactttgagggctcgctggcagaaaaccgttttactgtcttgccaaatatagaccctgaaattgatgaaaagaagaggcggctcatggggcttccaagctttctgacagaggtcgccagaaaggagttggaaaacctggacagtcgaatcccctcctgctctgtgatctatatccccctgattggtttcctccttagcatacccaggctcccatctatggtcgaagcttctgatttcgagatcaacggactagattttatgtttttatccgaagaaaagctgcactatcgcagcgccagaactaaggagctcgacgccctgctgggagatctacactgtgaaattagggatcaggagacccttctaatgtaccagttgcagtgtcaggtcctggcccgcgcggcagtactaacccgagttctcgacctggctagtagactcgatgtcctgctggctcttgcctctgccgctcgagactatggttactctcgcccccgctactctccacaggtcctgggagttagaatacaaaacgggagacacccattgatggagctttgtgctaggacctttgtgccgaattcaactgagtgtggcggcgataagggacgcgtgaaggtaatcaccggacctaatagcagcggtaagagtatttaccttaagcaggttggcctcatcacattcatggccttagtgggctctttcgtgcccgccgaggaggctgagatcggcgccgtggatgccattttcacacgaatacatagttgtgaatcaatcagtctagggctatctacgtttatgatagatctcaaccaggtagcaaaggcggtcaacaacgccactgcccagagtctggtattgatagacgagttcgggaaaggtaccaacactgtagatggcctggcgctgcttgctgccgtgctccgacactggttggccagagggcctacctgcccccacattttcgttgccacgaactttttatcattagtgcaactgcagctgctgccacaggggccgcttgtacagtaccttaccatggagacctgcgaggatgggaatgatctggtttttttctatcaagtgtgtgagggcgtcgccaaggcttcacacgcctctcataccgctgctcaggccgggctgccagacaaactggtggcacgcggcaaagaagtgtctgatctgattagatcaggaaaacccatcaagccagttaaggacctgctgaagaaaaaccaaatggagaactgccagactttagtagataaatttatgaaactggatctggaagatcccaatctggatctgaatgtgtttatgtcgcaagaggttcttcctgccgcaacgagcatattatag

SEQ ID NO: 248384 - DNA, 585 bp, Artificial Sequence
  derived and/or modified sequence
atggccagcctgggcgccaacccccggcggaccccccagggcccccggcccggggccgcgtccagtgggtttccgtctcctgcccccgttccaggacctcgggaagcagaggaggaagaagtggaggaggaagaggagttggcggaaatccatctctgcgtcctgtggaacagtggttacctgggaattgcctactatgacaccagcgattctaccattcactttatgccagatgcgcctgaccatgaatccctcaaattgttgcagagggtgttggatgagataaacccccagagtgtggtgactagcgcaaagcaggatgagaacatgacgcggtttctggggaagctggcttcccaggagcacagagaacctaagagacccgagatcatctttcttccttccgtggacttcgggctggagattagcaaacagcggctcctgtccggcaattattccttcatccctgacgccatgacagccactgaaaagatcctcttcctatcctcaatcattcccttcgactgtctgttgaccgtcagggcactgggtggcctgttaaaattcctgggaaggaggagatag

SEQ ID NO: 248385 - DNA, 585 bp, Artificial Sequence
  derived and/or modified sequence
atggccagcctgggcgccaacccccggcggaccccccagggcccccgccccggagccgcttcttcaggcttccctagccccgcccccgtgcctggacctcgcgaagcggaagaggaggaagttgaagaggaggaagagcttgcagaaatccacctatgcgtcctgtggaactcagggtatctgggaattgcctattacgacacctctgactccactatacattttatgccagatgcccccgaccatgaatccttgaaactccttcagcgcgtgctcgatgaaattaacccgcagtctgtcgtcacttccgcgaagcaggatgagaatatgaccaggttccttggaaaattagcctcccaagagcatagagaaccaaaacggcctgagatcatctttttacctagtgtagattttggccttgagatatcaaaacagaggctattgtcagggaattactctttcataccagacgcgatgaccgctactgagaagatcctgttcctaagttccattatcccatttgactgtcttctgaccgtccgagccctgggagggctgctgaagtttttggggcgtcgccgatag

SEQ ID NO: 248386 - DNA, 2505 bp, Artificial Sequence
  derived and/or modified sequence
atggccagcctgggcgccaacccccggcggaccccccagggccccagacccggtgcagcatcttctgggtttccgagcccagccccagtgcctggaccacgggaagctgaagaggaggaagtcgaggaggaagaagaactagcggaaattcacctatgtgtcctttggaattccggctaccttgggatagcttattacgacacctccgattccacgattcacttcatgcctgatgcacccgatcacgagagtttaaagctgctccagagagttctggatgagatcaacccccagagcgtcgttaccagcgcaaagcaagacgaaaacatgactaggttccttgggaaactggcaagccaggaacatagggagccaaagaggccagaaataatattccttccaagtgtggatttcggcctcgagatttctaaacagcggctattgagtggtaactatagtttcattcccgatgctatgaccgccaccgaaaaaatcctgttcctgagcagcataattccattcgattgcttgcttacagtgcgggcactgggtggccttctaaagtttctgggaaggcggcgcataggcgttgaattagaagattacaacgttagcgtgcctatcctgggttttaaaaaatttatgctgacacacctggtcaatattgatcaggatacttactcagtgctccagatcttcaagtcagaatctcatccgtcagtatacaaagtagcttctggactgaaagaagggctgtccctcttcggaatcctgaatcggtgccattgcaagtggggggaaaagttgttacggctgtggtttacccggcctactcacgatctgggggaactcagttcccggctggacgtcatccaatttttcctgctgcctcagaacctggacatggctcaaatgctgcacagactgttgggccacataaaaaatgtacccctaatcctcaaacggatgaagctctcccacactaaggtttctgattggcaggtgttatacaaaaccgtgtactcggcattgggtctgagagatgcttgtcggtcgctcccacagtccattcagctgttccgagacatcgctcaagagtttagcgatgacttgcaccatatcgcttcattaatcggcaaagtggtggattttgaagggtccctggcagagaaccgatttactgttctgcctaacatagatccagaaattgatgagaagaagcggagactcatgggacttccttcgtttctgacggaagtagcccgcaaggaactcgagaacctggactcacgcatcccttcatgtagtgtgatctacattcctctgattggtttcttgctctccatcccgcgactcccctcgatggtagaggccagtgacttcgaaattaatgggttggacttcatgttcctgtctgaggaaaagttacactacagatcagcaaggaccaaggagctggatgcactcttgggggacctccattgtgaaatccgcgatcaggagactctcttgatgtatcaattacaatgccaggttcttgccagggccgcggttttaactcgcgtgctagacttggcgtctcgtttagatgtcctgttggcacttgcctctgccgccagggactacggctactctcggccacggtatagtccacaggtgttgggggtgcgcatccagaacggccgacacccactcatggaactgtgtgccaggaccttcgtacccaacagcacagagtgtgggggagacaagggcagagtcaaggttattaccggccctaacagctccggcaaaagcatttatttgaaacaggtaggcctcattacttttatggccctagttggaagctttgtcccagctgaggaagcagaaatcggcgcagtcgatgctattttcacccggattcattcttgtgagtcaatcagtctgggccttagcacgttcatgatcgatctcaaccaggtggctaaagctgtgaataacgccactgcccagtcactggtgctgattgatgagtttggaaagggaaccaacacggttgacggtttggcccttctggccgcggtgctaaggcactggctggcccgtggcccaacttgtccccatattttcgtcgctaccaattttctatctctcgtacagctacagctgctgccacaaggtcctctcgttcagtatctgaccatggagacttgcgaggacggcaacgacctcgtgtttttttaccaagtctgtgagggcgttgccaaggcttcccatgcctctcatacagcagctcaggccggtctgccggataaattggtagctcgtggaaaggaggtgtccgacctgattcgatccggtaagcctatcaagccggttaaggacctcctcaagaagaatcagatggaaaattgccaaacgctcgttgacaaatttatgaagctcgatttggaggatcccaatctggatctgaatgtctttatgtcccaggaagtactgcccgccgccacttccattctctag

SEQ ID NO: 248387 - DNA, 585 bp, Artificial Sequence
  derived and/or modified sequence
atggccagcctgggcgccaacccccggcggaccccccagggccccaggccaggtgccgcctcatcagggtttccgtcacccgcgcccgttcccgggcctagagaagccgaggaagaggaggtggaagaagaagaggaattggccgaaatccacctctgtgtgctgtggaatagtggttacctcggcattgcctattatgacacatcagactctactatccactttatgccggatgctccagatcatgaatcactcaagctcctgcagcgggtcctggatgaaatcaatccccagtctgtggtgacttctgcgaagcaggatgagaacatgactcggtttctgggtaagctcgcctcccaggaacacagagaacccaagcgtcctgagatcatcttcctgcctagcgtcgactttggcctggagatctctaagcagcggcttctgtccggcaactattcgtttattcctgatgcaatgaccgcaaccgaaaaaattttgttcctgtccagcattatccccttcgactgcttgctgaccgtgcgcgctctgggcgggcttctgaaatttctgggtagaagaaggtag

SEQ ID NO: 248388 - DNA, 1602 bp, Artificial Sequence
  derived and/or modified sequence
atggcccagatgctgcaccggctgctgggccacatcaagaacgtgccactgatcctaaagcggatgaagctatcacatacaaaggtgtctgattggcaagtgctttacaaaactgtttatagcgcactcggcctcagggacgcatgccgcagtttacctcagagtatacagctcttcagagatatcgcccaggaattctcagacgatttgcatcacattgctagcctcatcggtaaagtcgtagattttgagggaagtctggctgagaaccggtttacggtgctacccaatattgatccggagatcgacgaaaagaaacggagactcatgggcctgccttcattccttacggaggttgcccgcaaagagctggagaaccttgatagtcggatcccgagctgttccgtgatttacatcccactgattggattcttgctctcgatcccaagacttccgagcatggtcgaagcatcagattttgagattaacggactggacttcatgttcctgtcagaggagaagctgcattaccggagtgcgcgcaccaaagagctggatgcacttctgggggatctccattgtgagattcgggaccaagagacactgttaatgtatcagctacaatgccaggtcctagcacgggccgcagtcttgactagggtcctcgatcttgctagccgcctcgatgtactccttgccctagcttctgccgcccgcgactacgggtattcccggcctcgctacagccctcaggtgctgggcgtccgtatccagaatggtcggcaccctttaatggagctttgtgcaaggacgttcgtgcctaacagtacggagtgcggaggcgataaaggacgagtgaaggtgattaccggaccgaattcctcggggaagagtatctatctgaaacaggttgggctgatcacgtttatggcattagtgggatctttcgtcccggcagaggaggcggaaataggagccgtggacgcgatcttcacacggattcactcttgcgagagcatctcactcggcctcagcaccttcatgatcgatctcaaccaggtggcaaaggccgtcaacaacgcgactgcccagagcctcgtgttgatcgatgagtttggcaagggtaccaatactgtagatggactcgctttgctcgccgcagtactaaggcactggcttgcccggggacctacctgtccccacattttcgttgcgacaaattttctgagcctggtgcagctgcagctgcttcctcaggggccactggtccaatatctcaccatggagacatgtgaggacggtaatgatctggtcttcttttatcaagtgtgtgagggagtcgccaaagcatctcacgcaagccatacagccgcccaagccgggttgcccgataaactggtcgctcgcggaaaggaagtgtctgatctgattcggtctgggaaaccaattaagcccgtgaaggatttactcaagaaaaatcagatggaaaactgtcagactttggtggacaagttcatgaagctcgatctagaggaccccaatttggacctgaatgtcttcatgtcacaagaagtgcttccagccgcgaccagcatcctttag

SEQ ID NO: 248389 - DNA, 1002 bp, Artificial Sequence
  derived and/or modified sequence
aagatcctgttcctgagcagcatcatccccttcgactgcctgctgaccgttcgtgccctgggcggtttgctcaaatttctcggaagacggaggatcggggtcgagctggaagactataatgtgtcggtccctatcctgggtttcaagaaatttatgctcactcatctggtaaatatcgaccaggacacgtactccgtgctccagatcttcaaatctgaatcacacccttctgtctacaaagtagcttctggcttgaaagagggtttgtctctgttcggcattttgaacagatgtcactgtaaatggggcgagaaactcctcagactgtggttcacccgcccaacccatgatttgggggagctctcgtcccgactcgatgtgatccaattcttcctgctgcctcagaacctcgacatggcccagatgttgcacagactgttgggccatatcaagaatgtgccactgatactgaagaggatgaagttgtctcacactaaagtcagtgactggcaagtactgtataagactgtgtactccgcactaggcctgagagacgcttgtagaagcctcccgcagtcaatccaactgttcagggacattgcccaggagttctccgatgacctgcaccatatcgcctctctcataggtaaagtttacctgtcgccgcaagtcgactttgaaggcagcctggccgagaaccgcttcaccgtgctccctaacatcgatccagagatcgacgagaagaagcgccgcctgatgggcttgccgtcctttttaacggaagtggctcgcaaagaactagaaaacctcgatagccgcatcccttcttgctccgtgatctatatcccattgatcggttttctcctatctataccccgtctgccctcgatggtggaagcatccgactttgagatcaacggcttggatttcatgttcttgtccgaagaaaagttgcattacaggtccgctaggactaaagagcttgatgcactccttggatag

SEQ ID NO: 248390 - DNA, 1527 bp, Artificial Sequence
  derived and/or modified sequence
atgtggcccgtgctgctgttcgtgttcctgagccagaccgtgtactctgccctgggcttacgtgatgcctgtaggtctcttccccagtcaatccagctctttagggatatcgcccaagagttcagcgatgacctgcatcacatcgcaagtctgatcggaaaggtggtcgactttgaaggaagcttggccgagaatcgcttcactgtcctgcctaatatagaccctgaaatcgatgagaaaaagcgcagactgatggggttgccaagcttcctaaccgaagtggcccgaaaagaactggagaatctggacagtagaatccccagttgttccgtcatatatattccactgatagggttcctgttgtcaatcccccgtctcccatcaatggtggaggctagtgatttcgaaatcaacggactggactttatgtttcttagtgaagaaaagctgcactaccgctccgccagaaccaaggagctcgatgcattgctgggtgacctgcattgtgagatcagggaccaagaaacactcttgatgtaccagctgcaatgccaggtcctagctagagccgcagtactcaccagggttttagatctcgcatcccgactcgacgtgctactggctctcgcttctgccgctagagactatgggtacagcaggccaagatacagccctcaggtactcggcgtacggattcagaatggtcgccatccattaatggagctttgcgcaaggacctttgttcctaacagcactgaatgcggtggcgacaaaggaagggttaaagtcatcacaggaccaaacagctctggtaaaagtatttatctcaagcaggtgggtttaatcacctttatggcgcttgtcggtagcttcgtgcctgcagaggaagctgagattggcgcagtcgatgcaatcttcactcgcattcactcctgcgagtcaatctcccttggcctctctacgttcatgatcgatctgaatcaggtagcgaaagccgtcaataatgcgaccgcacagagcctagtgctcattgacgaattcggcaaaggtacgaacacggtagatggactggcgctgctggctgctgtgttacggcattggttggcacggggccccacgtgtccacatattttcgtggccaccaactttctgagcttggtccagctccagctgcttcctcagggtcccctagtccagtaccttacgatggagacttgcgaggatggcaacgatttagtattcttttatcaggtgtgcgaaggtgttgccaaagcgagccatgcttcccacaccgcagcacaagcaggcctccctgacaagctggttgccagagggaaggaggtcagtgacctcatcaggtctggtaaacctatcaaaccagtcaaagatctgctgaaaaagaaccaaatggaaaattgtcaaaccttagtggataaattcatgaagttggatcttgaggaccccaacttagacttgaatgtgttcatgtcccaggaagtgctgcccgccgcaactagcatcctttag

SEQ ID NO: 248391 - DNA, 2505 bp, Artificial Sequence
  derived and/or modified sequence
atggccagcctgggcgccaacccccggcggaccccccagggccccagacccggcgccgccagtagtggattcccaagtcccgctcctgtccctggccctagagaagcagaggaagaggaggtggaggaagaagaagagctcgccgaaattcacctgtgtgtgctttggaacagtgggtatctgggaatcgcttactacgatacaagcgacagtactatacatttcatgcctgatgcacccgatcatgagtcacttaaacttctgcagcgggtgctcgacgaaattaacccacagtcggtagttacttctgcgaaacaggacgagaatatgaccagatttctgggcaaattggctagccaggaacatcgggagcccaagcgaccagagatcatatttttgccatcagttgacttcgggctggaaatttccaagcagcgactcttgagtgggaactattcctttatccccgatgccatgacagccacggaaaagatcctgtttctgtctagcatcataccatttgattgtctactgaccgttagggcactgggcggactgctgaagtttctaggaagacgcagaatcggagtcgagcttgaagattacaatgtctctgtgcccatactgggttttaaaaaattcatgctaacacacctggtaaatattgaccaggacacctactcagtgctgcaaatctttaagtccgaatctcaccccagtgtgtataaagttgcatcaggacttaaggagggcctatccttgttcggaatcctgaatcggtgtcactgcaagtggggagagaagttactgcggctgtggttcacgagacctacacacgatctaggggagctcagctcacggcttgacgttatccaatttttccttctacctcaaaaccttgacatggcccaaatgttacaccggctgctaggccacatcaaaaacgtgcccctgattctgaagagaatgaagctgtcccacacaaaagtatctgactggcaagtcttgtataagaccgtatactcagcccttggattgcgagacgcatgtcgctcccttccacaatcaatccagttatttagggacatcgcccaagagttttccgatgacctgcatcacatcgcttctctgatcggcaaggtggtggattttgaaggatcgctcgccgaaaatagattcacagtgctgccaaatatagatcccgaaatagacgaaaaaaagaggaggcttatgggactgccctccttcttgaccgaggtggcaagaaaagaattggaaaacctggactccagaattcccagctgtagcgtcatttacatacccttgattggattccttctgagcattccccgcttgccctcaatggttgaggcttctgactttgagattaacgggctggattttatgttccttagcgaagaaaaactgcactataggagcgccaggaccaaagaactagacgccctccttggagacctgcactgtgagattagggatcaagagactttactgatgtatcagctccaatgtcaagtgctggccagggctgcggtgctgacaagagtcctagatcttgcctccagactggatgtcctgttagccctagcatccgcagctagggactatggctatagcagaccgcggtattcaccacaggtgcttggggtacgaatacagaatggacggcatcctctaatggaactgtgtgctcggacctttgttcctaactcgaccgagtgcggaggggacaaaggccgagtcaaggtaataaccggaccaaattcaagcggtaaaagcatctatttaaagcaggtcggcttaattacctttatggccctcgtgggctcattcgtgcccgctgaggaggccgaaattggcgctgtcgatgcgatatttacccgcatccactcatgcgaaagcattagcttgggacttagcactttcatgatcgaccttaatcaggtggcaaaggctgtgaataacgccactgcacaaagtctggtcctgatagatgagttcgggaagggcaccaacactgttgatgggctggctcttctcgcagccgtgctgcggcactggctggctagggggccaacgtgtcctcatattttcgtcgcaaccaatttcctctctctagtgcagctgcaactgttgcctcaaggccctctcgtgcagtacctgaccatggaaacttgcgaggatggaaatgatctggtgtttttctaccaggtctgtgagggcgtggctaaggcatcacacgctagccacacggcagcccaagcgggactccccgacaagcttgtggcacgagggaaggaggtttctgatttgatcagatctggtaaaccgatcaagccggttaaggatctgctgaagaaaaatcagatggaaaattgtcagactctcgtagataaatttatgaagctcgacttagaggaccctaatctagatctgaatgtcttcatgtcgcaggaagtattacccgctgccaccagcatcctctag

SEQ ID NO: 248392 - DNA, 2505 bp, Artificial Sequence
  derived and/or modified sequence
atggccagcctgggcgccaacccccggcggaccccccagggcccccgccccggagccgcttcaagcggatttccttccccggctcctgtgcccggtccaagggaggccgaagaagaggaagtggaggaggaagaggaactagcagaaattcacctctgtgtgctctggaattccggctatctgggcatcgcgtattatgataccagcgattccactatccacttcatgccagatgccccagatcacgagtctcttaaactactacagagggttctcgacgaaatcaacccccaaagtgtggtgacgtctgcaaagcaggatgagaatatgacccggttcttggggaagctggccagccaggagcaccgggagccaaaacgccctgagatcatttttctcccgagtgttgatttcggcctggaaatttcaaagcaaagattactaagcggcaattatagctttatccccgatgcgatgacggccactgagaagatcctctttctatcatccatcattccatttgattgccttctgacagtcagagctttagggggcttgttaaaatttctgggccggaggagaattggtgtagagttagaagactacaacgtttccgtgcctatcctaggatttaaaaagttcatgttgacacacctggtgaacatcgaccaggatacatatagtgtcctgcagatttttaagagtgaatcccacccctccgtctacaaggtggcttccggccttaaggagggtctctcactgtttggcattttgaatcggtgccactgcaaatggggggaaaagctgctgcggctatggtttaccaggcctacgcatgatctcggcgaattaagttctagactagatgtaatccagttcttcctgcttccccagaacttagacatggcacagatgttgcacagactgctgggccacattaagaacgttccacttatccttaaacgaatgaagctatcacacacaaaggtgtctgattggcaggtgctttataaaaccgtctactcggccctggggctccgggatgcctgcaggtcactacctcagtcaattcagttatttcgggacatcgcgcaggagttttcagatgatttgcaccatatcgcgagcctaattggcaaggtggtcgattttgaggggtccctggcagagaacaggtttaccgtgctgcccaatattgaccctgagattgatgaaaaaaaaaggcggctcatgggtttgcctagtttcctcaccgaggtggctcgtaaggagctcgagaacctagactctagaatcccatcttgtagcgtgatctatatcccactgattggtttcttgctatccataccacgactgccttcaatggtagaggcctccgactttgaaatcaacggactggactttatgttcttgagcgaggaaaaattacactacagaagcgcacggactaaggagttagatgccctgctgggagatttgcactgcgaaatacgggaccaggaaactctgctgatgtaccagctccaatgtcaagtgctcgccagggcggccgtcctgacccgtgtactcgatctcgcgagtcggctggacgtacttctagcgctggcatctgctgccagagactatggatacagcaggcctcggtattccccgcaggtgttaggtgtgcgcatccaaaatgggcggcaccccctgatggagctgtgtgctcggacttttgtgccaaattctacggagtgcggtggagataaaggccgcgtgaaagttatcaccggacccaacagttctgggaagtcaatatacctgaagcaggtggggctgattacgttcatggctctggtgggtagctttgtgccggccgaggaagctgagataggcgccgtggacgctatatttaccagaatccacagctgtgagtcaataagtttgggcctgagtaccttcatgatagacctgaatcaggtggccaaggcagtgaacaatgcaaccgctcagtcgctggttttaatcgacgagtttggtaagggaaccaacactgtcgacggtctggccctcttggccgccgtcctgcgccactggctcgctagaggacctacgtgtcctcatatcttcgttgccacaaatttcctgtcactcgtgcagctgcagcttttaccccaaggacccctggttcagtacctgacgatggagacttgcgaagatggcaatgaccttgtttttttctaccaggtgtgtgagggcgtggccaaggccagtcacgcttctcacacagcagcacaggcaggtctgcctgataagttggtagctcggggaaaggaggtgagcgatttaatccgaagcggcaagccgattaagcccgtgaaagacttgctaaaaaagaaccaaatggagaactgtcagacactggtagataagtttatgaagctggatctagaggatcctaatctggacctgaacgtattcatgagccaggaggtgttacccgcagctactagtatcttatag

SEQ ID NO: 248393 - DNA, 585 bp, Artificial Sequence
  derived and/or modified sequence
atggccagcctgggcgccaacccccggcggaccccccagggcccccgccccggcgctgctagctctggcttcccctctcccgctcccgtccccggcccaagggaggcagaagaagaggaagttgaggaagaagaagaactagctgagatacatttgtgcgtcctctggaattcggggtatctcggcattgcctactatgatacatctgatagcactatacactttatgcccgacgcaccagatcacgaaagtctaaagctgctgcagcgtgtgctagacgagattaaccctcaaagcgtagtaacatcagccaagcaggacgagaacatgactcgcttcttagggaagctggcctcgcaggagcaccgggaaccgaagcggcctgaaatcatatttctgccttcagtcgatttcgggctggaaatttctaagcagcggctactgtctggaaattactcatttattcccgacgccatgaccgccactgagaagatcctgtttctgtccagcattattcccttcgactgcctgctaacagttcgcgctcttggtgggctgttgaagttcttgggtaggaggcgctag

SEQ ID NO: 248394 - DNA, 471 bp, Artificial Sequence
  derived and/or modified sequence
accgcccagagcctggtgctgatcgacgagttcggcaagggcaccaacactgtcgacggcctggccttgctggccgccgttttacggcactggctggctcggggacccacctgtccgcacatttttgtcgctaccaacttcctctctctggtccaactacaattgttaccacagggcccgctcgtgcaataccttgtctgcgagggcgtggccaaggccagtcatgcttcgcatactgccgcccaggcgggtctgccagataaactggtagccagagggaaggaggtgagtgacttaataagatctggcaaacccatcaaacccgtcaaggacctcctaaaaaagaaccaaatggaaaactgccagaccttagtggataagtttatgaagctcgacctagaagatcccaacctggacttgaacgtgtttatgtcccaggaggtgcttccagcagcaacctcgattttgtag

SEQ ID NO: 248395 - DNA, 2505 bp, Artificial Sequence
  derived and/or modified sequence
atggccagcctgggcgccaacccccggcggaccccccagggcccccgaccgggtgccgccagcagcggatttcccagtcccgcccccgtgcctggcccaagagaggctgaagaagaagaagtggaagaggaggaagagctggctgaaattcacctttgcgtcctgtggaattccggctatctcgggattgcatactacgacacctccgatagtacgatccatttcatgcctgatgcaccagatcacgagagcctcaaactgctccaacgggtccttgacgaaattaacccccagagcgtagtgacgtctgcaaagcaggacgagaacatgacaagattcttgggaaaactcgccagccaggaacaccgcgagccaaagcggcccgagattattttcctaccatcggtagatttcggactcgagatctctaaacaacggttactgtctgggaattatagctttatccctgacgcaatgacggcgaccgagaaaattttgttcctgtctagtatcataccctttgactgcttactgacggtgcgagctttgggcggcctgttgaaatttctgggtcggaggcggatcggggtggagctggaggattataacgtctccgtaccaatcctggggttcaagaagtttatgcttacacatctggtgaacattgatcaggacacctactccgtacttcaaatcttcaaatcagaaagccatccgtctgtgtataaggtagcatcagggttaaaagaaggcctgtcactgtttggcatcctgaaccgctgtcactgtaaatggggcgaaaagctgcttcggctgtggtttactcgcccgacacacgacttaggtgagctcagctctagactagatgttattcaatttttcctcttgccacagaacctggatatggctcagatgttacaccggcttctgggacacatcaagaacgtgcctctgattctgaaaagaatgaaactatcacacaccaaagtgtcagactggcaagtcttgtataaaactgtctattccgccctcggccttagagacgcttgtcgcagcctcccccagagcattcaacttttcagagatatcgctcaggaatttagcgacgatctgcaccatattgcctctttaattggcaaagtagtggactttgaaggcagcctcgctgagaatagattcacggtgctgccaaacattgatccagagatcgacgagaagaagcggcgtttgatgggcctgcccagcttcctaacagaggtagccagaaaagagctggaaaatctcgatagcagaataccctcatgttccgttatctacattccgctaatcgggttcttactgtctattccccggcttccgtccatggttgaggcctccgattttgagattaacggcctagacttcatgtttctctccgaagaaaaactccactatcgttccgctaggactaaagagctggacgcattattgggtgacttgcactgtgagatcagggaccaggagactctcctgatgtaccagctgcaatgccaggtattggccagggccgcagtcctgaccagagtcttggacttggctagcagactcgacgtactgctcgccttggcatcagcagctagggattacgggtatagccgaccacggtactctcctcaagtgctaggagtacgcatccagaatgggaggcacccgctgatggagctgtgcgcccggactttcgtccccaactcgaccgagtgcggcggtgataagggacgagtcaaggtaattacaggacccaacagctccggaaagagcatctatctcaaacaagtgggactgatcaccttcatggcactcgtcggttcattcgtgcccgcagaagaagctgagatcggagccgtggacgcaatctttacacgcattcactcctgcgagtcaataagcctggggctgtctacattcatgatcgatcttaatcaggtggccaaggcagtaaacaacgccactgcccagtccctcgtattgattgacgaatttggtaaaggcactaacaccgtcgatggactcgctcttttggccgccgtgctgagacactggctcgcgaggggccccacttgtccccacattttcgttgcaactaatttccttagtctggtgcagctgcagcttttgcctcagggccccttagtgcaatacctgactatggaaacatgcgaggacggcaacgacctagtgttcttctaccaagtttgcgagggcgttgcaaaggctagtcacgcctctcacaccgctgcccaggccggactgcctgataagttagttgcaaggggcaaggaagtatcggacctgatacgctccggaaaacccataaagcctgtaaaggacctcttaaagaagaatcaaatggagaattgccagacactggtagataagtttatgaagcttgatctagaggacccgaatcttgacctcaatgtatttatgtctcaggaggtcctccctgccgccacctccattctttag

SEQ ID NO: 248396 - DNA, 2505 bp, Artificial Sequence
  derived and/or modified sequence
atggccagcctgggcgccaacccccggcggaccccccagggcccccgacccggcgcggccagctccggatttcccagtccggctcccgtgccaggacctagggaggccgaggaggaagaggtggaggaggaagaggagctggcggagattcatctgtgcgtactgtggaattctgggtatttgggcatagcgtattatgataccagtgattccactattcatttcatgcccgatgcacccgaccacgagtctctgaaacttttgcagagagtcttggacgagattaacccacagtcagttgttactagcgctaagcaggatgagaatatgactagatttcttggtaaactagcctcacaagaacatagggagcctaaacggcccgaaatcatctttctcccatctgtggattttggactagagataagcaagcagagacttctgtccggcaactactccttcataccggacgcaatgaccgctaccgaaaagatcttatttctgtcgtccattattccctttgactgcttattgactgtccgcgctctcgggggattgctaaagttccttggacgaaggcggattggtgttgaactggaagactacaacgtttccgtgcccatcctcgggttcaaaaaattcatgctgactcatctggtgaacatcgatcaagacacctactcagtgctgcagatctttaagtcagagtcccatccttccgtctataaagtcgcctccggtctaaaagagggcctgagtcttttcgggatactgaaccggtgtcattgcaagtggggcgaaaaactgctgcgcctctggttcaccagacccacacacgatttgggcgaactgtcctcgcgcttagatgtcatccaatttttcttgctgccccagaacttggacatggctcaaatgcttcatagactgttaggccatatcaagaacgtacccctcattctgaaacgcatgaagctgagccataccaaagtcagcgactggcaggtgttgtacaagaccgtctacagtgccctgggattgcgcgacgcctgccgcagtctgccccagtccatacaactgttccgggacatagcccaagaattttccgacgacctgcaccacatcgcttcattgattggaaaggtggtggattttgaggggtctctagcggagaaccgtttcactgttctgcccaacatcgacccagagattgacgaaaaaaaacgacggttaatggggctgccttcatttttaacagaagtggcaagaaaagagctggaaaacctcgattcgcgcatcccatcatgtagcgttatctacatccctctgattggcttcctactatctatcccgcggttgcctagtatggtagaggcatcagactttgagattaacggattggacttcatgtttctcagcgaggagaaactccactaccggagcgctcgcacaaaggaactggacgcactcctgggggatcttcattgtgagatcagggaccaggaaaccctgcttatgtatcagcttcagtgccaagtgttagcccgagcagcagtccttaccagagttctggatctcgcaagccggctggacgtgctgctcgccctggcatccgcagcacgggactacggctacagcagaccccggtatagcccccaagtactgggcgtgcgaatccaaaacggccgacacccactcatggagctctgtgcacgaacattcgttcccaactccacggagtgtgggggcgataagggacgcgtgaaagtcattaccggtcccaacagcagtggaaagtctatatacctgaagcaggtcggcctgataacctttatggctttagtgggtagtttcgttccggcagaggaggccgagattggcgcagtggacgcaatcttcacacggattcattcttgtgagtccatctctctagggctctctacctttatgatcgatctaaaccaggttgccaaggctgtgaataacgccaccgcccaatctttggtgctgatcgatgaatttgggaagggaacaaatactgtcgacggccttgctctcctggcggccgtccttaggcattggctggcgcggggcccgacctgcccgcatatcttcgtggcaacaaacttcctatctctggttcagttgcagctactcccacagggtcccctagtgcagtatctgaccatggaaacatgcgaggatggcaatgacctggttttcttctatcaggtatgtgagggtgtggccaaggcgagccacgccagccacacagctgctcaggcggggcttccagacaagctggtggccagaggaaaggaagtgagcgacctgattcggtccggtaaaccaatcaagccagttaaggatctactcaagaaaaatcaaatggaaaactgtcagacacttgttgataagtttatgaagctggatctcgaagatcccaatctggacctgaacgtgtttatgagccaagaagtgttgccggccgcaacctctatactctag

SEQ ID NO: 248397 - DNA, 471 bp, Artificial Sequence
  derived and/or modified sequence
accgcccagagcctggtgctgatcgacgagttcggcaagggcaccaacaccgtggatggattagctttgctggcggccgtactccgacactggctggccaggggacctacatgcccgcacatttttgtggcaactaattttctgtcgctcgtgcaactccagctcctgccacaggggcccctggtgcaatacctagtttgcgagggcgtagccaaggcatcacacgcctcccatacggccgcccaagcaggactccctgacaagcttgtcgcacggggcaaggaggtctcggatctcatacggtccggaaagccaattaagcctgtgaaagacttgctgaagaagaatcaaatggagaactgtcagactttggttgacaagttcatgaagctggacctagaggacccgaacctggacctgaacgttttcatgagccaggaggtattacccgccgcaacctccattctgtag

SEQ ID NO: 248398 - DNA, 2556 bp, Artificial Sequence
  derived and/or modified sequence
atggccagcctgggcgccaacccccggcggaccccccagggcccccgcccgggggcagcttcatcaggcttcccctctcccgccccggtaccagggccgcgtgaggcagaagaggaggaggtggaagaggaagaagaactggcagagattcacctgtgcgtgctctggaactctgggtatctcgggattgcctactacgatacctccgattcaactatccacttcatgcccgacgctcccgatcatgagagtttaaagctgcttcagagggtgctggatgagattaatccccagtcggtggtgacgtccgccaaacaggatgagaatatgaccaggtttctggggaaattggcgagccaggagcacagggaacctaagagaccggagatcatattcctgcccagcgtggactttgggctggaaatctccaagcagaggctcttatctggcaattattcattcatacccgacgcaatgaccgcgaccgagaagatactctttctgtcatccataatccccttcgactgtttgcttacacctcccggggatcttaggtttacacccatccccctgcttatccctagccaagtgcgggcactgggaggactgttaaaatttttaggcaggagacgcataggcgtcgagctagaggattacaacgtgtccgtgccaatcttgggtttcaaaaagttcatgctgacacatttagtaaacatcgatcaagatacctattccgtgctgcagatctttaagtccgaatcacaccctagcgtctataaggtggcgagtgggctgaaagagggattatcattattcggcatccttaaccggtgccattgtaaatggggtgagaaactcctaaggttgtggttcacaagacccacacacgacctaggcgaactttcaagtaggctcgacgtaattcagttttttcttctgccacagaacctcgacatggcccagatgctgcatcgtctccttggccatatcaagaacgtaccactgatcttgaaacggatgaagttatctcacactaaagtaagcgactggcaggtgctatataaaactgtctactctgccctggggcttcgggacgcttgccgctcattacctcagtctatacagctcttcagagatattgcccaagaattcagtgatgatctgcaccacattgccagtctgataggaaaagtagtcgattttgaaggttccctggccgagaataggttcaccgtgctccctaacattgatcccgagatagacgagaaaaagaggcgcctcatgggactcccctcctttcttacagaagtcgcacgcaaggagctggagaacttggacagcagaatcccctcctgttctgtgatttacatacccctcatcgggtttctactatccatccctagactaccgagtatggtggaggccagtgacttcgagatcaatgggctagacttcatgtttctttccgaggagaagctgcactataggtcagcaagaaccaaggaacttgacgccttgctgggcgatctacactgcgagatcagagatcaggagaccctgctcatgtaccagctgcagtgtcaggtcctagccagggccgccgtactgacacgcgttctggatctggcatcccgccttgacgttctgttggccctggcttccgctgctcgggactatgggtattcccgcccccgatatagcccacaagtactcggagtgcgaatccagaacggtcgtcatcctctgatggagctttgtgctcgcacctttgtgcccaactccacagaatgtggaggcgacaagggaagagtgaaggtgatcactgggccaaactcttctggcaaatcgatctatctaaaacaagtgggactgattacattcatggcgctggtggggagcttcgtgccggccgaggaagccgagatcggagccgttgacgccatatttacccggattcactcttgtgagtctattagtttgggtttatcgacgttcatgatcgatctgaatcaggtggcgaaagctgtgaacaatgcaactgcccagagtctcgtgctcattgatgaatttggcaaaggcaccaatacagtggatggcctggccctgcttgctgcggtcctccgccactggctggcccgcggaccaacatgtccccacatcttcgtggccacgaatttcttgagtctagttcaattacagctcctcccccaaggccccctggttcagtacctgaccatggaaacatgtgaggacggcaatgacctcgtcttcttctatcaggtgtgtgagggtgtggccaaagcttcacacgcatcccacacagcggcacaagctggtttaccggacaagttggtggccagggggaaagaagtttccgacttaatccgttcaggaaaaccgatcaaaccagttaaggacttgctgaaaaaaaatcagatggagaattgtcagacccttgtagacaaattcatgaaactagaccttgaagaccccaatctcgatctcaacgtcttcatgagtcaggaggttttgcccgccgcaacctccatcctatag

SEQ ID NO: 248399 - DNA, 1602 bp, Artificial Sequence
  derived and/or modified sequence
atggcccagatgctgcaccggctgctgggccacatcaagaacgtgcctcttatcctgaaaaggatgaaacttagccatacaaaggtaagcgactggcaggtcttgtacaaaacagtctattcagcgctaggtcttcgtgatgcgtgtcggagtttacctcagtctatccagctgttccgggacatcgcccaggagttctccgatgatctccatcatatcgcctccctcataggcaaggtcgtcgactttgaaggtagccttgcagaaaaccgctttaccgtgctgccaaacattgatcccgagatcgatgagaaaaaacgccggctgatgggactcccatcgtttctgaccgaggtggcccgtaaagaactagaaaacctagactcccgcatcccatcgtgctctgtaatttatattccactgattggtttcctgctttctataccacggttaccatctatggttgaggctagcgatttcgaaattaatgggctagatttcatgtttttatcagaggagaaactacattaccgctcagccagaactaaggagctggatgcactgctgggggacctccactgcgagatcagagatcaggagacattgcttatgtatcaactgcagtgtcaagtcttggcccgcgccgcagtcctaacccgggtgcttgatttggcttcccgcctggatgtattgctggcactggcctccgctgcccgtgactacggctactcccgaccaagatacagcccacaggtgcttggagtacggatacagaacggaagacacccactgatggagctttgcgctaggacattcgttcctaattcaactgagtgcggcggagataagggcagggtcaaggtaatcactggccctaattcctcaggcaagtcaatatatctgaaacaggttggccttatcacttttatggccctggttggcagtttcgtccctgccgaggaagccgaaatcggagccgtggatgctattttcacgcggatccactcatgcgagtctatcagcctcggcctttctacattcatgatagatctcaaccaggtcgccaaggccgtgaacaacgccaccgctcagtcactcgttctgattgacgagttcggcaagggaaccaatactgtagacggcctcgcgttgttagcagcagtgctgcggcactggcttgcccggggccccacatgtccgcacatatttgtggccaccaacttcttgtcattagttcaactccagctgctgcctcagggcccccttgttcagtatctcaccatggaaacgtgtgaagacggcaatgatttagtatttttctatcaagtctgcgaaggagtggcaaaagcctctcatgccagccacaccgccgcccaagcaggtctgcccgataaactcgtcgctcgaggtaaggaggttagtgacctcatcagaagtggcaaacctattaagcctgttaaagatctgctgaaaaaaaaccagatggagaactgtcagacgctggtggataagtttatgaaattagacttggaagaccctaacttagacctcaatgtgttcatgtcacaagaagtactgcccgcagccaccagcattctgtag

SEQ ID NO: 248400 - DNA, 765 bp, Artificial Sequence
  derived and/or modified sequence
atggccagcctgggcgccaacccccggcggaccccccagggccccaggcccggtgccgcctccagcgggttcccatcacccgcgcccgttcccgggccccgcgaggcagaagaggaagaagttgaagaggaggaggaattagccgagatacatttgtgtgttttgtggaattccggctatctcggcattgcctattacgacacatccgatagcacaatccattttatgcctgatgcgcccgaccatgagagcttaaagcttcttcagagggtgcttgacgagatcaatccacagagcgtagttacgagcgccaagcaggatgaaaacatgacaagattcctgggaaagctcgcgtctcaagagcatcgcgaacctaagcgtcccgaaatcatctttcttccctccgtagattttggcctcgaaatatcaaagcagagactcctgagcggaaactatagtttcatccccgatgcaatgaccgccaccgagaagatcctgtttttgtcttccatcatcccttttgactgtctgctgacggtgagagctctcgggggactccttaagttcttgggcaggagaagaatcggcgtcgaattggaggattataacgtgagtgtccctatcctggggttcaagaaatttatgttgactcacctcgtcaacatcgatcaggatacatacagactggagtgcaatggcgctattagcgcacaatgcaacctgtgcctcctcggctcatcagactccccggctagcgcttcttag

SEQ ID NO: 248401 - DNA, 816 bp, Artificial Sequence
  derived and/or modified sequence
atgttcctgagcgaggagaagctgcactaccggagcgcccggaccaaggagctggacgcactcttaggggacctccattgtgagatacgcgatcaggaaacacttttaatgtaccaactccaatgccaggttttggcaagagctgccgtcctcacacgcgttctcgatctggccagcagactcgatgtgttactggcgctggcatccgccgcccgtgactatgggtactcaagaccccgctactccccccaagtcctcggcgtccgcattcagaacgggaggcacccgctgatggaactgtgcgccagaacgttcgtgccgaattctaccgagtgcggaggagataaggggagggtcaaggtgattaccgggccaaacagctccggcaagtccatctatctgaaacaggtcggactgattacattcatggcgctcgtcggatcattcgtgcctgctgaggaggccgagatcggggcggtggacgctatatttacacggatacactcatgcgagtctatatccctggggttgtctacattcatgattgatctcaaccaggtcgcaaaggcggttaataatgccacagcccagtccctggtgcttatcgatgagttcggtaaaggtacgaacaccgtagatggtctggctctcctagccgccgtcctgcgccactggttagcacggggaccaacctgtccacacattttcgtcgccaccaatttcctcagtctggtgcagcttcagctccttccgcagggcccacttgtccaatacctcgactggcctcgagttagcggccaagaaggaggcgattag

SEQ ID NO: 248402 - DNA, 1602 bp, Artificial Sequence
  derived and/or modified sequence
atggcccagatgctgcaccggctgctgggccacatcaagaacgtgccattgatactcaaacgaatgaaactatctcacaccaaggtgtcagactggcaggtgctctacaagaccgtctacagcgccctcggcctgagggatgcctgccgatccctaccccaatctattcaactgtttagagacatagcccaggagtttagcgacgacctgcatcacattgcatcactaatcggcaaggtggtcgacttcgaaggctcccttgcagagaacaggtttacagtgctcccaaatattgaccctgagattgatgagaaaaagcgcaggctcatgggtctgccctcctttctgactgaggtcgcacgtaaggagttggagaacctggactcccgaattccctcttgttccgtgatttacatccccctgatcggcttcctgctaagcattccaaggctgccctctatggttgaggcttctgactttgaaatcaacggtctcgactttatgtttttatccgaagaaaaactgcattaccggagcgccaggacaaaagagttagatgccctcctcggagacctgcactgcgaaattagggatcaggagaccttgctgatgtaccagctgcagtgtcaggttctggcgcgcgccgccgttctgactcgagttttggatctggcgtccaggcttgacgtccttcttgccctcgcttctgccgcccgagactatggatacagtcggcccaggtactctccacaagtgcttggtgtgcgaattcagaatggacgacatcccctgatggaactttgcgcacgcacctttgtgccaaattcgacagagtgcggaggagacaagggccgtgtgaaagtcatcaccggccccaactcatccggcaagagcatctacctgaagcaggtaggtctgattactttcatggctttagtgggatcatttgtgcccgccgaagaggccgagataggcgccgtcgatgccatttttacccggatccactcatgcgaatctatttcactgggcctgtccaccttcatgattgacttgaaccaggtcgccaaagctgtaaacaatgctacggcccagtccttggtactgatcgatgagtttggcaagggcactaacacagtggacggcctggccctgctggctgccgtactgcgccactggctagctcgtgggcccacctgtccacacatttttgtggccaccaactttttgtctttagttcagctgcagcttctgcctcagggtccattggttcaatacctgactatggagacatgtgaggatggaaacgatctggtctttttctaccaagtgtgtgagggcgtcgccaaagcctcacacgctagccatactgccgcccaagccggactgccagataaactggtagctagggggaaagaagtgagcgatttgatcaggagcgggaagccaattaaaccagtcaaggacctgcttaaaaaaaatcagatggaaaattgccagacactggtggacaagtttatgaagctcgatctggaagatcccaatcttgacttgaatgtttttatgtcgcaggaggtgctgcccgcggccacaagcatcctgtag

SEQ ID NO: 248403 - DNA, 816 bp, Artificial Sequence
  derived and/or modified sequence
atgttcctgagcgaggagaagctgcactaccggagcgcccggaccaaagagctggatgcccttttgggggatctacactgcgagattcgcgaccaggaaacacttctgatgtatcagctgcagtgccaggttttagcaagagctgcagtgctcaccagagttctggacctcgctagtcggctggacgtcctcctggcactggcgtctgctgcaagagactacggctatagcagacccagatacagtccccaagtcctgggtgtgaggatccagaacggacgccaccccctaatggagctgtgcgcaagaacattcgttccaaactccaccgagtgtggaggtgataagggccgagtgaaggtgattaccggcccaaattcctccggaaagtctatctatctcaagcaagtcgggctcatcaccttcatggctctcgtagggtccttcgttccagcagaagaggccgagattggcgctgttgacgctatcttcacacgcatccactcttgcgagagcatctctttaggtctcagcacatttatgatagatctgaatcaggttgctaaggctgtgaataatgccactgcacagtcactggttctgatcgacgaatttgggaagggaacaaacaccgttgatggcttagctttgctcgccgccgtgctacggcattggctggcccggggcccaacctgtccccacatcttcgtcgccacaaactttttgtcacttgtgcaactgcagctgctgccacagggcccattggttcaatatctcgactggcctagagtgtccgggcaggaaggaggggattag

SEQ ID NO: 248404 - DNA, 765 bp, Artificial Sequence
  derived and/or modified sequence
atggccagcctgggcgccaacccccggcggaccccccagggcccccgtcccggagcggccagctctggctttcctagtccggcacccgttcctggacccagagaagcagaggaggaggaagtggaggaagaagaagagctggccgagatacacttgtgcgtgttgtggaattctgggtacctaggtattgcctattacgatacatctgatagcacgatacacttcatgccagacgctcccgaccatgaatctcttaaactcttgcagcgggtattggacgagatcaacccacaatctgtggtgacttctgccaagcaggacgagaacatgacgaggttcctgggcaagttagcctcacaggagcatcgcgaacccaagaggcccgagataatcttcctccccagcgtggatttcgggctcgagattagtaaacaacgactgctctccggaaactacagctttataccagacgccatgacagccaccgaaaaaattctctttctgagttccatcattccctttgattgcttactgactgtccgcgcactagggggtttgctgaagtttctcggcaggaggcggataggggtagagctcgaagactataacgtgagtgtgcccatactggggttcaaaaagttcatgctgactcatctcgtcaacattgaccaggacacttatagactggaatgcaacggcgcaatttctgcccagtgcaacctttgcctattgggcagctcagattcccccgcatcagcttcctag

SEQ ID NO: 248405 - DNA, 765 bp, Artificial Sequence
  derived and/or modified sequence
atggccagcctgggcgccaacccccggcggaccccccagggcccccggccaggggcggcttcaagcggatttccaagcccggcccccgtgccaggccctcgggaggcagaggaagaggaggtagaagaggaggaagaactcgcagaaatccatctctgcgtgctctggaatagcgggtatctggggattgcatactacgacactagcgactcaactattcacttcatgcccgacgctccagatcatgagtcactgaagctgctgcagcgggtgttggatgagataaacccacagtctgttgttaccagcgccaaacaggacgaaaatatgaccaggtttctcggcaaactagccagccaggagcaccgagaaccaaagcgccctgagattattttcctgccaagcgtcgactttggtttagagataagcaaacagagactgctatccgggaattactcattcatccccgatgcaatgacagccactgagaagatactttttctgagttctattatcccgttcgactgcctgctcacagtgagggctcttggaggcctccttaagttcttggggaggcggagaattggggtagagctggaagattataatgtaagtgtccccattctcggatttaaaaagtttatgctgactcatcttgtgaatatcgatcaggatacatacaggctggaatgcaatggcgcaatctcagctcagtgcaacctatgtctactaggcagctccgatagccctgccagcgcttcctag

SEQ ID NO: 248406 - DNA, 1602 bp, Artificial Sequence
  derived and/or modified sequence
atggcccagatgctgcaccggctgctgggccacatcaagaacgtgccactgatcttaaagcggatgaaattgtcacatacaaaggtctcagattggcaggtgctgtataaaactgtgtactcagccctcggacttcgggacgcctgtcgttctttgccacagagcattcaactcttccgtgacatagcacaggaattcagcgacgatctgcaccacatcgctagtctgatcggcaaagttgtcgatttcgaaggcagccttgccgaaaaccgcttcaccgtgctgcctaacatagaccccgagatcgatgagaagaagcggcggctgatgggtctgccatcctttctgacggaggtagccagaaaagagctggaaaatctcgattcacgcattccttcttgttccgtgatttatatcccactgattggcttcttgttaagcatccccaggctgccttccatggttgaggctagcgatttcgagatcaacggactggactttatgtttttatcggaggaaaagctccattacaggtcagcacgcactaaggaactcgatgctcttttaggagaccttcattgcgagatcagagatcaggaaaccctgcttatgtatcaactccaatgccaggtgctcgcaagagctgcggtcttgactagggtgctggatctagcctcacggctggacgtactgctcgcgcttgcatcagctgcgcgagattacggttactcccgcccgcgatattctccgcaggtactgggcgtccggatacaaaatggtagacatcccctgatggagctctgcgctcgcactttcgtgccaaatagcaccgagtgtggtggggacaaaggcagagtgaaggtgattacgggacctaacagcagcggaaaaagtatatatctgaagcaagttgggctgattacctttatggctctggtcgggagctttgtgcccgctgaggaagccgaaattggcgccgtcgatgccattttcaccaggatccattcttgcgaatccatctctctgggcctgagtacctttatgatcgacctgaaccaagtcgctaaggcagtgaataacgccactgctcagagcttagtgctgattgacgagtttggtaaaggcacaaataccgtagatggcctcgccctgctcgccgccgtgctgcggcactggttggcccgaggccccacctgtccacatatctttgtggcaacgaattttctgagcctcgtccagcttcaactgttacctcagggaccgctggtgcaatatctgactatggagacttgcgaggatggcaatgatctcgtattcttttatcaggtgtgcgagggtgtcgccaaggcgtcccacgccagccacacagccgcacaggccgggctccccgacaaactcgtggcccgaggcaaagaggtaagtgacctcatcagatccggcaagcccatcaagccggttaaagatctgttgaaaaagaatcagatggagaactgccagaccctcgtagacaaatttatgaagcttgatttggaggatcctaatctcgatttgaacgtgttcatgagccaggaggtactccccgctgcaacatcaatcctgtag

SEQ ID NO: 248407 - DNA, 2556 bp, Artificial Sequence
  derived and/or modified sequence
atggccagcctgggcgccaacccccggcggaccccccagggcccccgtcctggtgccgcctcatctggcttcccatctccggcccccgtgccaggtccgagggaggcggaagaggaagaggtcgaggaagaggaggagttagcagaaatccatctttgcgtactttggaattctggttacctcggcatcgcctattacgacaccagtgattctacaatacattttatgcccgatgcaccggatcatgagagcctgaagttgttgcaacgggtgcttgatgaaatcaacccacagtctgtcgtgacctcagccaagcaggacgagaacatgaccaggttcttgggaaagctggcttcacaggagcatcgcgaaccgaaaaggcccgagattatattcctgcccagcgtcgacttcggcctcgagatcagcaaacagcgcctcctaagtggaaactatagcttcatcccagacgccatgaccgcgactgagaagatactgttcttgagcagcataattcctttcgattgtctactgacgcctcccggcgacctgcggtttacccccatcccgctgctgatacccagccaggtccgggcattgggggggctactcaaatttttaggacgtagacgcataggagtggagttggaggattacaacgtcagcgtgccgattctggggttcaagaagttcatgttgacccatctggtcaatattgatcaggacacatattctgtgctccagattttcaagtctgagtcacacccaagcgtctacaaggttgcttctggattgaaagaagggcttagtctttttggaatcctgaatagatgccactgcaaatggggcgaaaagctgctgcgtctttggtttactcgacccacccacgacctgggggaactgtctagccggttagacgtgatccaattctttctcctgcctcaaaaccttgatatggctcagatgctgcacaggttactgggacatatcaagaacgtgccactaatcttaaagcgtatgaagctctcccatactaaggttagtgattggcaggtcctctacaaaaccgtatatagcgccctgggcttgcgggacgcgtgcaggtccctcccccaaagcattcagttgtttagggatatagctcaggagtttagcgatgacctgcaccacatagcgagtctcatcgggaaggtcgttgacttcgagggtagcctagccgaaaaccgttttaccgtgctgccaaatattgatcccgagatcgacgaaaaaaaaaggagactcatgggccttccttccttcctgactgaggtggcgaggaaggaactcgagaacctggattctcgtattccgtcatgttctgtgatatacatccccctgatcggctttcttctgtcaatccctcgtcttccttctatggtggaagcttccgacttcgagattaatggtctggactttatgttcctgtcagaggagaaacttcactacaggagtgccaggaccaaagagctggatgcactgttgggcgacctgcattgcgaaattcgcgaccaggagacccttttgatgtatcagctccaatgccaggtgcttgccagagccgctgtacttacacgggtcctagatctggcttcccgtctcgatgttttgctcgccctggccagcgccgccagagattacggatactcacgtcctcgctattctccacaggtgctcggagtgaggattcaaaatggacgacaccccctgatggaactttgcgctcggacgttcgtccccaacagtaccgagtgtgggggggacaaggggcgggtgaaagtaatcaccgggcctaattcatccgggaaaagcatttacctgaaacaggtcggtctgataacgttcatggctctagtcggatcctttgttccagctgaggaggcagagatcggcgcggtcgacgcgatatttaccagaatccactcctgtgagagtataagcctaggcctgagcacattcatgattgacctcaaccaggtagctaaagctgttaataatgccaccgcccagagcctggtccttattgatgagttcgggaaggggacaaatactgtggacggccttgctctgttggccgctgtcctaagacactggttggcacgaggccccacctgcccccacatcttcgtggctacaaacttcctgtccctcgtgcaattgcagcttctgcctcagggcccactcgtgcagtatcttactatggaaacatgtgaagacggaaacgatctggtgttcttttatcaggtgtgtgagggtgtggccaaggcgtcccatgcctcccacactgcagctcaggctgggctgcccgacaagctcgtagccagagggaaggaagtgtctgacttgataagaagcgggaagcccattaagccagtaaaagacctgcttaagaaaaaccaaatggaaaactgccagacactggtggataagttcatgaaattggacctcgaggacccaaacctggatttaaatgtgttcatgtcccaggaggtcctgcccgccgctacttccattctttag

SEQ ID NO: 248408 - DNA, 2556 bp, Artificial Sequence
  derived and/or modified sequence
atggcaagtctcggagcaaatcccagaagaaccccgcaggggccacggccaggggcagcttcctccggattccctagtcccgctccggtgcctggcccacgcgaggccgaagaagaggaggttgaagaagaagaagagctagcagaaatccacctgtgtgtgttatggaacagcggttacctgggtattgcttattatgacacctcagactccaccatccacttcatgcccgacgctcctgaccacgaaagtctgaagctgttgcagagagttctcgacgaaataaaccctcagtctgtcgtcacatcagctaaacaggacgagaacatgactcgctttttgggtaaactggcctctcaggagcatcgggagcccaagcggcctgagatcatctttcttccaagcgtggacttcggattagagattagtaaacagagacttctgtctggaaactatagcttcattcccgatgccatgacggccacagaaaagatcctctttttgtctagtatcattccttttgattgcctcctcacacccccaggcgatctgcgattcaccccaatcccactactcatccctagtcaagtcagggctctgggaggactcttgaagttcttgggacgaaggaggattggagttgagcttgaagattacaacgtctcagtccccatactaggattcaagaaattcatgttgacgcatctggtgaacatagaccaggatacatacagcgtcctccagatcttcaaatctgagagccaccctagtgtgtacaaggtcgctagcggcctaaaggaaggcctgtcactgttcggcatcctgaaccgctgccactgcaagtggggagaaaagttgctgagattgtggtttacaaggccgacacacgatctgggcgagttgtctagccgcttagatgttatacagttctttctgctaccccagaacctcgatatggcccaaatgctgcatcgcctgttgggccacataaaaaatgttcctctcatcctgaagagaatgaaattaagccacacgaaagtttccgactggcaagtgctctacaaaacagtctattccgccctcgggcttagagatgcatgccgcagcctcccacaaagtattcagctgttccgagatattgcccaagagttttcagatgacctacaccatattgcgagcctaatcggcaaggtggtggatttcgaaggcagtttggcggagaacaggtttaccgtgcttcctaacattgacccagaaatagatgagaaaaagcggaggctgatgggattaccatcttttctaactgaagtggccagaaaagagcttgagaatctcgattccaggatacccagttgttctgttatctatattccactgattggcttcctgctgtctattcctagactacctagcatggttgaggcctctgacttcgagatcaatggcctggactttatgttccttagcgaggaaaagctccactaccgttctgccagaactaaggaactggacgctctgctgggtgacctgcattgcgagataagagaccaggaaactctcctgatgtatcagcttcagtgtcaggtgctagcgcgagccgctgtgctaacgagggtgctcgacctagccagccgcctggatgtgctccttgctctcgctagcgctgcgagggattacggctattccagaccaaggtattcaccccaggtattgggagtgcggattcagaacggacgacatcctctgatggaactctgtgccaggacttttgtgccaaattccaccgaatgcggaggggataagggacgggtgaaggtgattacaggtccaaactcgagcggcaagtcaatatacctgaagcaggtcggcttgatcaccttcatggcccttgtcggttcattcgtgcctgccgaagaagccgagattggagctgtggacgctatctttactcgcatacactcttgcgagtcaatcagcttaggtctgtctactttcatgatcgatctcaatcaagtggctaaggccgtgaacaatgccacagcacagagccttgtgctgatcgatgagtttggcaagggaacaaacaccgtggatggtctcgcactattagccgcagtactcagacattggctcgcacgcggtcctacctgcccccacatatttgtcgccaccaattttctgtccttggtccagctgcagctcctgccacaaggacctcttgtgcagtacctgaccatggagacctgtgaggacggcaatgacctggtatttttttatcaagtttgtgagggtgtcgccaaagcatcacacgccagtcacaccgctgcacaggctggtctgcctgataagctcgtggccaggggaaaggaggtgtccgacctgattagatctggcaaaccaataaagccagttaaggacctcctaaaaaaaaaccagatggaaaattgtcagacactcgttgacaagttcatgaagctcgacctcgaagaccccaacttagatctcaatgtattcatgtcacaagaagttctgcccgcagctactagcattctttag

SEQ ID NO: 248409 - DNA, 2505 bp, Artificial Sequence
  derived and/or modified sequence
atggccagtcttggtgccaatccacgacggacacctcaggggcctaggccaggagcagcctcaagtggttttccctcccccgctcccgtccccggtccaagggaggctgaggaagaggaagtagaagaagaggaagaactggccgaaatccacttatgtgtcctttggaattccgggtacttagggatagcttattatgatacaagcgatagcaccattcactttatgcccgacgccccagaccacgaaagtttaaaattgttgcagagagtgctggatgaaataaatccgcagtccgtcgtgacttccgctaagcaggatgaaaatatgacaaggttcctgggtaagctggcatcacaagaacaccgtgagcctaagcgcccagagataatcttcctgccatctgtggacttcggtttggagatatcaaaacagaggcttctcagtggaaactattcattcattcctgatgccatgacggccaccgagaagatcctgttcttatccagcatcatcccttttgactgtctcctgactgttagagctctgggtgggttgctgaagtttctgggaagaagaaggatcggcgtggagctagaagactacaacgtgagcgtgccaattctgggtttcaagaaatttatgcttacacacctggtaaatattgatcaggatacctattctgttctacagatctttaaaagtgaatctcatcctagcgtgtataaagttgcatccggcttgaaggagggactgagcctcttcgggatcctgaaccgctgccactgcaagtggggggagaaattgcttaggctgtggtttactcgcccaacccacgacttgggcgagctctccagtaggctcgacgtgatccagttcttcctgcttccacagaatctcgacatggcgcagatgctgcacaggctcttagggcacatcaaaaacgtcccattaattctgaagagaatgaagctgagtcatacgaaagtttccgactggcaggtcctatataaaacggtgtattccgccttgggtttacgagatgcttgccgcagcttgccccagtcaattcagctgttcagagatatagcacaggagttttctgacgatctgcaccacatcgcctccctgattggtaaggttgttgattttgaaggctcactggctgagaaccgatttactgtgttgcccaatatcgaccccgaaattgacgaaaagaagcgccgtttgatgggactgccttcctttctaaccgaggtcgcgagaaaagaactggagaatttggacagtcgaatcccctcttgttctgtgatttatattcctctgatcgggttcctgctgtccatccccaggttaccatctatggtggaagccagcgatttcgaaataaacggcctggatttcatgtttctgtctgaggaaaaactccactacaggagtgctcgtacaaaggagttggacgccctgttgggagatctgcactgtgagatcagagaccaggagacattgctgatgtaccagctgcagtgccaagtattagcccgagcggctgtccttaccagggtgcttgatttggcaagcaggctggatgtccttttagcgctggcctcagctgccagggattatggctattcacggcctagatattcgcctcaggtactgggagtgcggatccaaaatggcaggcatccgctgatggagctctgtgccaggacctttgtgcccaatagcactgaatgcggaggcgataaaggtcgcgtcaaagtgatcaccggccctaactcgtcgggcaagtccatttatcttaagcaggttgggctcatcacttttatggcccttgtggggagcttcgttccagcggaagaagctgagatcggcgcagttgatgcgatttttacccgcatccactcttgcgaatctatttctctcggactcagcacattcatgattgatttaaatcaggtggctaaggccgtaaacaacgccacagctcagtctctggtgctcatagatgagttcggcaaaggaacgaacactgttgacgggcttgcgctcttagccgctgtcttgagacattggttagcccgaggcccaacctgcccacacattttcgtagccacaaatttcttatcactcgtgcagctccagctgcttccacagggtccactggtccagtatcttactatggaaacttgcgaagatggcaatgatctcgtgtttttctaccaggtgtgcgagggtgttgccaaggcaagccacgcctctcacaccgcagctcaggcaggattgccagataaactggtcgcaaggggcaaggaggtcagcgacctcattaggagcggtaaaccaatcaaacctgtcaaggatctactgaagaagaaccaaatggagaattgccaaaccctcgttgataagttcatgaaactcgacctggaggaccccaatctggacctaaacgtcttcatgtcccaggaagtgcttcccgcagccaccagcatactctag

SEQ ID NO: 248410 - DNA, 2505 bp, Artificial Sequence
  derived and/or modified sequence
atggcgtctctgggagccaaccccaggaggacacctcaaggcccacggccaggtgctgctagcagcgggttcccaagccccgcacctgtgccgggaccgagagaggctgaagaagaagaggtggaagaggaggaggagctcgccgaaatccacttatgcgtcctgtggaactccgggtatctcgggatcgcctactacgatactagtgattccaccattcattttatgcccgatgctcctgatcacgaatctctgaaactgctacagagggtacttgatgaaattaacccccagtccgtggtgacaagcgccaagcaggatgagaatatgacgcggtttctgggcaaactagcctctcaggagcaccgcgagcccaagcgccctgagattatcttcctccccagcgtagattttggacttgagatttccaagcagaggctcctctcaggaaactactccttcatacctgacgccatgactgctactgaaaagatccttttcctgtcctccattatcccctttgactgcctgttgacggtgcgcgcactgggagggctactcaagttcctgggcaggcggaggattggcgtcgagttggaagattacaacgtatcagtgcctattcttggcttcaagaaattcatgctgacccaccttgtgaatatcgaccaggatacctactctgtactgcagatcttcaaaagcgagtcccacccttcagtttacaaagttgcttctggtctcaaagaaggcctgagcctgtttggcatccttaatcgctgtcactgcaagtggggagagaagctgctgcggctatggttcacccgccctactcacgacctgggtgagttgtctagccgtttagatgtcatccaattctttttgcttccccagaacttagacatggcccaaatgttacaccgcctcctcggacatataaagaatgtgccactgatactgaagcggatgaagctttcgcacacaaaggtctctgattggcaggtgctgtataagaccgtgtactctgccctaggactccgggacgcttgtcgtagcttgccccagagtatacagttatttagagatattgcgcaagagttcagcgacgatctccaccatatagcctctctgatcggaaaagttgttgatttcgagggatcactcgcagaaaaccggttcaccgtcctgcccaacatcgacccggaaatagacgagaagaaaagaaggcttatgggcctccccagttttctgacggaggtggccaggaaggagcttgagaacctcgatagtcgcatacctagttgtagcgtcatctatatccccctgattggattcctgctgtctatccccaggctcccttcaatggtggaggcgagcgattttgagattaatggtctcgacttcatgtttttgtccgaggaaaaattacactaccgctccgctagaactaaggagttggacgctctgcttggcgacctgcattgcgagatcagagatcaagaaacattgctgatgtaccagctacagtgtcaggtactggctagggccgcagtgttgacaagggtgctggacctcgcatcgcgcttggatgtgctgctcgccctcgcgagcgcggctcgagattatgggtattcacggccacgttactcgccacaggtcctgggcgtgcggatccagaacggccgacaccccctgatggagttgtgcgcgaggacattcgtgccaaactcaacagagtgtggaggagacaaaggcagggtgaaagtcatcacaggacctaatagtagtgggaaaagtatctatctaaaacaagtgggtctcattacattcatggccctggtgggaagtttcgtccctgcggaagaggctgagatcggagcagtggacgctatttttacccggatccattcctgcgaatcaatcagccttggcctctcaacttttatgattgacctgaaccaggtggctaaggcagtgaataacgccactgctcaatctttggtgcttatcgacgagtttggcaagggcactaacacagtggatgggttagccttgctagctgcagtcctgcgtcactggttggccagaggacccacgtgcccccatatctttgtagccacaaattttctgagtctggtgcaactacaacttcttccccagggcccattggtccagtacctaaccatggagacatgtgaggatggaaacgacctggtgtttttctaccaagtctgtgaaggtgtggccaaggcaagtcacgccagtcataccgctgctcaggctggtctgccagacaagctagtggcacgaggaaaagaagtgagcgatctcatacgaagcgggaaaccaataaaacctgtgaaggatttgctgaaaaagaatcagatggaaaactgtcagacgctggtggacaaatttatgaagctcgatctcgaggaccccaacctggaccttaatgtttttatgtcccaggaggttctgcccgctgccacttccatcctgtag

SEQ ID NO: 248411 - DNA, 816 bp, Artificial Sequence
  derived and/or modified sequence
atgtttctctcagaggaaaaactccactatcggagcgccagaactaaagagctagatgcccttctgggcgacctgcactgcgaaatccgcgaccaagaaaccctcctgatgtaccagctccagtgccaggttttggcacgggcagcagtgctgacacgtgtgctggacctggcaagccgactggacgtgctcctagccttggcttccgctgctcgggattacggatactctcgtccgagatattcaccacaggtcctgggcgtacgcattcagaatggtagacatcctctgatggagctctgtgcgaggacattcgtgcccaattcaacagagtgcggcggagacaagggtagggtaaaggtaattacagggccaaactcaagtgggaaatcaatttatctaaaacaggtgggcctgattaccttcatggctcttgtgggaagttttgtcccagcggaggaggcagagattggcgcagtggatgccatcttcacacgaatccacagctgcgagagtatctccctaggactaagtactttcatgattgaccttaaccaggttgctaaagcagtgaacaatgcaaccgctcagagccttgtcctcatagacgagtttgggaaggggaccaacaccgtcgacggtttggccctgctggcagccgtgctccgacattggctcgctcgaggcccaacttgtcctcacattttcgtggctaccaactttctctccctggtgcagctgcaactgctgccacaaggcccactcgtgcagtatctggattggccgagggtcagcggacaagagggcggtgactag

SEQ ID NO: 248412 - DNA, 1002 bp, Artificial Sequence
  derived and/or modified sequence
aagattcttttccttagtagtatcattccttttgattgcctgctcactgtcagggccctgggtgggctgctgaagtttctgggcagacggaggataggcgttgagctcgaggattataacgtcagtgttcccatcctgggctttaaaaagttcatgctcacccatctggtgaacatcgatcaggatacttactctgtactgcagatttttaagagcgaatcccatcctagcgtgtataaggtagccagtgggctgaaagaagggttatcgcttttcggcatccttaataggtgtcactgtaaatggggcgaaaagttactgagattatggtttaccagacccactcatgacttgggagagcttagctctcgtttagacgtgattcaattctttctcttgcctcaaaacttggacatggctcagatgctgcatcggcttctgggccacattaaaaatgtgccgttaatcctgaagaggatgaagctgagccacacaaaggtcagtgactggcaggttttatacaagaccgtatacagtgctctgggactccgcgacgcatgtcgcagtctgccgcagagcattcagctctttcgggacatagcacaagagttttccgacgacctgcaccatattgctagcctaattggcaaggtgtaccttagtcctcaggtcgattttgagggatcactcgcagagaacaggttcactgtgttaccaaacattgaccccgaaatagatgaaaaaaaaagaagactgatgggtctgcctagtttcctaacggaggtagcacggaaggaactggaaaacctcgactcacggatcccctcatgttcggttatctatattccgctcatagggtttctgttgtctattccacgacttccttcaatggttgaggcttccgacttcgaaattaatggtctcgacttcatgttcctgtctgaagaaaagcttcactaccggtcggccaggacaaaagagctggatgcactcctgggctag

SEQ ID NO: 248413 - DNA, 1527 bp, Artificial Sequence
  derived and/or modified sequence
atgtggccagttcttctcttcgtgtttttaagtcagactgtttactcagccctgggccttagagacgcctgcaggtcgctaccccagtccattcagctctttcgcgatatcgcacaagaatttagcgacgacctccaccatatcgcttccctgattggtaaggtggtggatttcgagggttctctcgcagagaaccgattcactgtgttacccaacattgatcctgaaattgatgagaagaaaaggcgactaatgggacttccgagtttcctaactgaagtcgcccgaaaagaacttgagaacctggattcacggattcccagctgttcggttatctatatccctctcataggcttcctcctctccattcctcggttaccttccatggtggaggcctccgacttcgagatcaatggcctcgacttcatgttcctttctgaggagaaacttcattatcggtccgcgcgaacaaaagagctggacgccctgctcggcgatttacactgtgaaatcagagatcaggagacgctgctgatgtaccagcttcaatgccaggtgttggccagggctgcagtcctaacacgggtgctggacctcgcgagtcgcctggacgtgctgctggcactggctagcgcggctcgcgattacggctacagccggccacgatattcaccccaggtgttgggcgtgagaatccagaacggcagacatccgcttatggaactctgtgcacgtacatttgtgccgaacagcacggagtgcggtggcgataagggaagagttaaggtgattactgggcctaattccagtggcaaatctatctacttaaagcaagtgggcctcatcacctttatggcactggtggggtcctttgttcccgcagaagaagctgaaatcggtgccgttgatgcaatttttacaaggatccactcatgcgagagcatatcactcggcctgtcaacattcatgatagatttgaaccaagtcgcgaaagccgtcaacaatgccacagcccagtcactggtgctgattgacgaatttggcaaggggacaaacaccgtggatggactggccctgctggctgcggtgttacgccactggcttgcaaggggccctacctgtccccacatcttcgttgctaccaattttctctctttggttcaactccagctgctcccacaggggccacttgtccagtatcttacaatggagacctgtgaggacggcaatgacctcgtgtttttttaccaggtctgcgaaggggtggccaaggcgtctcatgcctcgcatacggctgcacaagcaggtttacctgataaacttgtggcacgcggtaaagaggtgtccgatttgatacgctccggcaaaccgattaaacccgttaaagatctgctcaaaaaaaaccagatggaaaattgtcagaccttagtcgataagttcatgaaattggacttagaggatccaaacctcgacctgaatgtgttcatgtcccaagaggtgttgccagcggcaactagcattctgtag

SEQ ID NO: 248414 - DNA, 2505 bp, Artificial Sequence
  derived and/or modified sequence
atggcttccctaggtgccaacccccgtcgaacacctcagggccctagacctggtgcagcttcctccggttttccgtcgccagcgccagttcccggtcccagggaggccgaggaagaagaggttgaggaggaagaggaactcgcagaaatccacctctgcgtgctctggaactccggctacctcggcatagcgtactatgatacgagcgactctacaatacactttatgccagatgctcccgaccatgagtccctgaaactgctgcagcgcgtgttggacgagataaaccctcagagtgtggtgacttctgctaaacaagatgaaaatatgacgcggttcctgggcaagctggcctcccaggaacaccgagagcctaagagacctgagatcatctttctgccttccgtcgattttggcctcgagatctctaaacaaaggctgctgtcaggtaattatagtttcataccagatgcaatgacagccactgagaagatcctgtttctcagctccatcattccatttgattgtctgcttaccgtcagggccttagggggactcctgaagtttcttggcaggcggagaatcggtgttgagcttgaggactataacgtctccgtgcccattctcggattcaagaagtttatgttgactcacttagtgaatatcgaccaggacacatacagcgtgttacagattttcaagagcgaatctcatcccagcgtttataaggtggcaagtggcctgaaggagggtctgtcattgtttggcattctgaataggtgccactgtaaatggggtgagaagctcctgcggctctggtttacacggccaacccatgatttaggcgagctgtcatcccgcttggatgtaatccagtttttcctgttaccgcaaaacctggatatggcacagatgctgcaccgtcttcttggacacataaagaacgtccccctgattctgaagcgcatgaagctcagccataccaaagtcagcgattggcaggttttgtacaaaactgtgtattcggccctgggcctgagagacgcctgccgcagtctgccacaaagcattcagctgttccgcgacattgcacaagagttttcggatgacttgcatcacattgcatccctgattggcaaggtagtcgacttcgagggttcactggcagaaaataggtttaccgtactgcccaatatagacccagaaatcgacgagaagaagcggcgtttgatgggactgccttccttcctgaccgaagtcgctaggaaagagctggagaacttggattcacgcatccctagttgtagcgttatctacataccactgatcggcttcctgctttctattcctagactcccctctatggtggaagccagcgacttcgaaattaatggtctggatttcatgtttctcagcgaggagaagctgcattaccgaagcgcgaggaccaaggaactggacgcgctgctaggagatcttcattgcgagatcagagaccaggagacacttttgatgtatcagttacagtgccaggtcctcgccagagctgcagtcctgaccagggtcctagaccttgcaagtcgcctagatgtgctgttagcattggctagcgccgctagagactatggatactctcggccaaggtattctccccaggtactcggcgttcgcatccagaacgggaggcatcccctaatggaactttgcgctcgcacattcgtgcctaactccactgaatgcggcggagataaaggaagagtgaaggtgattaccggacccaactcctcagggaaatctatttacttgaaacaagtcggactgatcacattcatggccctggtcggcagcttcgtcccggctgaggaggcagagatcggtgccgtggacgccatatttacccgcatccatagctgtgaatctatcagcctgggtctcagtaccttcatgattgacctgaaccaggtagcaaaggccgtaaacaatgccaccgctcagtcgctagtgctgattgacgagttcggcaagggtaccaatacagtcgatggattggcactgctggctgctgttttacgccattggctcgccaggggaccaacctgccctcatattttcgttgctactaactttttgagccttgtacagctccaattgctgccacagggcccactcgtgcaatacttaaccatggaaacctgcgaggatgggaacgatctcgttttcttctaccaggtgtgtgagggcgttgcaaaggcgtcgcacgctagtcatacggcggctcaggccggtctgcctgataaattggtcgcaagagggaaggaggttagcgatctgatacggtcaggtaaaccaataaagccggtcaaggatctgctgaagaagaatcagatggagaattgtcaaacgctggttgacaaatttatgaagcttgacctagaggaccctaatctggatctcaacgtcttcatgagccaggaggttttgccggctgcgacttcaatcctgtag

SEQ ID NO: 248415 - DNA, 585 bp, Artificial Sequence
  derived and/or modified sequence
atggccagcttaggcgctaatcccagacggacgccgcaggggcctcggccaggcgctgcctcctctggcttcccctccccagcccctgttcccggacccagagaggcggaggaggaggaggtcgaggaagaagaagagctggcagaaattcacctatgtgtcctgtggaattcaggctacctgggtatcgcctactacgatacctccgactcgactattcactttatgccggacgcaccggatcatgagagcctgaagttgctgcagcgggtgcttgacgagattaatccacagtcagtagtgaccagcgccaagcaggacgagaatatgacacgctttctgggaaaactggcctcccaggagcaccgcgagcctaagcgacctgagattattttccttccatctgtggacttcggattggagattagtaagcaacggttgctgtccggaaactactcgttcattcctgatgccatgacggctaccgaaaaaattttattcctgtcaagtatcattccatttgattgcctgctgacagtccgggctttggggggactgctcaaattcctgggcagacggaggtag

SEQ ID NO: 248416 - DNA, 585 bp, Artificial Sequence
  derived and/or modified sequence
atggctagcctgggcgcaaatcccagacgtacaccccagggcccaaggccaggtgctgcgtccagtggatttccaagtcctgccccagtgcccggaccacgcgaagctgaagaggaagaagtagaggaggaggaagaactggccgaaatccacttgtgcgtgctgtggaacagcgggtacctggggatcgcctactacgacacgagcgacagcacaatccacttcatgccagacgcaccagaccacgagagcctgaaactgctgcagcgagtgcttgatgaaatcaacccgcagtccgtggtgacgtcggctaagcaggatgaaaatatgacacgatttctgggtaaattggcatcccaagagcaccgcgaaccaaaacgtccagaaataatctttctcccttcagttgatttcggcctggagattagcaagcaaaggcttctgagcgggaactactccttcatacccgatgcaatgaccgcaaccgagaagattctctttctgagttctattattcccttcgactgcctcctgacagtgagggccctggggggtctcctcaaatttctgggcaggcgccgttag

SEQ ID NO: 248417 - DNA, 2505 bp, Artificial Sequence
  derived and/or modified sequence
atggcatccctgggcgctaatcctcgacgaacaccccaaggccctcggcctggagccgcttcatcagggtttcctagccccgcaccagtgccagggccacgggaggcggaagaagaggaggtggaggaggaagaggaactcgcagagattcatctgtgtgtgctgtggaactctggctatctcggcattgcatactacgatacctctgatagtactatccacttcatgcccgacgcacctgaccacgagtccttgaagctacttcagagggtcctggacgagattaacccccaaagcgtggtcacatccgcaaagcaagatgagaacatgacgcgctttttgggcaaacttgcctcacaggaacacagagagccaaaacgtccggagataatctttttgccttctgttgatttcggcctggaaatctccaagcagcggctgctgtctggtaactactccttcatccccgatgcgatgactgcaacagaaaagatcttgtttctgagctccatcatccccttcgactgtcttttgaccgttagggccctgggtggacttctgaagtttttagggcgacggaggattggggtggagttggaggactataacgtaagcgttccaatcttgggatttaagaagttcatgttgacacatcttgtgaacattgatcaggatacttactctgtgctgcaaatcttcaagtccgaaagccacccatctgtgtacaaggttgcctcagggctgaaggaagggctttccttgtttggtattctaaatcggtgtcattgcaaatggggcgagaaattacttcgtctgtggttcaccaggccaactcatgatttgggggagctatcttcccgcttagatgtgatacagttctttttgctgccccagaacctggacatggctcagatgctacatagacttctggggcacatcaaaaatgtgccattgatcctgaaacgcatgaagttgagtcatacaaaggtgtccgactggcaggtcctgtataagactgtgtattcagctcttgggctcagagacgcatgcagatctctgcctcaatctattcagctcttccgcgatatcgctcaggagtttagtgacgatctgcatcacatcgcctcactaattggcaaggtggtcgattttgagggctctttggccgagaaccggtttactgttttgccaaacatagaccctgagatcgatgagaagaaacgcaggcttatgggccttccatcattccttaccgaggtggctaggaaagaactggaaaatttggactcaagaatcccctcttgctcagtgatctatatccccctgattggtttcctcctcagcattccccgactccctagtatggtggaggcctctgactttgaaatcaatggtcttgacttcatgttcctctctgaagagaaattacactatcgatcagcaaggacgaaggagctggacgcccttctgggagacctgcactgtgaaatccgcgaccaggagaccctgctgatgtaccagctgcaatgtcaggtgctggcacgggcagcagttcttaccagggtcctcgacctggcatcgcgacttgacgtgctgctggcacttgcctccgctgctcgcgattatggttactctcgtcccagatactcacctcaagtgctgggtgtccgaatacaaaatgggaggcatcctctgatggagttgtgtgccaggacctttgtccccaattccacagaatgtggaggagataagggacgcgttaaggtgattactggtccaaattcctctggcaaaagcatatatctgaaacaggtcggcttaatcacattcatggccctggttgggtctttcgtccccgcagaagaggctgagattggagccgtggacgctattttcactcgtattcattcatgtgaatccatcagcttaggactgtccaccttcatgatcgacctgaatcaagtcgctaaggccgttaataatgcaacagctcagtccctggtgctgatcgatgaatttgggaagggcacaaataccgtcgatgggttagccctgctggccgctgtcttgcgacactggcttgctcgaggtccaacctgcccccacatctttgtggccaccaattttctgtcacttgtgcagttacagttactcccacagggcccactggtacagtacctgaccatggagacgtgtgaggatgggaatgacctggtgttcttctaccaagtgtgcgagggcgtggctaaggcctctcatgcgtcacacaccgccgctcaagccggtctccccgataaacttgttgccagaggcaaagaggtatctgatctgatccggagcggtaagccaataaaacccgtgaaggacctgctcaagaaaaatcaaatggaaaactgtcaaaccctggtggataaattcatgaaacttgacctcgaggatccgaacttagacttgaatgtgtttatgtcgcaggaggtgctgcccgctgccacatctatcctgtag

SEQ ID NO: 248418 - DNA, 585 bp, Artificial Sequence
  derived and/or modified sequence
atggcaagcttaggcgcaaatccccgtcgaaccccacagggaccccgtccaggcgctgcctcaagcggatttcccagtccagcacccgtgccaggccctcgagaggcggaggaggaggaagttgaagaagaggaagagttagccgagattcacctctgcgttctgtggaatagcggctacctcggtatagcatactatgacacatccgattccaccattcactttatgcctgatgcaccagaccatgaaagtctcaagttgctgcagcgggtgttagatgagatcaacccacaaagcgttgtgacaagcgctaagcaagatgaaaatatgaccagattcctaggcaaactggcctctcaggaacaccgggaaccaaaaagaccagagattatctttctgccctctgtggatttcggtctggagatatccaagcaacgtctgctttccggcaattattcttttatcccggacgctatgacagccactgaaaagattttattcctgagctccataattccatttgactgtctgttaaccgtccgggctctgggaggtctgttaaaatttctcgggcgaagacgatag

SEQ ID NO: 248419 - DNA, 1602 bp, Artificial Sequence
  derived and/or modified sequence
atggcccagatgctgcatcggctcctgggccacatcaaaaatgtgccccttatcctgaaacgtatgaaattaagccataccaaggtatccgactggcaggtgctttacaaaaccgtatattccgcattagggctcagagatgcatgcaggagcctcccgcagagcattcaactgttccgggacatagcacaggagttttccgacgaccttcaccacattgcttccttaattggcaaggtcgtcgactttgagggaagtctggctgagaatcggtttacagtactgccgaacatcgaccctgagatcgacgagaagaagaggcggctcatgggcctgccctccttcttaacggaagtcgctcgcaaggaactggagaatttggactctcggatacctagctgttcagtaatttatatccctctgattggattcctgctgtccattccccgattgcccagcatggtcgaggctagtgactttgaaataaatgggctggactttatgtttctcagcgaagagaagctgcactataggtctgccagaaccaaggagttagacgcactgctcggcgatcttcactgcgagatacgagatcaggaaacactgctgatgtatcagctgcagtgtcaggtcctcgctcgtgcagcagttctcacccgggtgttggacctggccagcagactagacgttttacttgccctagcctccgccgcaagggactacggttactcaagacctcggtatagcccccaagtcctgggagtgcgtatccagaacgggagacaccccctgatggaattgtgcgcacgcaccttcgtgccaaatagtactgagtgtgggggagacaagggaagagtgaaagttataacaggccctaatagctcggggaaaagtatctatctaaaacaggtgggcttgatcacatttatggctctagtaggttcatttgtccccgctgaagaagctgagattggagcagtggatgctatatttacccgcatacatagttgtgagtctatctctctgggtcttagcacctttatgatcgacctgaatcaggtcgccaaggcagtgaacaatgccacggcgcagtctctggtgttgatagacgagtttggcaaagggaccaacaccgtagatggcctggcccttctggccgcagtcttacggcattggcttgccagagggccaacgtgcccccacatcttcgtggccacgaatttcctatccctggtccagctgcagctactgccccagggtccactggttcaatatctgaccatggaaacctgtgaggacgggaatgacctagtgtttttctatcaggtttgtgagggagtagccaaggcctcccacgcctcgcacacggctgctcaggccggtctgcccgacaaactggtggcgaggggaaaagaggtctccgaccttatcagatcaggaaagccaatcaagcccgttaaagatctgcttaagaagaaccaaatggaaaactgtcagaccctggtcgataagtttatgaagttagatctggaagatcccaatttggatcttaacgtcttcatgtcacaggaagtgctgcccgcagcgacctcaatcttgtag

SEQ ID NO: 248420 - DNA, 1002 bp, Artificial Sequence
  derived and/or modified sequence
aagatactttttctgagttccatcattcctttcgactgtctgctgaccgtgcgagcactcggtggtctgctgaaatttctggggaggcgccgaatcggtgtggagttggaggattacaatgtgagcgttcctattctggggtttaaaaagtttatgctcacacaccttgtgaatatcgaccaggatacatattcagtcttacagatctttaagagtgaaagtcacccctcggtgtataaggtagcttccggcttaaaagagggcctgtccttgttcggaattctgaaccgctgccattgcaaatggggagaaaaattgctacgactgtggttcacacggcctacccacgacctgggcgagctgagtagccgactggacgtaattcagtttttcctgctccctcagaacctggacatggcccagatgcttcacagactgctggggcacatcaaaaatgtacctttgatactcaagaggatgaagctttctcatacaaaagtcagtgattggcaagtcctgtataaaaccgtgtactctgccctcggcctgcgggatgcctgtaggtcattgcctcaaagcatccaactgtttagagatatcgcacaggagttttctgatgatttgcatcatatagccagccttatagggaaggtgtatctttcccctcaggtggattttgaagggtccctcgccgagaatcgcttcactgtgctgccgaacatcgatccagaaattgatgagaagaagagacggctgatgggtttgccctcgtttctgacggaagtggctcggaaggaattagagaatcttgacagtcgtattccatcgtgctccgttatatacatccctctaatcggcttcttactatcgatcccaaggctgccctccatggttgaggcatcagacttcgagatcaacggactggatttcatgttccttagtgaggaaaaactgcattatcgatccgctcgcactaaggagctggacgcgcttcttggttag

SEQ ID NO: 248421 - DNA, 1527 bp, Artificial Sequence
  derived and/or modified sequence
atgtggcctgtgctgttattcgtgttcctgtcacagactgtgtacagtgcgctgggactgcgtgacgcctgtcgatccttgccgcagtccatccagctattccgtgacattgcccaggaattctctgacgacctccatcatatcgcatcattaattggtaaggtcgtggactttgaggggagcctggccgagaaccgcttcacggttctgccaaatatcgatcccgaaattgatgagaaaaagcggaggctgatgggcctcccctccttcctgacggaggtggccaggaaagagctggagaatctggattcccgcataccatcttgcagtgtaatctatatccccctgataggctttttgttgtcgatcccacgacttccaagcatggtggaggcatcagacttcgaaatcaacggccttgatttcatgtttttgagcgaagaaaagcttcattacagaagcgcgaggacgaaggaacttgacgcccttcttggcgacttacactgtgagatcagggatcaggagaccctgctaatgtatcaactccaatgtcaagtgctggccagagcggcagttcttacaagagtgctggacctcgccagtagactggatgtactactggccctggcatcagctgccagagactacggatactctcggcctcggtatagcccccaggtgctcggagtgcgtatacagaacgggcgacaccccctgatggagctgtgcgcacgtacattcgttccaaactcaacggagtgcggcggagacaaagggcgagtcaaggtaatcacgggcccaaactcatctggtaagtcaatctacctgaaacaagttggtctgattacattcatggctcttgttggaagcttcgtgcctgcagaagaggccgagatcggggctgtcgatgccattttcacgaggattcactcttgtgagtctattagtctcggcctgtctactttcatgattgacttgaatcaggtggcgaaggccgtgaataacgcaactgctcagtcgctggtattgatcgacgaattcggcaagggcaccaacactgttgacggccttgccctgctggccgctgtgctgagacactggctggcaagaggtcccacatgcccccacatctttgtggccacgaacttcctttcacttgttcaactgcagttactcccgcaggggcctctggtgcagtatctcacaatggaaacatgtgaggacggcaacgacctggtcttcttttaccaggtatgcgagggcgttgccaaggcctctcatgcctcgcacacagcagcacaagcgggtctgcctgacaagctagtggcgcgagggaaggaagtgagcgacctaatccggagtggtaaacccattaagcctgtgaaggatctgttgaaaaagaaccagatggaaaattgccagactctggtcgataagttcatgaaactggatttagaggatcctaacctggatttgaatgtttttatgtcacaggaggtgctccctgcagctacctccatcctgtag

SEQ ID NO: 248422 - DNA, 2505 bp, Artificial Sequence
  derived and/or modified sequence
atggcttcgctgggggctaaccccagaagaactcctcagggtccaagacctggagccgcttcttctgggtttccttcaccagctccagtgcctgggccaagggaggcagaggaagaggaggtggaggaggaggaagaactggccgagatccacctctgcgtgctgtggaatagtggctacctgggaatagcttactacgacaccagtgatagcactatccatttcatgcccgacgcccctgatcatgagtcactcaagcttctgcagagggtgctcgacgagatcaatccacagtcagtcgtcacctcagccaaacaggacgagaacatgactagattcctagggaaattagcttcacaggagcacagggagcctaagaggcccgaaattattttcctccctagtgtggacttcggcctggaaatttcaaagcagagactcctgtccggaaactacagcttcattccagatgccatgacagctactgaaaagattttgtttctcagctctattattcctttcgattgtctcctgactgtcagggccttggggggtctgttgaagttcctcggacgacgccgaattggagtcgagctggaagattataacgtatcagtgcccatccttggcttcaaaaagttcatgttaactcacctcgtgaatatcgatcaggatacatattcagttcttcagatctttaagagcgaatcacaccccagtgtgtataaggttgcctctggcctgaaggagggactgagcctctttggcattctgaatcgatgccattgcaagtggggcgagaaattgctccgactctggtttaccaggccaacgcatgatctgggcgagctttcctccaggctcgacgtaatccagttcttcttgctcccacaaaacctcgacatggcacagatgctacatagattgttgggtcatatcaagaatgtccccctgatcctcaagcgcatgaaactgtctcacacgaaagttagcgactggcaagtgttatacaaaactgtgtatagtgccctgggcctgagagacgcctgtcggtcgcttccacaaagtatccaactctttcgtgacattgctcaggagttctccgatgacctgcatcatatagccagtttgatagggaaggtagttgatttcgagggctcactcgcagaaaaccggttcaccgtcttaccaaacatcgaccctgagattgacgagaagaagcgcaggctgatgggcctcccgagctttttgacagaagtcgcacgcaaggagctggaaaatctggactccaggattccatcatgctcagtgatttatattcctctaattggattcctcctttctattccacgactgccttcaatggtggaggcgtccgatttcgaaataaatggattggattttatgtttctaagtgaagaaaaattgcactatcgcagtgccagaactaaggagctcgacgcacttttaggagacctccactgtgaaattcgtgatcaggaaaccctgttgatgtaccaactgcagtgccaagtgctagctcgcgcagccgtgctgaccagggtacttgatttagcttcccgactcgacgttctgctggctctggcgagcgccgctcgcgactacggctacagtaggcccaggtactcaccgcaggtattgggcgtcagaatccagaacgggcgacacccgctgatggaactgtgcgctcgtactttcgttcccaacagcaccgagtgtggaggggacaaaggtagggtcaaggttattacgggtcccaactcttcaggaaaatctatctacttgaagcaagtgggtctaataacctttatggccctcgtgggaagttttgtgccagccgaggaggccgaaataggggctgttgatgcaatctttacacgcatccatagctgcgagtcaatttccttaggcttaagcacgtttatgattgacttgaatcaggttgctaaagccgtcaacaatgcaaccgctcagtctctagttctaattgacgagtttgggaagggcacaaacacagttgacggactggccttactggctgcagtattgaggcattggcttgccagaggccctacctgtccacatatcttcgtggccacaaacttcctttcccttgttcagttacagttactgcctcaggggcctctggttcaatatttgactatggaaacctgcgaagatggcaacgatttagtgttcttctaccaggtctgtgagggggtcgccaaggcttctcatgcctcacacaccgcggcacaagctggtctgccagacaagttagtcgcgagagggaaagaggtctccgacctgattcggtcaggcaaaccaataaaaccggtgaaggacctcctcaagaagaaccagatggagaattgtcagactctcgttgacaagtttatgaaactagatctcgaggatcctaatctggacctgaacgtgttcatgtctcaggaagtgctgcccgcagcaacgagtattttatag

SEQ ID NO: 248423 - DNA, 2505 bp, Artificial Sequence
  derived and/or modified sequence
atggcaagcctcggcgctaacccgagacgaaccccccagggaccccgtcccggagccgctagctcagggttccctagtcccgctccagttcccggtcctagggaggctgaagaagaggaagtggaagaagaggaggagctcgccgagatccacctctgtgtcctttggaatagcggttacttgggtattgcctattatgacactagcgactctacaattcatttcatgcctgacgctccagatcacgaatccttaaagttgctgcaaagggtgctagacgaaatcaatccccaaagcgtggtgacttccgcgaagcaggatgagaacatgacccgtttcttgggtaaactggctagccaggaacacagagagcccaaacggcctgaaatcatcttcctcccttcggttgattttgggctggaaattagtaaacagagactattgtctggaaactatagttttattcctgacgctatgacagctaccgagaagatcttgtttctatcatcaataataccttttgattgcctccttaccgtgagggctctgggcggacttctcaaatttctgggcaggcgtcgaattggagtcgagctcgaggactataatgtttccgtgcccatacttgggttcaagaagtttatgctgacgcatcttgttaacatcgaccaggacacctattcggtgttacagatctttaaaagcgagagccacccctccgtgtataaagttgcctctggcctgaaagagggactgtccctttttggcatcctcaaccgatgtcattgtaaatggggagaaaaactcctccggctgtggtttacgcgtccaactcatgatttaggtgaacttagttctcggctggatgtcatccagtttttcctgttgccacaaaacctggacatggcacagatgctacaccgactgctgggacatattaaaaatgtacctcttattctcaaacggatgaaactgtcacacacaaaagtgtctgactggcaagtcttgtacaaaacagtgtatagtgcattagggttaagggacgcatgccgcagcctcccccagtctatacagctattcagggacatcgcgcaggaattctccgacgatctgcatcacatcgctagtctgatagggaaggtggtggacttcgagggatccctggccgaaaaccggtttactgtcttgcccaacatcgacccggagattgacgaaaaaaagagacgcctcatgggcctaccatcctttctgactgaagtggcgcgaaaggagctggaaaacctggacagcagaatcccaagctgtagcgtcatttacatccctctgattggcttcctcctctccatcccacggcttccttcgatggttgaggcctcagacttcgaaatcaatggccttgattttatgttcctctctgaggaaaaactgcactatagaagcgcccgaacaaaggaattagacgctttgctgggcgacctgcactgcgagatccgcgaccaggagacgttgcttatgtaccaactccagtgtcaggtgcttgctagggctgccgtgctgaccagagtattagatttagctagtcgcctggacgtgttactggcgctggcttccgccgcacgagactatggttacagtagacctcgttactcaccccaggtactgggggtgcggatccagaacgggagacacccattgatggagctgtgtgccaggaccttcgtgccaaattcgacagaatgcgggggagacaagggcagggtgaaggttatcacagggcctaacagtagcggcaaatcgatctatcttaagcaagttggcttgatcacctttatggcattggtcggctctttcgtgcctgctgaagaggcggagattggtgcagtagacgctatctttactcgaatccacagctgtgagtccatctcactaggcctcagtacttttatgattgacctgaaccaggtggcgaaagcagtcaataacgccaccgctcagtcactggtgctaattgacgagttcggcaaggggactaataccgtagatgggttggccttgctcgctgccgtgttacgtcactggctggcgagagggccaacctgcccacacatctttgtcgcgactaattttctttcactggtgcagctacagctacttccccaggggcctctcgtgcaatacctgaccatggaaacctgcgaggatggcaatgacctggtgtttttctaccaagtctgtgaaggggtggctaaggcctcacacgcctctcacactgccgctcaggccggtctcccggataagcttgtggcaagaggcaaagaggtcagcgacttgatccgcagcgggaagcccattaagcccgtgaaggacttgctgaagaaaaatcaaatggagaactgtcagaccttggtcgacaaattcatgaaattggatctggaggaccccaatctggatctgaacgtgtttatgagccaagaagtcctgcctgcagcgacttctatcctgtag

SEQ ID NO: 248424 - DNA, 585 bp, Artificial Sequence
  derived and/or modified sequence
atggcaagtttgggagccaatccccgtcgaacacctcagggccctaggcccggtgcagccagttctgggttcccctctcctgctcctgttcccggtccgagagaggctgaagaggaggaagtggaggaggaggaggaactcgctgaaatccacttatgcgtgctctggaactccgggtatctcggaatcgcctactacgatacctccgattccacaatccattttatgcccgatgctcctgaccacgagagtctgaagctgctccagcgggtcctggatgagatcaatccacaatcagttgtgacgtccgctaaacaggatgaaaatatgacccgcttcctgggaaagcttgcttctcaggagcatagagagcccaagcgcccagaaatcatattcttgccgtcagtggactttggcttggaaatttccaagcagcggcttctcagcggcaattacagcttcattcctgacgcgatgacagctacagagaagattctgttccttagttccattataccttttgattgcctactcactgtcagggccctcggtggactgctgaaatttttgggcaggaggagatag

SEQ ID NO: 248425 - DNA, 471 bp, Artificial Sequence
  derived and/or modified sequence
accgctcagtcgctagtgttgatcgatgaattcgggaagggtactaacaccgtcgatggactggctctgctggcagccgttctgcggcactggctcgctaggggacccacttgcccgcacatcttcgtcgccaccaacttcctttccctcgtgcaattacagctcctgccgcagggacccctggtccaatacctcgtgtgcgaaggggttgcgaaggcttcacacgcctcacataccgccgcacaggccggtctccctgataaactggtggccagaggcaaagaggttagtgacttgatccgttctggcaagcctatcaagcccgttaaggacctcctcaaaaaaaatcagatggagaattgtcagacactcgtggacaagtttatgaaactggacttagaagatccaaatcttgacctgaacgtcttcatgtcccaggaggtgttgcccgcagctacctccatcctttag

SEQ ID NO: 248426 - DNA, 2505 bp, Artificial Sequence
  derived and/or modified sequence
atggcatccctcggcgctaatcctcggcgaaccccacaggggccaagaccaggtgctgcttcttcaggctttcctagtcccgcaccagttccaggccctcgggaggctgaagaggaggaagtggaggaggaggaggagcttgcagagatccacctgtgtgtactctggaattctggttatctagggattgcttactacgatacgagcgattcaactattcacttcatgcccgacgcgccagatcacgaatcgctgaaactcctccagcgcgtgctggatgagattaacccgcagagcgtggttacctctgcaaagcaggatgaaaacatgactagatttctcggaaaactagcgtcgcaggagcaccgcgagcccaaacggcctgaaatcatcttcctgccctcagttgacttcgggctggaaatcagcaagcaaagactgctctccggcaactacagcttcatcccagacgccatgacagcgacagagaaaattctttttctatcatcgatcattcccttcgactgcctattgacggtgagggcacttggagggctgttgaaattcctgggacgacggagaattggggtagagctcgaggattacaatgtcagcgtcccaattctcggttttaaaaaatttatgctaacgcatctagtcaacatcgaccaggatacatatagcgttctccagatctttaagagtgagtcccacccctctgtttataaagtcgcctcaggcctgaaggagggcctctccttgtttggcatcttgaatcgctgccattgcaaatggggcgaaaaacttctgaggctgtggttcacccgccctacccatgatctcggcgaactgtcttcacggctcgacgtgattcaattcttcctcctccctcagaatctggatatggcacagatgcttcataggctgctcgggcacattaagaacgtgcctctgatattgaaaagaatgaagttgtctcacaccaaggtctctgactggcaggtgctgtacaagaccgtgtactccgctctcggcctgcgagacgcctgccgctcactgccccaatcaattcagttatttagagacatcgcccaggaattcagcgacgatctccatcatattgcctctttaatagggaaggtcgttgactttgagggctcactggctgaaaaccggttcaccgtactgcccaacatcgacccagagattgacgagaaaaagaggcggttgatgggactgcccagcttccttacagaagtcgccaggaaggagctggaaaatctggattctagaatcccgtcatgttcggtaatatacatccccttaatcggctttctactgagcattccgaggctaccctccatggtggaagcaagcgactttgagatcaatggactggatttcatgttcctcagcgaagaaaagttgcattatcggtccgcacgcactaaggagcttgatgccctcctgggtgatctccattgcgagatccgcgatcaggaaaccctgctgatgtaccagttacagtgccaggtattggccagagccgctgtgctgactagagtcctggatctggctagtcgcttggacgtgctgctcgcactggcgagcgctgctcgcgattatggctatagccgaccacgatacagcccccaggttctcggagttcggattcaaaatggcagacaccccttgatggaactctgcgctaggacgttcgtcccgaacagcactgagtgcggcggagacaaaggacgggtaaaggttattactggaccgaatagctcagggaagagcatctaccttaagcaggtgggtctcataacctttatggccctggtcggctcttttgtgcccgcagaagaagctgagatcggcgctgtggatgccatctttacaagaatccactcttgtgagagcatttcactcggacttagcacatttatgattgatttaaaccaagtggccaaggctgtaaataacgctacggcacagagtctggtgttgatcgatgagtttgggaaagggacgaacacagtggacggtctggccctcctcgctgcagtgttaaggcattggctcgccagaggccctacctgcccccacatcttcgtcgcaacaaatttcctctccttggtccaactgcaactgcttccccagggaccactcgtccagtacctcacaatggagacatgtgaagacggcaatgaccttgtgtttttctatcaggtgtgtgaaggagtcgccaaggcaagtcatgcttcccacaccgcagcccaggccggtctaccagacaagttggttgcccgtggcaaggaggtttctgatttgattcgctccggtaagcccattaaaccagtgaaagacttgctgaagaaaaaccagatggagaactgtcagacccttgttgataagtttatgaaactggatctggaggatcccaacctggatcttaatgtgtttatgtctcaggaagtcctcccggcagctacaagcatcctgtag

SEQ ID NO: 248427 - DNA, 2505 bp, Artificial Sequence
  derived and/or modified sequence
atggccagtctgggcgcaaatccgaggaggacaccccaggggccaaggcccggtgccgcatcgtccggcttcccctcccctgcacccgtcccaggtccacgtgaggccgaagaggaagaagtggaggaagaggaggagttggctgaaatccacctctgtgttctctggaattctggttatttgggaatcgcctactacgatactagcgattccaccattcacttcatgcccgatgctccagatcatgagagcctgaagctgcttcagagggtgctcgatgaaatcaatcctcagagtgtagtgaccagcgccaagcaggacgaaaacatgacccgattcttgggtaagttggcatctcaagagcatagagagcccaagaggccggagatcatttttttgccctctgtggattttggactcgaaattagcaagcagaggctcctgtcagggaattattctttcatccctgacgcaatgactgccaccgaaaagattctgtttctgagctcaattattccttttgattgccttctaacagtgagggcattgggcggactgctaaagttcctgggacggcgacgcatcggtgtggagctagaagattacaatgtctcagtgcctatcctcgggtttaagaaattcatgctgacccatctggtaaatatagaccaggacacttactccgtgttgcaaatcttcaagtccgagagccaccccagtgtctacaaggtggcttctggcttaaaagagggtctgagcctcttcggtattctgaatagatgccactgcaagtggggagaaaaactgttgagactgtggtttacccgtccaacccacgatttgggcgagctcagcagccggctggacgtgatccagttctttttgctcccgcaaaaccttgacatggcccaaatgcttcatcgactgttaggacacattaagaatgtaccactgatacttaaacgtatgaagctgtcacacactaaggtcagtgactggcaggtcctatacaagactgtttattcagctctgggactgagagacgcctgtcgctcactcccacagtctattcagctctttagggacatcgctcaggagttttccgacgacctgcatcacattgcctctctcatcggaaaggtggtggattttgaaggctcattggcagagaatcgcttcaccgtgctccctaatattgatcccgagatcgatgagaagaagcgcaggctcatggggcttccctcttttctgaccgaggtggctcgaaaagagctcgaaaatctggatagccgtatcccttcttgctccgtgatctacataccacttattggctttctcctttctattcctaggctgccttccatggttgaggcctcagactttgaaataaacggtctggacttcatgttcctgtctgaggagaagcttcattaccggtccgcccgtaccaaagaacttgacgctctgttgggcgacctgcattgtgagatccgggaccaggaaacactcttgatgtaccagctgcagtgtcaagtgctcgcaagagcagctgtgttgaccagagtcctcgaccttgcctccaggctggacgtactgcttgcactggccagtgcagccagggactacggctactctaggccaaggtactctcctcaagtgttgggtgtgcgcatccagaacggccgacatcccctgatggaactctgtgctaggacctttgttccaaactcaacagaatgcggcggagataagggtagagtaaaagttataactggacccaactcgtctggcaaatcaatatatctgaagcaagtgggccttattactttcatggccctggtcggttcctttgtacccgctgaggaagccgaaattggggctgtggatgcaatatttacaagaatacatagctgtgaatcaatcagcctgggcctgtctacctttatgatcgaccttaaccaggtcgccaaggctgtcaataatgcgaccgctcagtctctcgtcctgatcgacgagttcggcaaggggacaaatacagtggatggcctggctctccttgccgctgtactgcgacactggctagcaaggggtccaacatgtccacatatcttcgtggccacaaacttcctgtctctggtgcaactacagttactgccgcagggacctcttgtccagtatctcactatggagacttgtgaagacggcaacgatctggtgttcttttatcaagtgtgtgaaggggttgctaaggctagccatgcgagtcataccgccgcacaggctggccttcccgataaactggtagcacgcggaaaggaggtttcagatctgataagatctgggaagccgataaagccggtcaaggatctccttaaaaagaaccaaatggagaactgtcagaccctcgtggacaaatttatgaagcttgacttagaggacccaaacctggaccttaacgtctttatgagccaggaggttctccctgctgctacaagcattctttag

SEQ ID NO: 248428 - DNA, 471 bp, Artificial Sequence
  derived and/or modified sequence
actgcccagtctttagtgctgatcgatgagttcggcaaggggacaaacacagtggacggattagcactgctggctgctgtcctgagacattggctggctcgcggtcccacctgccctcacatattcgttgctacaaactttctatctctggtgcagttgcagctgttacctcaagggcctctggtccaatacctggtctgcgaaggcgtcgcgaaggcttcacacgcgtctcacacggctgctcaggcgggactccccgacaaacttgttgccagaggcaaggaagtgtctgacctcatcaggagcggtaagcccattaagcctgttaaggaccttctgaaaaagaatcaaatggagaattgccagaccctggtggacaaatttatgaagctggacttagaagatcctaacctggacttgaacgtgtttatgtctcaggaggtgctccccgctgccacttccattttgtag

SEQ ID NO: 248429 - DNA, 2556 bp, Artificial Sequence
  derived and/or modified sequence
atggcctcccttggcgcaaacccaaggagaacaccgcagggccctagacctggggcagcaagttccgggttcccttcacccgcacccgtgccaggacctagggaagccgaagaagaagaagtggaagaagaggaagagctggccgaaatccacctctgtgtattatggaatagcgggtatctcggtatcgcctactatgatactagcgactcgactattcacttcatgccagatgctccagatcatgagagtctcaaattgctccagcgggtactggatgagatcaacccacagagcgttgtgacttccgccaaacaggacgagaatatgacccgttttctgggcaagcttgcgtctcaagaacatcgcgagccgaaacgtcccgagattatctttctgccttccgttgactttgggctagagatcagcaaacagagactcctgtccggcaattactcctttataccagacgcaatgactgcaaccgagaaaatcctgtttctctcatccattataccctttgactgtctcctgactcccccaggggatcttcgcttcaccccaattccactgttgatcccgtctcaggtgagagccctagggggtctgctcaaattcctggggaggcgcagaatcggtgtcgagttggaggattataatgtgtccgtgccgatccttggattcaaaaaatttatgctgacacacttggtaaatattgatcaggacacatactccgtattgcaaatttttaagagtgagtcacatccatctgtgtacaaagtggctagtgggttgaaggaaggtctttctctctttggcatcctgaatcggtgccactgtaagtggggagagaaattgctgaggttgtggttcactagaccaacacacgacctgggagagctctcatcaagactggatgtgatccaattctttcttctgccccaaaatctggatatggcccagatgctccacaggctgctcggccacataaagaatgtacccctcatcctgaaacggatgaagctgtcacatacaaaagtgagcgattggcaagtcctgtataaaacagtctattccgcattagggctgagagacgcctgcaggagtcttccgcagtcaattcaactatttcgcgacattgcacaggagtttagtgatgacctccaccacatagcttctctgataggcaaggtggtcgactttgaggggagcctcgcagaaaatcgctttactgtacttccaaatatcgacccagagattgatgaaaagaaaagaagattaatgggactgccaagctttctgaccgaggtcgccagaaaggaactggagaatctggatagcaggatcccgtcttgttccgtcatctacatacctcttataggattcttattatccattcccagactgccaagtatggtggaagcgtccgactttgaaattaatggccttgattttatgtttctgagcgaagagaagctccactaccgatctgccagaaccaaagagctggacgctttgttaggagatctccactgcgaaatccgggatcaggaaaccctcctgatgtaccagttacaatgccaggtacttgccagggccgctgtgctcacccgggtgctggacttggcgtcaagactcgatgtactgctcgcactggccagtgctgcgcgagattatgggtactcccgcccacggtattcacctcaggtccttggtgtgcgcatccagaacggaagacaccctcttatggagttatgtgctcggacgtttgtgcctaactcaaccgagtgcggaggagacaaaggcagggttaaggtgattacagggcctaactcctctggcaagtctatttacttgaaacaggtcggcctgattacctttatggctctagttgggtccttcgtgcctgctgaggaagcagaaattggcgcagtggatgccatctttaccaggattcacagttgcgagtcaattagcttgggtctcagtacatttatgattgatcttaatcaggtggctaaagctgttaataacgccacagcccagtcccttgtactgatcgacgagttcgggaagggtactaacaccgtggacggcctggcattactggctgccgtgctgagacactggctcgctaggggccctacatgcccccacatcttcgtcgcgactaatttcctgtccttggtacaattgcaactgctccctcaggggccactcgtacagtacctgacaatggagacttgcgaagatggcaacgacctggtcttcttctatcaggtgtgtgagggcgtagccaaagcttcacacgcaagccatacagctgcacaggcaggtctccccgacaagctggtcgctcggggtaaggaggtttccgaccttatccgttcgggcaaacccatcaaacccgttaaagatctgctgaaaaaaaaccagatggaaaattgccagactctggtcgataaattcatgaaactggatctggaagaccccaatcttgatctgaatgtgtttatgtcgcaggaagtgctgcccgctgccacatcaatcttatag

SEQ ID NO: 248430 - DNA, 1602 bp, Artificial Sequence
  derived and/or modified sequence
atggcacaaatgctacatcggctactcgggcacataaaaaacgtgccccttatcttaaaaaggatgaagctttcgcacaccaaagtgagcgactggcaggtcctatacaagacagtgtacagtgcactgggactgcgggatgcgtgtcgatcactgcctcagagcattcaactgttccgggatattgcacaggaattctcggacgacctgcatcatatcgcatcactgattggaaaggtggtggactttgagggaagcttagccgagaacaggtttacagtgctgcccaacatagatccagaaattgatgaaaaaaaacgtcgactgatgggtctgccaagctttctgactgaagttgcacgaaaagagcttgagaatctggacagcaggatcccgtcttgcagcgtgatttacatcccgttgatcggctttcttctaagcatcccgcgactgccaagcatggtggaggccagcgatttcgagattaacgggctcgactttatgtttctcagcgaggagaaactgcactaccggtcggccaggactaaggaactggatgctctgcttggcgacctgcactgcgaaatcagggaccaggagacgttacttatgtaccagctccagtgccaagtgctggccagggcggctgtgttgacacgggtcctcgacttggcttctcgattggatgtgctcctcgctctggcaagcgctgccagagactatggatattcccggccaagatatagcccccaggttctgggtgtgcggattcaaaacgggcgacaccctctgatggagctttgcgcacgtacttttgtaccaaacagtaccgagtgtggcggagacaaaggacgggtcaaagtgataaccgggcctaatagcagcgggaagtccatctacctaaagcaggtgggattaatcacattcatggctctcgtcggatctttcgtgccggcagaggaggctgagataggcgcagtggatgctattttcacaaggattcattcctgtgagtccatctcactgggcctctctacattcatgatcgatctcaatcaggtcgctaaggcagttaacaacgctaccgcacagtccttagttctgattgatgaattcggaaaggggaccaacaccgtggacggactagccttactggccgcagtactgaggcactggctggcgaggggaccgacttgtccccatattttcgtcgctaccaattttctcagtttagtacagctccagctgctgccacaggggccacttgtccagtatcttacaatggagacgtgcgaagatggtaacgatctggtgtttttctaccaggtgtgtgaaggagtggccaaagcctctcacgcatcacatactgcagctcaggctggtttgcccgacaagcttgtcgcaagggggaaggaggtgtcagatcttattaggtctggtaagcccatcaagcccgtgaaagatctgcttaaaaaaaatcagatggaaaactgccagaccttagtggacaagtttatgaaattggacctggaggacccaaacctggatctgaacgtatttatgtcacaggaggtcctccccgctgctacctccattctctag

SEQ ID NO: 248431 - DNA, 765 bp, Artificial Sequence
  derived and/or modified sequence
atggcctcactcggcgcaaatcctaggagaacccctcaggggccacggcctggagccgcatctagtggattcccttctccagcaccagtgccaggacctagggaagctgaggaggaggaagttgaagaagaagaagagctggccgagatccatctctgtgttctgtggaattccggatacctgggcattgcttactatgatacgtctgactcaacgatccattttatgcctgacgcccctgatcacgaatcactaaaacttctccagagagtgctggacgagatcaaccctcaaagcgtagtcaccagcgctaaacaagacgaaaatatgacccgcttcctcggcaaactggcttcccaggagcatagggagccaaaacgcccagaaattattttcttacccagcgtcgacttcgggttggagatttccaagcagcggcttctttcaggcaattactcattcattccagatgctatgaccgcaacagaaaaaattctgttcctgtcaagtatcattcccttcgactgtctattgaccgttcgggcactgggaggactcctgaagtttctcggtaggcggcgtataggagtggaacttgaggactacaatgtgagcgtccccatcctcggctttaagaaatttatgctgacacacctggtgaacattgatcaggatacatatcgactcgagtgcaatggggcaatatctgcccagtgtaacctgtgtcttctgggctccagcgattctccggcttctgcttcctag

SEQ ID NO: 248432 - DNA, 816 bp, Artificial Sequence
  derived and/or modified sequence
atgttcctgtctgaagaaaagctgcactacagaagtgccagaacaaaggaactggatgccctgcttggggacctccactgtgaaatccgggatcaggaaacacttcttatgtaccaacttcagtgccaagtgctggcaagggcagctgtgctcacccgtgtactagatctcgctagtcgactggatgtgttactcgccctggctagcgccgcacgggattacgggtattcccgcccacgctacagcccccaggtcctcggggtgcgaattcaaaacggacggcatccgctcatggagctgtgtgcgagaacctttgtgccaaactcaaccgagtgcggtggggacaagggacgagtcaaggtgataaccgggccaaacagttctggaaagtctatttacctgaagcaggtaggattaatcacatttatggccttggtaggatcctttgtccctgcagaagaggccgaaatcggagctgtagacgccatttttactaggatccacagctgtgagtctatcagtctgggcttgtccaccttcatgatcgatttgaatcaggtggcgaaggctgtcaacaatgccaccgcacagtctcttgtgctaattgatgagttcggtaaagggaccaatacggtggacggtttggccctgctcgccgctgttctgcggcactggctcgccagggggcctacctgtccacatatttttgttgctacaaattttctttccttggttcagctgcagcttcttccgcaaggccctttggtccaatatctagattggccacgagtgtcagggcaagagggaggcgactag

SEQ ID NO: 248433 - DNA, 1602 bp, Artificial Sequence
  derived and/or modified sequence
atggcccagatgctgcaccgtctgctgggtcatatcaaaaacgttcctttaatacttaagcggatgaagctcagtcatacaaaggtttctgactggcaagtactgtacaagaccgtatactccgctcttggtctcagagatgcctgccgctctctgccacagtctattcagttattccgcgacattgcacaggagttctccgacgacttgcaccatatagcgagtctcataggcaaagtggttgacttcgagggttctctcgccgagaacaggttcacagtattacccaacattgaccccgaaattgatgaaaagaagcggcgactaatgggtctcccatcttttctgaccgaagtggctcgaaaggagctggagaacttggattcaagaattcctagttgtagtgtgatatatattccgctgatcgggttccttctgtccataccgagactgccatccatggtggaggcctccgattttgagatcaacgggctggatttcatgttcctgtccgaggagaagctgcactaccgctctgctcgaactaaagagcttgacgcgctgttaggcgatcttcactgtgaaatcagagaccaggaaactctgctgatgtatcaactgcagtgtcaagtcttggctagagccgcagtgctcacccgggtgttggatttggctagtagactcgatgtgcttttggccctggcatccgccgctcgggactacggctattctcggcctcggtacagcccacaggtgttgggcgtgcggatacagaatggaagacacccccttatggaactgtgtgccaggacctttgttcccaacagtacagaatgtggaggagataaaggccgagtgaaggtgatcaccggacccaattcatccggcaagagcatctaccttaaacaggtcggtctcatcacctttatggccctagttggcagcttcgtgccagctgaggaggctgaaattggcgctgtcgacgcaatcttcactcggattcacagctgcgagagcatttcgctggggctgagtacattcatgatcgacctgaatcaggtggcaaaagccgtgaacaatgccacagcccaatcccttgtcctcattgatgagtttggtaagggcacaaatacggtcgatgggctggcgctcttagcagcagtgctacgacattggcttgctaggggacccacctgcccacatatctttgttgccaccaacttcctgtcgctagttcaactccagctgcttccccaggggccacttgtgcagtatctcacgatggaaacctgtgaggacggcaacgatctagtctttttttatcaagtttgtgagggagtggccaaagctagccacgcatcacacacagcagcccaggccggtctacccgataaattggtagctaggggcaaggaagtgtccgatcttatcagaagtggcaaacctatcaagcctgtgaaggatctgctgaagaagaaccaaatggaaaactgccagactctcgtagataagttcatgaagttggacctagaggaccccaatctggacctgaatgtcttcatgtctcaagaggtgctgcctgcagctacaagcattctttag

SEQ ID NO: 248434 - DNA, 816 bp, Artificial Sequence
  derived and/or modified sequence
atgtttctctcggaggagaagctgcactataggagtgcgagaaccaaagagcttgacgctctgctcggagatcttcattgtgagatcagagatcaggagactttattgatgtatcagttacaatgtcaagttttagcgagagctgccgtgctcacacgagtgctcgatcttgcttcaagattggatgtcctgctggctctggcatcggctgctcgagactatggatactctaggcctaggtactctccacaagtcctcggcgtgcggattcaaaatgggagacacccccttatggaactgtgcgcaagaacattcgtgcctaattctacagagtgtggaggtgacaagggtcgtgtgaaagtgattacaggaccaaacagctcaggcaaatccatctatcttaagcaggtgggactcatcacattcatggcccttgtcgggtcctttgtccccgctgaagaggctgagataggagcagtggacgcaatatttaccaggatccatagttgcgagtctatcagtttggggctctccactttcatgattgatctgaaccaggtggccaaggctgtcaataacgccacggcacagtcactggtccttattgatgaattcggaaagggcacaaatacagtcgacggcttagccctgctggctgccgtattgcgacattggttagccagaggacccacctgcccccatatattcgtggcaaccaacttcttgtcccttgttcaattgcagctgcttccacagggcccactggtccagtatctggattggcctcgcgtgtcaggccaggagggaggcgattag

SEQ ID NO: 248435 - DNA, 765 bp, Artificial Sequence
  derived and/or modified sequence
atggcaagcctgggcgctaacccacggaggacacctcagggcccacggcctggggcagcctctagtggctttccttcccctgcccctgtgcctggacctcgcgaagctgaggaggaggaggtcgaggaagaagaagagctggccgaaattcatttgtgtgtgctgtggaattcaggctatctcgggattgcgtattatgatacttcagacagtacgatacatttcatgccagatgctcccgaccatgagtctctgaagctcctgcagcgagtgctggacgagataaacccccagtccgtcgtgaccagcgccaagcaggacgaaaatatgactcgcttcctcggcaagttagccagccaggagcacagagagcctaagcgaccagagataatctttctgccttctgtggatttcggcttagagatctctaaacagcggctgttatctggcaattattcgtttattcccgatgccatgactgccacggagaagatactgtttctctccagtatcatccctttcgactgtctcctgacagtgcgcgctttgggcggactcctgaagtttctgggtaggcggcgaattggagtggagctcgaggactacaatgtcagcgtcccaatcttaggattcaagaaattcatgctgacacatttagtgaatatcgatcaggacacatatcgcctggagtgtaatggagccatttcagctcagtgcaacctgtgcctattgggatcatccgactctcccgcttctgcttcatag

SEQ ID NO: 248436 - DNA, 765 bp, Artificial Sequence
  derived and/or modified sequence
atggcctccctgggggctaaccctagaaggacaccccagggcccacgtccaggggctgcaagttctggcttccccagccctgcccctgtcccgggacctcgcgaagccgaggaagaagaggtggaggaggaagaggagctggccgagatacacttatgtgtgctgtggaactctggttacctaggaatagcatattacgacacctctgacagtaccatccatttcatgcccgatgcccctgaccatgaaagcttgaagcttcttcagagggttctggatgaaatcaatccccagtccgtggtgacaagtgcaaaacaggacgagaacatgacacgctttctcgggaaattggccagtcaggagcaccgagaacccaaacgacccgagataatttttcttccgagtgttgacttcggcttagagatatctaaacagaggcttctgtccggtaactactctttcattccggatgccatgacggcgacagagaagatccttttcctgagctcgattatcccctttgattgcctgctaacggtgcgcgctctgggagggcttctgaagttcctgggtcggcgacggatcggtgtcgagctcgaggactataatgtctccgttccaattcttgggtttaagaagttcatgctcacacacttggtgaatatagatcaggacacatacaggctggagtgtaatggcgcaataagcgcccagtgtaatttgtgtcttctggggtcatctgactcccctgcctcggcctcttag

SEQ ID NO: 248437 - DNA, 1602 bp, Artificial Sequence
  derived and/or modified sequence
atggcccagatgcttcacagactgctgggtcacattaaaaacgtccccctcatcctgaagcggatgaaactgtcacacaccaaagtgtcggattggcaggttctttacaagactgtctacagcgccttgggattaagagacgcttgcagatccctgccccaaagcatccagctgttcagagacatcgcccaggaattttctgacgatctgcatcacattgctagcctcataggaaaggttgtggattttgaaggatcgttagctgaaaatcgctttaccgtgttgcctaacattgaccctgaaattgatgaaaagaagcgccgattaatgggactgccctccttcttaacagaagtagccaggaaggagttggagaaccttgacagtaggatacccagctgttccgtcatctacataccccttatagggttcctcctgtcaatcccacggcttccctctatggtcgaggccagcgacttcgagatcaatgggctcgattttatgttcctgtcagaagaaaaactgcactacaggagtgctagaacaaaagaattagatgcattgctgggggatctacattgtgaaattcgcgatcaggaaacactcctgatgtaccagctgcagtgccaggttctcgccagggccgcagtgcttaccagggttctagatctcgcctctcggctcgacgtgctcctggccctggccagcgccgctagggattatgggtacagtaggcctcggtactccccacaggtgttgggtgtgcggatccagaacggaagacacccactgatggagctttgcgctcgtacgtttgtacccaattcgactgagtgtggcggagacaaaggccgagttaaggtgatcacggggccaaattcctccggcaaaagcatctatcttaagcaggtcggcctgataaccttcatggctttagtgggatccttcgtgccagccgaagaggccgagatcggggctgttgatgccatcttcacacgcattcactcgtgcgagtccatttcactggggctcagcacctttatgattgatttaaaccaagtcgcaaaggccgttaacaacgcaacagcccagtccctggtgctcatcgacgaatttggaaagggcaccaataccgtggatggcttagccctcctggccgctgtgctccgccattggttagccagaggccctacttgtccacacatttttgtggcaactaattttctgagcttggttcagttgcaactgcttccgcaaggaccactagtgcagtatctcaccatggaaacgtgtgaggacggcaatgaccttgtttttttttatcaggtctgcgagggcgtggctaaggccagccatgctagccacacagctgcacaggcagggttgcctgacaagctggtagccagaggcaaggaggtctccgatctgattcgttccgggaaaccgattaagcctgtgaaagacctgttgaaaaaaaatcagatggaaaactgccagacactcgttgataaatttatgaagctggacctggaagatccaaatctggatcttaacgttttcatgagccaggaggtgctgccagcagccacctccatcttatag

SEQ ID NO: 248438 - DNA, 2556 bp, Artificial Sequence
  derived and/or modified sequence
atggcatctctcggcgcaaacccgagacgcactccccaaggcccacgccctggtgccgctagttccgggtttccatcccccgctccagtgccaggacccagagaggctgaggaggaggaagttgaagaggaggaagagctcgctgaaattcacctttgtgtcctgtggaacagcggatatcttggtatagcttactacgacaccagcgatagtaccattcatttcatgccagatgccccagatcacgagtccctgaagctcctccagagagtcctggatgagattaacccccagagcgtagttacctctgccaaacaggacgaaaacatgacgagattcctcgggaaactagctagccaagaacaccgggaacctaagagacctgaaatcatttttctccccagtgttgactttggcctggaaatctctaaacagcgcttgctgtcaggcaattatagttttatcccagatgcaatgacggccaccgaaaagatcctgttcctctctagcatcattccatttgattgtctgctgacccccccaggtgaccttagattcactcctatccctctgttgattccctctcaggtgagggctctgggaggattactgaaatttctcggcagaagaaggataggtgtggaactcgaggactacaacgtctcagtgcccattctggggtttaagaagttcatgctcacccacctcgttaacatcgaccaagacacatactctgtcctacagatcttcaagtcagaatcacaccctagcgtgtacaaagtcgcatccggactcaaagaagggctgtcgctcttcggcatccttaacagatgccactgcaagtggggagagaagctgttacgcctgtggtttacgaggcctacccatgacctaggcgagcttagttcacgcctggacgtgatccaattcttcctcttgcctcaaaatctggatatggctcaaatgctgcatagattactggggcatattaagaatgttcctctgatattaaaaagaatgaagctgtcacacacaaaagtaagcgactggcaggtcctttataagaccgtttactctgccctgggtctgcgagacgcctgtcgctctctaccccagtccattcaactgttcagggacattgcacaagaatttagcgatgatctccaccatatcgctagcctaatcggcaaggttgtggactttgagggatctttggcagaaaaccgattcacagtcctgccaaatatcgatccagagatcgacgaaaagaagagacgcctgatgggcttgccatcctttttgacagaggtcgccagaaaagagctcgaaaacttagacagccgtataccgagctgttcagtcatttacatcccactgattgggtttcttctaagtatcccccgacttccctccatggtagaggcctcagatttcgagataaacggattggacttcatgtttctgtctgaagagaagctgcattatcgttcagccaggaccaaggagcttgatgccctgctcggtgacctgcactgtgagattcgggaccaggagacactacttatgtatcaactgcagtgtcaagtgttggcaagagccgcagtacttacgcgagtgttggacctcgccagtcggttagatgtactgttggccctcgcttctgcagcacgtgactatggttatagtcggccacgctattcccctcaagtccttggggttcggatccagaacgggagacaccccctgatggagctttgcgccagaaccttcgtgcctaacagcacggagtgcggcggtgataagggaagagttaaggttattacaggtccaaactcaagcggtaagagcatatatctgaagcaagtaggattgataactttcatggctcttgtggggagcttcgtgcccgcagaagaagcagagattggggctgtggatgccatctttacacgcatccactcatgtgagtccataagcctgggtctctctaccttcatgatcgatctcaaccaggtggccaaggctgtcaataacgccactgcacagagcctcgtccttatcgacgagttcgggaaaggaaccaacaccgtggatggcttagcgttactggccgcagtactgagacattggctggcacggggtcccacgtgcccccacatttttgtagccacaaattttctctccctggtgcagctacagctccttccccagggcccactggtgcaatacctcaccatggagacctgcgaagacggaaatgacctggtctttttctaccaggtgtgcgaaggggttgctaaagcctcacatgccagccacacagctgcccaggctggcctccctgataagctcgtggcaaggggcaaggaagttagtgacctcataaggtcaggtaaaccaatcaaacctgtgaaagatctactgaaaaagaaccagatggagaactgccagacgctagtcgataaatttatgaagctcgacctagaggacccaaacctagatctaaatgtgttcatgagccaggaggtcttgcctgctgctacaagcatcctttag

SEQ ID NO: 248439 - DNA, 2556 bp, Artificial Sequence
  derived and/or modified sequence
atggccagcctgggcgccaaccccagaagaaccccccagggccccagacccggcgccgccagcagcggcttccccagccccgcccccgtgcccggccccagagaggccgaggaggaggaggtggaggaggaggaggagctggccgagatccacctgtgcgtgctgtggaacagcggctacctgggcatcgcctactacgacaccagcgacagcaccatccacttcatgcccgacgcccccgaccacgagagcctgaagctgctgcagagagtgctggacgagatcaacccccagagcgtggtgaccagcgccaagcaggacgagaacatgaccagattcctgggcaagctggccagccaggagcacagagagcccaagagacccgagatcatcttcctgcccagcgtggacttcggcctggagatcagcaagcagagactgctgagcggcaactacagcttcatccccgacgccatgaccgccaccgagaagatcctgttcctgagcagcatcatccccttcgactgcctgctgaccccccccggcgacctgagattcacccccatccccctgctgatccccagccaggtgagagccctgggcggcctgctgaagttcctgggcagaagaagaatcggcgtggagctggaggactacaacgtgagcgtgcccatcctgggcttcaagaagttcatgctgacccacctggtgaacatcgaccaggacacctacagcgtgctgcagatcttcaagagcgagagccaccccagcgtgtacaaggtggccagcggcctgaaggagggcctgagcctgttcggcatcctgaacagatgccactgcaagtggggcgagaagctgctgagactgtggttcaccagacccacccacgacctgggcgagctgagcagcagactggacgtgatccagttcttcctgctgccccagaacctggacatggcccagatgctgcacagactgctgggccacatcaagaacgtgcccctgatcctgaagagaatgaagctgagccacaccaaggtgagcgactggcaggtgctgtacaagaccgtgtacagcgccctgggcctgagagacgcctgcagaagcctgccccagagcatccagctgttcagagacatcgcccaggagttcagcgacgacctgcaccacatcgccagcctgatcggcaaggtggtggacttcgagggcagcctggccgagaacagattcaccgtgctgcccaacatcgaccccgagatcgacgagaagaagagaagactgatgggcctgcccagcttcctgaccgaggtggccagaaaggagctggagaacctggacagcagaatccccagctgcagcgtgatctacatccccctgatcggcttcctgctgagcatccccagactgcccagcatggtggaggccagcgacttcgagatcaacggcctggacttcatgttcctgagcgaggagaagctgcactacagaagcgccagaaccaaggagctggacgccctgctgggcgacctgcactgcgagatcagagaccaggagaccctgctgatgtaccagctgcagtgccaggtgctggccagagccgccgtgctgaccagagtgctggacctggccagcagactggacgtgctgctggccctggccagcgccgccagagactacggctacagcagacccagatacagcccccaggtgctgggcgtgagaatccagaacggcagacaccccctgatggagctgtgcgccagaaccttcgtgcccaacagcaccgagtgcggcggcgacaagggcagagtgaaggtgatcaccggccccaacagcagcggcaagagcatctacctgaagcaggtgggcctgatcaccttcatggccctggtgggcagcttcgtgcccgccgaggaggccgagatcggcgccgtggacgccatcttcaccagaatccacagctgcgagagcatcagcctgggcctgagcaccttcatgatcgacctgaaccaggtggccaaggccgtgaacaacgccaccgcccagagcctggtgctgatcgacgagttcggcaagggcaccaacaccgtggacggcctggccctgctggccgccgtgctgagacactggctggccagaggccccacctgcccccacatcttcgtggccaccaacttcctgagcctggtgcagctgcagctgctgccccagggccccctggtgcagtacctgaccatggagacctgcgaggacggcaacgacctggtgttcttctaccaggtgtgcgagggcgtggccaaggccagccacgccagccacaccgccgcccaggccggcctgcccgacaagctggtggccagaggcaaggaggtgagcgacctgatcagaagcggcaagcccatcaagcccgtgaaggacctgctgaagaagaaccagatggagaactgccagaccctggtggacaagttcatgaagctggacctggaggaccccaacctggacctgaacgtgttcatgagccaggaggtgctgcccgccgccaccagcatcctgtag

SEQ ID NO: 248440 - DNA, 2505 bp, Artificial Sequence
  derived and/or modified sequence
atggccagcctgggcgccaaccccagaagaaccccccagggccccagacccggcgccgccagcagcggcttccccagccccgcccccgtgcccggccccagagaggccgaggaggaggaggtggaggaggaggaggagctggccgagatccacctgtgcgtgctgtggaacagcggctacctgggcatcgcctactacgacaccagcgacagcaccatccacttcatgcccgacgcccccgaccacgagagcctgaagctgctgcagagagtgctggacgagatcaacccccagagcgtggtgaccagcgccaagcaggacgagaacatgaccagattcctgggcaagctggccagccaggagcacagagagcccaagagacccgagatcatcttcctgcccagcgtggacttcggcctggagatcagcaagcagagactgctgagcggcaactacagcttcatccccgacgccatgaccgccaccgagaagatcctgttcctgagcagcatcatccccttcgactgcctgctgaccgtgagagccctgggcggcctgctgaagttcctgggcagaagaagaatcggcgtggagctggaggactacaacgtgagcgtgcccatcctgggcttcaagaagttcatgctgacccacctggtgaacatcgaccaggacacctacagcgtgctgcagatcttcaagagcgagagccaccccagcgtgtacaaggtggccagcggcctgaaggagggcctgagcctgttcggcatcctgaacagatgccactgcaagtggggcgagaagctgctgagactgtggttcaccagacccacccacgacctgggcgagctgagcagcagactggacgtgatccagttcttcctgctgccccagaacctggacatggcccagatgctgcacagactgctgggccacatcaagaacgtgcccctgatcctgaagagaatgaagctgagccacaccaaggtgagcgactggcaggtgctgtacaagaccgtgtacagcgccctgggcctgagagacgcctgcagaagcctgccccagagcatccagctgttcagagacatcgcccaggagttcagcgacgacctgcaccacatcgccagcctgatcggcaaggtggtggacttcgagggcagcctggccgagaacagattcaccgtgctgcccaacatcgaccccgagatcgacgagaagaagagaagactgatgggcctgcccagcttcctgaccgaggtggccagaaaggagctggagaacctggacagcagaatccccagctgcagcgtgatctacatccccctgatcggcttcctgctgagcatccccagactgcccagcatggtggaggccagcgacttcgagatcaacggcctggacttcatgttcctgagcgaggagaagctgcactacagaagcgccagaaccaaggagctggacgccctgctgggcgacctgcactgcgagatcagagaccaggagaccctgctgatgtaccagctgcagtgccaggtgctggccagagccgccgtgctgaccagagtgctggacctggccagcagactggacgtgctgctggccctggccagcgccgccagagactacggctacagcagacccagatacagcccccaggtgctgggcgtgagaatccagaacggcagacaccccctgatggagctgtgcgccagaaccttcgtgcccaacagcaccgagtgcggcggcgacaagggcagagtgaaggtgatcaccggccccaacagcagcggcaagagcatctacctgaagcaggtgggcctgatcaccttcatggccctggtgggcagcttcgtgcccgccgaggaggccgagatcggcgccgtggacgccatcttcaccagaatccacagctgcgagagcatcagcctgggcctgagcaccttcatgatcgacctgaaccaggtggccaaggccgtgaacaacgccaccgcccagagcctggtgctgatcgacgagttcggcaagggcaccaacaccgtggacggcctggccctgctggccgccgtgctgagacactggctggccagaggccccacctgcccccacatcttcgtggccaccaacttcctgagcctggtgcagctgcagctgctgccccagggccccctggtgcagtacctgaccatggagacctgcgaggacggcaacgacctggtgttcttctaccaggtgtgcgagggcgtggccaaggccagccacgccagccacaccgccgcccaggccggcctgcccgacaagctggtggccagaggcaaggaggtgagcgacctgatcagaagcggcaagcccatcaagcccgtgaaggacctgctgaagaagaaccagatggagaactgccagaccctggtggacaagttcatgaagctggacctggaggaccccaacctggacctgaacgtgttcatgagccaggaggtgctgcccgccgccaccagcatcctgtag

SEQ ID NO: 248441 - DNA, 816 bp, Artificial Sequence
  derived and/or modified sequence
atgttcctgagcgaggagaagctgcactacagaagcgccagaaccaaggagctggacgccctgctgggcgacctgcactgcgagatcagagaccaggagaccctgctgatgtaccagctgcagtgccaggtgctggccagagccgccgtgctgaccagagtgctggacctggccagcagactggacgtgctgctggccctggccagcgccgccagagactacggctacagcagacccagatacagcccccaggtgctgggcgtgagaatccagaacggcagacaccccctgatggagctgtgcgccagaaccttcgtgcccaacagcaccgagtgcggcggcgacaagggcagagtgaaggtgatcaccggccccaacagcagcggcaagagcatctacctgaagcaggtgggcctgatcaccttcatggccctggtgggcagcttcgtgcccgccgaggaggccgagatcggcgccgtggacgccatcttcaccagaatccacagctgcgagagcatcagcctgggcctgagcaccttcatgatcgacctgaaccaggtggccaaggccgtgaacaacgccaccgcccagagcctggtgctgatcgacgagttcggcaagggcaccaacaccgtggacggcctggccctgctggccgccgtgctgagacactggctggccagaggccccacctgcccccacatcttcgtggccaccaacttcctgagcctggtgcagctgcagctgctgccccagggccccctggtgcagtacctggactggcccagagtgagcggccaggagggcggcgactag

SEQ ID NO: 248442 - DNA, 1002 bp, Artificial Sequence
  derived and/or modified sequence
aagatcctgttcctgagcagcatcatccccttcgactgcctgctgaccgtgagagccctgggcggcctgctgaagttcctgggcagaagaagaatcggcgtggagctggaggactacaacgtgagcgtgcccatcctgggcttcaagaagttcatgctgacccacctggtgaacatcgaccaggacacctacagcgtgctgcagatcttcaagagcgagagccaccccagcgtgtacaaggtggccagcggcctgaaggagggcctgagcctgttcggcatcctgaacagatgccactgcaagtggggcgagaagctgctgagactgtggttcaccagacccacccacgacctgggcgagctgagcagcagactggacgtgatccagttcttcctgctgccccagaacctggacatggcccagatgctgcacagactgctgggccacatcaagaacgtgcccctgatcctgaagagaatgaagctgagccacaccaaggtgagcgactggcaggtgctgtacaagaccgtgtacagcgccctgggcctgagagacgcctgcagaagcctgccccagagcatccagctgttcagagacatcgcccaggagttcagcgacgacctgcaccacatcgccagcctgatcggcaaggtgtacctgagcccccaggtggacttcgagggcagcctggccgagaacagattcaccgtgctgcccaacatcgaccccgagatcgacgagaagaagagaagactgatgggcctgcccagcttcctgaccgaggtggccagaaaggagctggagaacctggacagcagaatccccagctgcagcgtgatctacatccccctgatcggcttcctgctgagcatccccagactgcccagcatggtggaggccagcgacttcgagatcaacggcctggacttcatgttcctgagcgaggagaagctgcactacagaagcgccagaaccaaggagctggacgccctgctgggctag

SEQ ID NO: 248443 - DNA, 1527 bp, Artificial Sequence
  derived and/or modified sequence
atgtggcccgtgctgctgttcgtgttcctgagccagaccgtgtacagcgccctgggcctgagagacgcctgcagaagcctgccccagagcatccagctgttcagagacatcgcccaggagttcagcgacgacctgcaccacatcgccagcctgatcggcaaggtggtggacttcgagggcagcctggccgagaacagattcaccgtgctgcccaacatcgaccccgagatcgacgagaagaagagaagactgatgggcctgcccagcttcctgaccgaggtggccagaaaggagctggagaacctggacagcagaatccccagctgcagcgtgatctacatccccctgatcggcttcctgctgagcatccccagactgcccagcatggtggaggccagcgacttcgagatcaacggcctggacttcatgttcctgagcgaggagaagctgcactacagaagcgccagaaccaaggagctggacgccctgctgggcgacctgcactgcgagatcagagaccaggagaccctgctgatgtaccagctgcagtgccaggtgctggccagagccgccgtgctgaccagagtgctggacctggccagcagactggacgtgctgctggccctggccagcgccgccagagactacggctacagcagacccagatacagcccccaggtgctgggcgtgagaatccagaacggcagacaccccctgatggagctgtgcgccagaaccttcgtgcccaacagcaccgagtgcggcggcgacaagggcagagtgaaggtgatcaccggccccaacagcagcggcaagagcatctacctgaagcaggtgggcctgatcaccttcatggccctggtgggcagcttcgtgcccgccgaggaggccgagatcggcgccgtggacgccatcttcaccagaatccacagctgcgagagcatcagcctgggcctgagcaccttcatgatcgacctgaaccaggtggccaaggccgtgaacaacgccaccgcccagagcctggtgctgatcgacgagttcggcaagggcaccaacaccgtggacggcctggccctgctggccgccgtgctgagacactggctggccagaggccccacctgcccccacatcttcgtggccaccaacttcctgagcctggtgcagctgcagctgctgccccagggccccctggtgcagtacctgaccatggagacctgcgaggacggcaacgacctggtgttcttctaccaggtgtgcgagggcgtggccaaggccagccacgccagccacaccgccgcccaggccggcctgcccgacaagctggtggccagaggcaaggaggtgagcgacctgatcagaagcggcaagcccatcaagcccgtgaaggacctgctgaagaagaaccagatggagaactgccagaccctggtggacaagttcatgaagctggacctggaggaccccaacctggacctgaacgtgttcatgagccaggaggtgctgcccgccgccaccagcatcctgtag

SEQ ID NO: 248444 - DNA, 1602 bp, Artificial Sequence
  derived and/or modified sequence
atggcccagatgctgcacagactgctgggccacatcaagaacgtgcccctgatcctgaagagaatgaagctgagccacaccaaggtgagcgactggcaggtgctgtacaagaccgtgtacagcgccctgggcctgagagacgcctgcagaagcctgccccagagcatccagctgttcagagacatcgcccaggagttcagcgacgacctgcaccacatcgccagcctgatcggcaaggtggtggacttcgagggcagcctggccgagaacagattcaccgtgctgcccaacatcgaccccgagatcgacgagaagaagagaagactgatgggcctgcccagcttcctgaccgaggtggccagaaaggagctggagaacctggacagcagaatccccagctgcagcgtgatctacatccccctgatcggcttcctgctgagcatccccagactgcccagcatggtggaggccagcgacttcgagatcaacggcctggacttcatgttcctgagcgaggagaagctgcactacagaagcgccagaaccaaggagctggacgccctgctgggcgacctgcactgcgagatcagagaccaggagaccctgctgatgtaccagctgcagtgccaggtgctggccagagccgccgtgctgaccagagtgctggacctggccagcagactggacgtgctgctggccctggccagcgccgccagagactacggctacagcagacccagatacagcccccaggtgctgggcgtgagaatccagaacggcagacaccccctgatggagctgtgcgccagaaccttcgtgcccaacagcaccgagtgcggcggcgacaagggcagagtgaaggtgatcaccggccccaacagcagcggcaagagcatctacctgaagcaggtgggcctgatcaccttcatggccctggtgggcagcttcgtgcccgccgaggaggccgagatcggcgccgtggacgccatcttcaccagaatccacagctgcgagagcatcagcctgggcctgagcaccttcatgatcgacctgaaccaggtggccaaggccgtgaacaacgccaccgcccagagcctggtgctgatcgacgagttcggcaagggcaccaacaccgtggacggcctggccctgctggccgccgtgctgagacactggctggccagaggccccacctgcccccacatcttcgtggccaccaacttcctgagcctggtgcagctgcagctgctgccccagggccccctggtgcagtacctgaccatggagacctgcgaggacggcaacgacctggtgttcttctaccaggtgtgcgagggcgtggccaaggccagccacgccagccacaccgccgcccaggccggcctgcccgacaagctggtggccagaggcaaggaggtgagcgacctgatcagaagcggcaagcccatcaagcccgtgaaggacctgctgaagaagaaccagatggagaactgccagaccctggtggacaagttcatgaagctggacctggaggaccccaacctggacctgaacgtgttcatgagccaggaggtgctgcccgccgccaccagcatcctgtag

SEQ ID NO: 248445 - DNA, 471 bp, Artificial Sequence
  derived and/or modified sequence
accgcccagagcctggtgctgatcgacgagttcggcaagggcaccaacaccgtggacggcctggccctgctggccgccgtgctgagacactggctggccagaggccccacctgcccccacatcttcgtggccaccaacttcctgagcctggtgcagctgcagctgctgccccagggccccctggtgcagtacctggtgtgcgagggcgtggccaaggccagccacgccagccacaccgccgcccaggccggcctgcccgacaagctggtggccagaggcaaggaggtgagcgacctgatcagaagcggcaagcccatcaagcccgtgaaggacctgctgaagaagaaccagatggagaactgccagaccctggtggacaagttcatgaagctggacctggaggaccccaacctggacctgaacgtgttcatgagccaggaggtgctgcccgccgccaccagcatcctgtag

SEQ ID NO: 248446 - DNA, 1206 bp, Artificial Sequence
  derived and/or modified sequence
atgtggcccgtgctgctgttcgtgttcctgagccagaccgtgtacagcgccctgggcctgagagacgcctgcagaagcctgccccagagcatccagctgttcagagacatcgcccaggagttcagcgacgacctgcaccacatcgccagcctgatcggcaaggtggtggacttcgagggcagcctggccgagaacagattcaccgtgctgcccaacatcgaccccgagatcgacgagaagaagagaagactgatgggcctgcccagcttcctgaccgaggtggccagaaaggagctggagaacctggacagcagaatccccagctgcagcgtgatctacatccccctgatcggcttcctgctgagcatccccagactgcccagcatggtggaggccagcgacttcgagatcaacggcctggacttcatgttcctgagcgaggagaagctgcactacagaagcgccagaaccaaggagctggacgccctgctgggcgacctgcactgcgagatcagagaccaggagaccctgctgatgtaccagctgcagtgccaggtgctggccagagccgccgtgctgaccagagtgctggacctggccagcagactggacgtgctgctggccctggccagcgccgccagagactacggctacagcagacccagatacagcccccaggtgctgggcgtgagaatccagaacggcagacaccccctgatggagctgtgcgccagaaccttcgtgcccaacagcaccgagtgcggcggcgacaagggcagagtgaaggtgatcaccggccccaacagcagcggcaagagcatctacctgaagcaggtgggcctgatcaccttcatggccctggtgggcagcttcgtgcccgccgaggaggccgagatcggcgccgtggacgccatcttcaccagaatccacagctgcgagagcatcagcctgggcctgagcaccttcatgatcgacctgaaccaggtggccaaggccgtgaacaacgccaccgcccagagcctggtgctgatcgacgagttcggcaagggcaccaacaccgtggacggcctggccctgctggccgccgtgctgagacactggctggccagaggccccacctgcccccacatcttcgtggccaccaacttcctgagcctggtgcagctgcagctgctgccccagggccccctggtgcagtacctgtag

SEQ ID NO: 248447 - DNA, 1491 bp, Artificial Sequence
  derived and/or modified sequence
accgtgtacagcgccctgggcctgagagacgcctgcagaagcctgccccagagcatccagctgttcagagacatcgcccaggagttcagcgacgacctgcaccacatcgccagcctgatcggcaaggtggtggacttcgagggcagcctggccgagaacagattcaccgtgctgcccaacatcgaccccgagatcgacgagaagaagagaagactgatgggcctgcccagcttcctgaccgaggtggccagaaaggagctggagaacctggacagcagaatccccagctgcagcgtgatctacatccccctgatcggcttcctgctgagcatccccagactgcccagcatggtggaggccagcgacttcgagatcaacggcctggacttcatgttcctgagcgaggagaagctgcactacagaagcgccagaaccaaggagctggacgccctgctgggcgacctgcactgcgagatcagagaccaggagaccctgctgatgtaccagctgcagtgccaggtgctggccagagccgccgtgctgaccagagtgctggacctggccagcagactggacgtgctgctggccctggccagcgccgccagagactacggctacagcagacccagatacagcccccaggtgctgggcgtgagaatccagaacggcagacaccccctgatggagctgtgcgccagaaccttcgtgcccaacagcaccgagtgcggcggcgacaagggcagagtgaaggtgatcaccggccccaacagcagcggcaagagcatctacctgaagcaggtgggcctgatcaccttcatggccctggtgggcagcttcgtgcccgccgaggaggccgagatcggcgccgtggacgccatcttcaccagaatccacagctgcgagagcatcagcctgggcctgagcaccttcatgatcgacctgaaccaggtggccaaggccgtgaacaacgccaccgcccagagcctggtgctgatcgacgagttcggcaagggcaccaacaccgtggacggcctggccctgctggccgccgtgctgagacactggctggccagaggccccacctgcccccacatcttcgtggccaccaacttcctgagcctggtgcagctgcagctgctgccccagggccccctggtgcagtacctgaccatggagacctgcgaggacggcaacgacctggtgttcttctaccaggtgtgcgagggcgtggccaaggccagccacgccagccacaccgccgcccaggccggcctgcccgacaagctggtggccagaggcaaggaggtgagcgacctgatcagaagcggcaagcccatcaagcccgtgaaggacctgctgaagaagaaccagatggagaactgccagaccctggtggacaagttcatgaagctggacctggaggaccccaacctggacctgaacgtgttcatgagccaggaggtgctgcccgccgccaccagcatcctgtag

SEQ ID NO: 248448 - DNA, 2184 bp, Artificial Sequence
  derived and/or modified sequence
atggccagcctgggcgccaaccccagaagaaccccccagggccccagacccggcgccgccagcagcggcttccccagccccgcccccgtgcccggccccagagaggccgaggaggaggaggtggaggaggaggaggagctggccgagatccacctgtgcgtgctgtggaacagcggctacctgggcatcgcctactacgacaccagcgacagcaccatccacttcatgcccgacgcccccgaccacgagagcctgaagctgctgcagagagtgctggacgagatcaacccccagagcgtggtgaccagcgccaagcaggacgagaacatgaccagattcctgggcaagctggccagccaggagcacagagagcccaagagacccgagatcatcttcctgcccagcgtggacttcggcctggagatcagcaagcagagactgctgagcggcaactacagcttcatccccgacgccatgaccgccaccgagaagatcctgttcctgagcagcatcatccccttcgactgcctgctgaccgtgagagccctgggcggcctgctgaagttcctgggcagaagaagaatcggcgtggagctggaggactacaacgtgagcgtgcccatcctgggcttcaagaagttcatgctgacccacctggtgaacatcgaccaggacacctacagcgtgctgcagatcttcaagagcgagagccaccccagcgtgtacaaggtggccagcggcctgaaggagggcctgagcctgttcggcatcctgaacagatgccactgcaagtggggcgagaagctgctgagactgtggttcaccagacccacccacgacctgggcgagctgagcagcagactggacgtgatccagttcttcctgctgccccagaacctggacatggcccagatgctgcacagactgctgggccacatcaagaacgtgcccctgatcctgaagagaatgaagctgagccacaccaaggtgagcgactggcaggtgctgtacaagaccgtgtacagcgccctgggcctgagagacgcctgcagaagcctgccccagagcatccagctgttcagagacatcgcccaggagttcagcgacgacctgcaccacatcgccagcctgatcggcaaggtggtggacttcgagggcagcctggccgagaacagattcaccgtgctgcccaacatcgaccccgagatcgacgagaagaagagaagactgatgggcctgcccagcttcctgaccgaggtggccagaaaggagctggagaacctggacagcagaatccccagctgcagcgtgatctacatccccctgatcggcttcctgctgagcatccccagactgcccagcatggtggaggccagcgacttcgagatcaacggcctggacttcatgttcctgagcgaggagaagctgcactacagaagcgccagaaccaaggagctggacgccctgctgggcgacctgcactgcgagatcagagaccaggagaccctgctgatgtaccagctgcagtgccaggtgctggccagagccgccgtgctgaccagagtgctggacctggccagcagactggacgtgctgctggccctggccagcgccgccagagactacggctacagcagacccagatacagcccccaggtgctgggcgtgagaatccagaacggcagacaccccctgatggagctgtgcgccagaaccttcgtgcccaacagcaccgagtgcggcggcgacaagggcagagtgaaggtgatcaccggccccaacagcagcggcaagagcatctacctgaagcaggtgggcctgatcaccttcatggccctggtgggcagcttcgtgcccgccgaggaggccgagatcggcgccgtggacgccatcttcaccagaatccacagctgcgagagcatcagcctgggcctgagcaccttcatgatcgacctgaaccaggtggccaaggccgtgaacaacgccaccgcccagagcctggtgctgatcgacgagttcggcaagggcaccaacaccgtggacggcctggccctgctggccgccgtgctgagacactggctggccagaggccccacctgcccccacatcttcgtggccaccaacttcctgagcctggtgcagctgcagctgctgccccagggccccctggtgcagtacctgtag

SEQ ID NO: 248449 - DNA, 408 bp, Artificial Sequence
  derived and/or modified sequence
ggctacagcagacccagatacagcccccaggtgctgggcgtgagaatccagaacggcagacaccccctgatggagctgtgcgccagaaccttcgtgcccaacagcaccgagtgcggcggcgacaagggcagagtgaaggtgatcaccggccccaacagcagcggcaagagcatctacctgaagcaggtggccaaggccgtgaacaacgccaccgcccagagcctggtgctgatcgacgagttcggcaagggcaccaacaccgtggacggcctggccctgctggccgccgtgctgagacactggctggccagaggccccacctgcccccacatcttcgtggccaccaacttcctgagcctggtgcagctgcagctgctgccccagggccccctggtgcagtacctgtag

SEQ ID NO: 248450 - DNA, 792 bp, Artificial Sequence
  derived and/or modified sequence
cactacagaagcgccagaaccaaggagctggacgccctgctgggcgacctgcactgcgagatcagagaccaggagaccctgctgatgtaccagctgcagtgccaggtgctggccagagccgccgtgctgaccagagtgctggacctggccagcagactggacgtgctgctggccctggccagcgccgccagagactacggctacagcagacccagatacagcccccaggtgctgggcgtgagaatccagaacggcagacaccccctgatggagctgtgcgccagaaccttcgtgcccaacagcaccgagtgcggcggcgacaagggcagagtgaaggtgatcaccggccccaacagcagcggcaagagcatctacctgaagcaggtgggcctgatcaccttcatggccctggtgggcagcttcgtgcccgccgaggaggccgagatcggcgccgtggacgccatcttcaccagaatccacagctgcgagagcatcagcctgggcctgagcaccttcatgatcgacctgaaccaggtggccaaggccgtgaacaacgccaccgcccagagcctggtgctgatcgacgagttcggcaagggcaccaacaccgtggacggcctggccctgctggccgccgtgctgagacactggctggccagaggccccacctgcccccacatcttcgtggccaccaacttcctgagcctggtgcagctgcagctgctgccccagggccccctggtgcagtacctggactggcccagagtgagcggccaggagggcggcgactag

SEQ ID NO: 248451 - DNA, 471 bp, Artificial Sequence
  derived and/or modified sequence
acagcccagtcattagtgcttattgatgaatttggcaaggggaccaatacagtggatgggctcgcactgcttgcagctgtgcttcgacattggctcgcgagggggcccacgtgcccacacatttttgtcgcaacaaactttctcagtctcgtacagcttcaattattgcctcaggggccgctggtccagtacttggtttgcgaaggggtagccaaggcaagtcacgcatctcacacagctgctcaagccgggctccctgacaagctggttgccaggggcaaggaggtgtccgatttgatccgctcagggaagcccattaaacccgttaaggatctgctgaaaaagaaccaaatggaaaattgtcaaaccctggtagataagttcatgaaattggatttggaagatcccaatctggacctgaacgttttcatgtctcaagaagtcctgcccgcagctacatctatcctctag

SEQ ID NO: 248452 - DNA, 1206 bp, Artificial Sequence
  derived and/or modified sequence
atgtggccagttctgctcttcgtcttcctttcacagacagtgtatagcgcacttggactacgggacgcctgtcgctctttgccacagtccattcagttgttccgagacatagcccaagaattcagtgatgacttacaccatattgcaagcttaatcggaaaggtggttgacttcgaagggtccctggccgagaacaggtttaccgttctgcccaatattgaccctgaaatcgacgaaaaaaagcgacggctcatgggcctccccagctttctcactgaggtagcacgaaaggaactcgagaacctggactcacggatcccttcgtgtagcgtcatctacattccactcatcggattcctcctctccattcctagactgccctcaatggtggaggcatctgactttgagataaacggcctggatttcatgttcctgtcagaggagaagctgcattacagatcggcgaggaccaaagagctcgacgccttgctgggagatttacactgtgaaattagggatcaggaaacactcttgatgtatcaacttcagtgccaagtgctcgctagagccgctgtactgacaagagtgttggatctggcctcaaggctcgatgtactgctcgcactggcctcagcagccagggactacggatacagcagaccgcggtactcccctcaggtgctaggtgttcgaatccagaatggcagacaccctctcatggagctgtgtgccagaactttcgttcctaattccacggagtgcgggggagacaaaggccgcgtgaaggtcatcaccggacctaactccagcggcaagtccatctacctgaaacaggtgggcctgattacatttatggctctcgtagggtcttttgtaccagcagaggaagctgagatcggggcagtagatgctattttcacccgcatccattcctgcgagagtattagcctcggtctaagtaccttcatgatcgacctgaatcaggtggctaaagcagtgaacaacgctacagcccagagccttgtcctgatcgatgaattcggaaaaggtactaacactgtggatgggttagccctgctcgcagcagtgctacgacactggctggcaaggggcccaacctgcccccatatattcgtcgccacaaattttttgtccctggtgcagctgcagctgttgccacagggcccactggtccaatatctgtag

SEQ ID NO: 248453 - DNA, 1491 bp, Artificial Sequence
  derived and/or modified sequence
accgtgtactctgcgctgggcctgcgcgacgcatgcagatcacttccccaatctatccagctcttccgagatattgctcaagagtttagtgacgaccttcaccacatcgcctccctgattggcaaggtggtggattttgagggctcactagctgaaaaccgatttactgtcctccctaatattgaccccgagattgatgagaagaaacggaggctgatgggacttccatcctttctgacagaagtggccagaaaggagctggaaaacctggatagtaggataccgtcctgtagcgtgatctacatcccactgatagggttcttgctgagtattccgaggttgcctagcatggtggaggccagtgacttcgaaattaacgggctcgacttcatgttcctctctgaggaaaaactgcactatcggtccgcccgcaccaaagagttggatgccctgctgggagatctgcactgtgagatccgggaccaagagactctcttaatgtaccagctgcagtgtcaggtgctggctcgggcagcagttctgaccagggtgctcgatttggcctcacgactcgatgttctcctcgctttagcttctgctgcaagggactatggatactcacgtcctcgatattcaccacaagtgctgggagttagaatccagaacggtaggcaccctttgatggagctttgtgcccggactttcgtgcccaacagcaccgaatgcggcggggataagggccgggtgaaagtgataacgggcccaaattcctccggaaagtctatatacctcaagcaggtcggactgatcactttcatggctctggtcggctcctttgtacctgccgaagaagccgaaatcggcgcagtggacgcgatattcaccagaattcactcttgcgaatccatctctttgggactgagcaccttcatgatcgatttgaaccaagttgccaaagcagtcaataacgccaccgcacagtccctcgtgttaatcgacgagttcggaaagggaaccaatactgtggacgggttagccttgctggccgccgtcctcagacactggttagcgcgaggacccacctgccctcatatcttcgttgccaccaactttctgtctttggtgcagctgcagctcctgccccagggaccactagtgcagtatctgacgatggagacctgcgaagatgggaacgatctagtttttttttaccaggtctgcgagggagtcgcaaaagcaagtcatgcaagccacactgccgcacaggccggtctcccagataaactggtggcaagaggaaaggaagttagcgacctgatccgctcagggaaacccatcaaacctgtgaaggacttactgaagaaaaaccaaatggagaactgtcagaccttggtggataagtttatgaagctcgatcttgaagaccctaatcttgatctcaatgtgttcatgagccaggaggttctgcctgccgctacatccatactctag

SEQ ID NO: 248454 - DNA, 585 bp, Artificial Sequence
  derived and/or modified sequence
atggcctccctgggcgccaacccacgcaggacgccccagggtccacgaccaggagcggcttccagtggctttccctctcctgctccagtcccggggcctcgcgaggccgaggaagaagaggtcgaggaggaagaggagttggctgagattcatctttgcgttctgtggaacagcggatacctggggatagcatattatgataccagtgactccacgattcatttcatgccagacgcccccgatcatgaaagtctgaaactgttacagcgagttctcgacgaaatcaacccccagtcagttgtcacatccgccaaacaggacgaaaacatgacccgtttcctaggaaaactggccagtcaggagcaccgggagcctaagaggcccgagattattttcttaccaagtgttgattttggactggagatttcaaaacagcgactgctcagcggtaactacagctttatcccagatgcaatgacagctaccgaaaagatcttatttctgtccagcattatccctttcgattgcctgttgactgtgcgggccttgggtgggttgctgaagtttttaggacggcggagatag

SEQ ID NO: 248455 - DNA, 1002 bp, Artificial Sequence
  derived and/or modified sequence
aaaatcttgtttctgtcctctatcattccttttgattgcctgcttacagtacgggcactcggcggtcttctaaagtttctgggccgacgacgcatcggagttgagttagaggactataacgtgtcggtacccattttgggatttaaaaaattcatgctgacgcacctggtcaatattgaccaagacacctactctgtgctccaaatctttaaaagcgagtctcatccatcagtgtacaaagtagcatctggccttaaagaaggtttatctctgttcggaatcctgaacaggtgccactgcaagtggggcgagaagttgcttaggctgtggtttaccagaccaacccacgatttaggcgaactgtcgtcaagattggacgtaatccagttcttcctgctaccacaaaacttggacatggcccagatgctgcaccgcctcctgggacacatcaagaacgtgcctctaattctcaagcggatgaagttaagccacacaaaggtcagcgactggcaggtgctatacaaaaccgtatacagtgcgttaggactgcgggacgcttgccgaagtcttccccagagtatccagttgttcagggatatcgcccaagagtttagcgacgacctgcaccacattgccagccttattggcaaagtttatttgtccccccaggtggattttgaggggtccctggcagaaaaccgttttacagtacttcccaatatcgacccggaaattgatgaaaagaagagaagactaatgggtctgccatcttttttgaccgaggtggcacggaaggagctcgaaaacctcgactcacgcatcccttcctgtagcgtaatatatatccctctgattggtttcttgctgtcaattccacgactcccttctatggtagaggcttctgatttcgagattaacggtctggacttcatgttcctgtcagaggaaaaattacactataggtcggcaagaactaaagagctggacgctctcctcggttag

SEQ ID NO: 248456 - DNA, 471 bp, Artificial Sequence
  derived and/or modified sequence
acagcccagtctctggtcttgatcgatgagttcggtaaggggacaaatactgttgacggtctggccctcctggcagcagttttacgtcactggctggcaagaggaccgacttgtcctcacatctttgtggcgacaaacttcctgagcttggtgcagttgcagttgctgcctcagggaccacttgttcagtacctggtgtgcgagggcgtagcaaaagccagccatgcttcccacacagctgcccaggcaggcttgcccgacaagctggtagcccgaggtaaagaagtctccgacctcatccggagcgggaagcctataaagcccgttaaggatctattaaaaaagaaccagatggaaaattgccagactctggtggacaaatttatgaagctggacctcgaagaccctaacctagatctgaatgtgtttatgagccaagaagtattgccggcagcgacctcaattttgtag

SEQ ID NO: 248457 - DNA, 2184 bp, Artificial Sequence
  derived and/or modified sequence
atggccagcttgggagcaaatcctaggcgcacaccacaggggcctcgccccggagctgcctcgagcggctttcctagccctgccccagtacccgggccccgagaagccgaagaagaagaagtagaagaggaggaggaacttgcagaaattcatctttgcgtgctgtggaattcaggctatctcggaattgcatactacgatacttctgatagtaccatacacttcatgccagacgcaccagaccatgagagtctcaagttactccaacgagttctggatgagatcaatcctcagtcagtggtgaccagcgcgaagcaggacgaaaatatgactagatttctgggcaagctggcgagccaggagcacagagagccaaagcgtcctgagattatcttcctcccatctgttgacttcggacttgagatctccaaacaaagactgttaagcggaaactattctttcatacccgatgccatgaccgctaccgagaagatactgtttctctcctctatcattcctttcgactgcctcttgaccgttagagccctggggggtcttctcaaatttctcggacggcggcggattggggttgaattagaggattacaacgtgtcggtacctattcttggattcaagaaatttatgctgacacatttagtaaacattgatcaggacacatacagtgtcttgcagatttttaaaagtgagtcccacccatctgtttacaaagtggctagtggcctaaaagaaggtctctctttgttcggaattctcaatcgctgccattgtaaatggggtgagaagttgctgcggctgtggttcacaaggcccacacatgacctcggcgaactgagctcccgcctggatgtgatacagttttttctgctccctcaaaatttggacatggcacagatgctgcacagactcctcggacacattaaaaacgtgcctctgattctcaaacgaatgaagctgtcccatactaaggtgagcgattggcaggtactgtacaaaacagtgtacagcgctctcgggctccgggatgcttgtaggtccctgccacagtctatccagttgtttcgcgatattgctcaggaatttagtgatgacctccaccatatagcaagtctcattggcaaagttgttgatttcgaaggaagtctggcagagaaccgcttcactgtcctgcccaacatagacccagaaatagacgaaaagaaacggaggctcatgggactgccaagttttctcaccgaggtcgcccgcaaagaactcgagaacttagatagtagaatcccctcctgctccgttatatatatacctttaataggcttcttgttgtccatacccagactgcctagcatggtggaagccagcgattttgagattaatggcctagatttcatgttcctttccgaagagaagctgcattatcgcagcgctagaacaaaagagctggacgccctgttgggcgacctgcactgcgagatacgcgaccaggagacgctgctgatgtaccaacttcagtgtcaggtgctggctcgtgccgcggtcctgacgcgggttttggatctagcttcaagactggatgtgctgctggccctagcaagtgccgcccgcgattacggatacagcaggccacgatactcccctcaagttttgggggtgaggatacaaaatggtcgccatccacttatggaactgtgtgctcgtaccttcgtaccaaactcaaccgagtgcggcggggacaaagggcgcgtgaaggtgattaccgggcccaattccagtggtaaatccatttacctgaaacaagtaggcttgatcacctttatggcgctcgtgggcagttttgtgcccgccgaggaggctgagattggagccgtcgacgcgatttttacgcgaatccactcttgcgaaagcattagcctgggtctgagcacattcatgatcgaccttaaccaagtggcaaaggcggtaaacaacgccaccgcccagtcactggtgctcatagatgagttcggcaagggaaccaacactgtggacggcctggcgctcctggccgccgtactccggcactggctggctcgcgggcccacctgcccccatatctttgtggcaacgaattttttatccctcgtgcaattgcaactgctcccccagggcccactcgtccagtacctctag

SEQ ID NO: 248458 - DNA, 1527 bp, Artificial Sequence
  derived and/or modified sequence
atgtggcctgttctcctttttgtgtttttaagccagacagtgtactccgcgctcggcctgagagacgcatgccgcagcctgccccagagcatccagctttttagggacatcgcccaggagtttagcgatgatctgcatcatatcgcgtcactaattggcaaggtcgttgattttgagggatcactcgccgagaaccggttcacagtcctgcctaatattgacccagaaatcgatgaaaaaaaacggaggctgatgggcttgccgtcgtttttgaccgaagttgctcgtaaagaactcgagaaccttgatagtagaattccatcctgctctgtgatttacatacccctgatcggcttcctgctatcgatccccaggctcccaagcatggtcgaagcctcggattttgagattaatggcctcgacttcatgtttctcagtgaggaaaaactccattaccgcagtgccagaacgaaggaacttgatgcgctgctgggtgacctacactgcgagatacgcgaccaagagacgttattgatgtatcagttgcagtgccaagtgctcgctagagcagcagtactgacccgagtgctggacctggcctcccggctggacgtactcctggctctcgcgagcgctgcccgggactatggctactctcgccccaggtattctccccaggtgctaggtgttcggatccaaaatggccgtcaccctcttatggagctgtgcgcgagaacattcgtgccgaacagtacagagtgcggcggggataagggcagggtgaaggtaatcacaggtcccaactctagcggcaaatccatttacctgaaacaggtcggtctgatcactttcatggcactggtaggctcgttcgtcccggctgaggaagccgagatcggcgcagtcgatgccatcttcacccggattcactcctgcgagtcaatctccctggggctgtctaccttcatgattgatcttaaccaggtggcaaaggcagtcaataatgccacagcccagagcctggttctgattgacgaattcggtaagggaacaaacaccgtggatggcctcgcactgctggctgcagtgctacggcattggctcgccagaggtcctacgtgtccacacatcttcgtcgccacaaatttccttagtcttgtgcaactgcagctgcttccgcagggtcccctcgtgcagtatctgacaatggaaacatgtgaggacggaaacgatctggtgtttttctaccaggtttgtgaaggagtggccaaagcctcccatgcttcacatacagctgcccaggcgggtctaccagataaactagtggcgcggggcaaagaggtgtcagaccttattagaagtggaaaacctatcaaacctgtgaaagacctgctcaaaaagaaccagatggaaaactgccaaacgcttgtcgacaagttcatgaagcttgaccttgaggatccaaacctggacttgaatgtcttcatgtcccaagaggttctcccggcagccacatctatcctgtag

SEQ ID NO: 248459 - DNA, 408 bp, Artificial Sequence
  derived and/or modified sequence
ggctattctcgaccccggtatagtccacaggttctgggggtgcgcatccagaatggaagacatcctttgatggagctgtgcgcacgtacgttcgtgcctaattctacagaatgcggaggcgacaagggccgcgttaaggtgattaccggccccaacagttccggaaagtcgatatacctgaaacaggtggccaaggccgtgaataacgcaaccgcacagtctctggtgctgatagacgaatttggtaagggcacaaatacagtagacggtttggcactccttgctgcggtcttacgccactggctcgcacgcgggccaacatgccctcacattttcgtggctacaaattttcttagcctggtgcagctccagctgctaccccagggcccactggtgcagtatttgtag

SEQ ID NO: 248460 - DNA, 585 bp, Artificial Sequence
  derived and/or modified sequence
atggcctccctgggtgcaaatccccgcaggactccacaaggtcccaggcccggagcagcgagctcaggctttccatcccccgcccctgtaccaggacccagagaggccgaggaggaggaagtggaggaagaggaagagctggcagaaattcacctatgtgtgctttggaacagcggttatctggggatcgcttattatgatacaagtgacagtactattcactttatgcccgatgctccagatcatgagagcttgaagctgctgcagcgggtgttagacgagataaacccacaaagtgtggtgactagtgcgaagcaggacgaaaacatgacccgtttcctggggaagctcgcttcccaggagcacagggaacccaaaagaccagaaattatcttcctgccctccgtagatttcgggttggagatctctaagcagcggttactgtctggcaattactctttcatacccgacgccatgacagccacagaaaagattttatttctcagctccatcattccatttgattgcctacttaccgtgcgcgctctcgggggactgctcaaattcctggggcgcagacgttag

SEQ ID NO: 248461 - DNA, 1491 bp, Artificial Sequence
  derived and/or modified sequence
actgtgtactccgccctcggtctccgcgacgcgtgtcgatccctgccccagagcatccagctgttccgggatattgcacaggaattctctgacgatttacaccacattgcatcactgatcggcaaagtggtggactttgaagggtccctggccgaaaataggttcactgtcctccctaatattgatcccgaaatagatgaaaaaaagaggagattgatgggactaccatccttcctgaccgaagtagctagaaaggaactggagaacctcgacagccgaattcctagttgctcagtgatctatatcccacttatcgggttcttactatccattcccagactgccctctatggtggaggcgagcgactttgaaattaatggcttggattttatgttcctttccgaggaaaagctgcactataggtccgcccgtactaaggagcttgacgccctgctgggggacctgcattgtgaaatccgagaccaggaaaccctgttgatgtaccaactgcagtgtcaggtacttgctagagctgctgtgctcacacgggttcttgatttagctagcagactggacgtcctgcttgcccttgcctctgcggcaagagactatggatactccagacctagatactcaccccaggtgctcggcgtgcgaatccagaacggtaggcaccccctcatggaactctgtgcgaggacattcgtccctaacagcactgagtgcgggggggataaagggcgggttaaagtgataaccggccctaattcttccgggaaaagcatatatcttaagcaggtaggtttgataacttttatggccctcgtggggtcatttgtcccagcggaagaggccgagatcggcgccgttgacgctatctttacaaggatccatagttgtgaatctattagcctcggtctctcaacttttatgatagatctgaatcaggtcgccaaagcagtgaacaatgcaactgcgcagtctctggtgctgatagacgagttcggcaaaggtactaatactgttgacgggctcgctctgctcgctgctgtgctccgccattggctcgcacggggtccaacttgtccacatatttttgtcgcaactaatttcttatcactggttcagctgcaactccttccacagggccccctggtccagtacctaactatggaaacgtgcgaggatggaaatgatctggttttcttctaccaagtgtgcgaaggcgtggcaaaagccagccatgcctcacatacagctgctcaagctggcctgcccgacaaactggtagcccgcgggaaagaggtctccgacttaatcaggagcggcaaaccaatcaagcctgttaaagatcttcttaagaaaaaccagatggagaactgtcaaacgctcgtagataagttcatgaaattggatctcgaggaccccaatctagacctcaacgtgtttatgtctcaggaagtgttacctgctgcaacctccatactttag

SEQ ID NO: 248462 - DNA, 2184 bp, Artificial Sequence
  derived and/or modified sequence
atggccagtctcggtgcgaatcccaggcgcacaccacagggaccaaggcccggcgccgcctcaagcggtttcccaagcccagcccctgtgcctggaccgagagaggctgaagaagaggaggtggaggaggaggaagagttagccgagatccacctctgcgtgctgtggaactctgggtacttggggatcgcttattacgacacatccgattccacaatccactttatgccagatgcccctgatcacgagtcactgaaactgcttcagagagtgttggacgaaattaacccacagtctgttgtaaccagcgccaagcaggatgaaaacatgactagattccttggaaagctagccagtcaggaacaccgggagccaaagagacccgaaattattttccttcccagcgtggacttcggcctggagattagcaaacaacgcctgctttctgggaattactcattcattccagatgctatgactgccaccgagaaaattctgttcctgtcatctattattcccttcgactgccttctgaccgtgagggccctgggcggactgctcaagtttctcggccgccgcaggatcggtgttgagctcgaggattacaatgttagtgtgcccatcctggggttcaaaaagtttatgctcacacacctggtgaatatcgaccaagatacctattctgtgctgcaaatttttaagtccgaatcccacccttccgtctataaagtggccagtgggctgaaggagggactgagtcttttcgggattttaaaccgctgtcattgcaagtggggagaaaagttgttgcgtctttggttcacacggcccacccacgaccttggggagctcagcagtagactggacgtaatccagttttttctgcttccccagaatttggacatggcccagatgttgcataggttgctgggccacattaagaacgtgcccttaatccttaaaaggatgaagctctcacacaccaaagtgagtgattggcaagtcctttacaagacagtttactccgcgctgggccttagggacgcatgcagaagcctgccgcagtccatccagctgtttagggatattgcccaggaattcagcgacgatctccaccatatcgctagccttataggtaaggtggtcgacttcgaaggttcccttgccgaaaatcgctttaccgtcctgccaaacatagatccagaaatcgatgaaaagaaacgtaggctgatgggtctcccaagttttctcactgaggtcgccaggaaggaattggaaaatcttgacagtagaatcccttcctgctctgttatctacatccctctcattggattcttactgtccattccccgtttgccttcgatggtggaggcttccgacttcgagatcaacggcctcgacttcatgtttcttagcgaagagaagctccattaccgctccgctcgaactaaggagttggatgctcttttgggcgatctgcactgcgagattcgcgaccaagagacattgttaatgtaccaactgcaatgccaggtgctcgccagagccgcagttctcacaagagtgctcgatttagctagcaggcttgacgtgctccttgcccttgccagcgcggcccgggattatggctattcgcggcccagatattctccccaagttctcggggtgcgcattcagaacgggaggcaccctctcatggagttgtgtgccaggacgtttgttccaaatagtacagagtgcggaggcgacaaaggcagagtcaaagtgatcacaggccctaattccagcggtaagtccatctacctgaaacaggtggggctgattaccttcatggccttggtgggcagtttcgtacctgcggaagaagccgaaataggagccgttgatgctattttcactcggatacactcatgtgaaagtatctctctgggtctgagcacttttatgatcgacttgaaccaggtggctaaagcagttaataatgctacggctcagtcactcgtgcttattgacgaattcggtaaagggaccaacactgtggatggcctggctctgctggctgccgtcctcagacactggctcgcgcggggccctacttgtccccacatttttgtggctaccaattttctctcgttggtacagctccagctcttgccccagggcccgctcgttcagtatctctag

SEQ ID NO: 248463 - DNA, 765 bp, Artificial Sequence
  derived and/or modified sequence
atggccagtcttggcgctaacccccgcagaacccctcagggaccgcgccctggcgctgcatctagtggctttccctcacctgctcccgtgcctggaccaagggaggcagaggaagaagaagtggaggaggaggaagaactcgccgagatccatctttgtgtgctctggaattcaggatacctggggatcgcatactacgacaccagtgatagtacaatccacttcatgcccgacgctccagaccatgaatccctcaagctgctgcagcgcgtattggatgaaatcaatccacagagcgtggtgaccagcgccaaacaggacgagaacatgacacggtttctgggtaagctcgcaagtcaagaacatagagaaccaaagcgacccgagatcattttcttgccatcagtggattttgggctggagattagcaagcagaggttgttgtccggcaactactcattcataccagatgcgatgactgcgactgaaaagatcctgtttctctcttcaattatcccctttgattgtctgctgacggtgagagcgttgggcggcctgttaaagttcctaggccgtcgcagaatcggcgttgagcttgaggactacaacgtgtccgttcccattctgggctttaagaagttcatgctcactcatctcgtgaacattgatcaggacacgtatcgcttagaatgcaatggtgcgatttccgcacaatgcaatctctgcttgctcggcagcagcgactcacccgcatctgcctcctag

SEQ ID NO: 248464 - DNA, 792 bp, Artificial Sequence
  derived and/or modified sequence
cactatcgttcagcacggaccaaggaactggacgccttacttggcgacctgcactgtgaaatcagagaccaagagacactccttatgtatcagctgcagtgtcaggtactagcacgcgcagcggtcctcacgcgcgtccttgaccttgcttcccgtctggacgtgctcctggcccttgcctctgctgcccgcgactacggatactctcgaccccgatattccccacaggtgttaggggtgcggatccaaaacggccggcaccccttgatggaactttgtgctagaactttcgtcccaaattctactgaatgcggaggcgacaagggacgggttaaggtaatcacaggcccaaattccagcgggaaatctatttatctgaagcaggtgggactgatcaccttcatggccctagtggggtcctttgtgccagcggaagaggcagaaatcggcgcggtggatgcgatatttacaaggattcactcttgcgaatccatttccttggggctctccacattcatgattgacctgaatcaagtggcgaaggccgttaataacgctactgcccagtctttagtcttaatcgacgagtttggcaagggtaccaacacagttgacgggctcgctctcttagcagccgtccttaggcactggctggcgcgaggtcccacttgtccacacattttcgtggcaaccaatttcctgagccttgtccaactccaactgctgccccaaggccctcttgtacagtacctcgactggccaagggtgtctggacaagagggcggtgactag

SEQ ID NO: 248465 - DNA, 816 bp, Artificial Sequence
  derived and/or modified sequence
atgttcctaagcgaagagaagcttcattacagatctgcacgtactaaagaactagatgccctgttgggggacctgcactgcgagatccgggatcaagagacgctcctcatgtatcagctccagtgccaggtgctggcccgggccgctgtgctcacacgcgttctggatctggccagccgtctggatgtgcttcttgccctcgcgagtgcagcacgggactatgggtattctaggccacgctactcccctcaggtcttaggcgtgaggatccagaacggacgccaccccctcatggaactgtgtgcccgcacctttgtaccgaattcgacagaatgcggcggagataaggggcgcgtgaaagtgattacaggccctaacagtagcgggaagagtatctacctgaagcaggtgggactgattaccttcatggcccttgtcggctccttcgtcccagctgaggaagctgagatcggggctgtcgacgctattttcactcgaattcactcttgcgaatccatttctctcggactgtcaacttttatgatcgacctcaatcaggtggcgaaggctgttaataacgccaccgctcagagcttagttctgatagatgagttcggtaagggcactaacactgtcgatggactggcactccttgctgcggtgctgcggcactggttggctaggggaccaacctgtccccacattttcgtcgcaactaacttcttatccctggtccagctccagctgctgcctcagggacctcttgtacaatatctggattggcctagagtaagcggccaagaaggaggcgattag

SEQ ID NO: 248466 - DNA, 1206 bp, Artificial Sequence
  derived and/or modified sequence
atgtggcctgtgctgctgtttgtgttcctgagccagacagtgtacagcgccctgggcctgagagatgcctgccgcagcctgccccagagcatccagctgttccgggacatcgcccaggagttcagtgatgacctgcaccacatcgccagcctcatcggcaaggtggtggactttgagggcagcctggccgagaaccgcttcaccgtgctgcccaacattgatcctgagattgatgagaagaagaggcggctgatgggcctgcccagcttcctgacagaggtggccaggaaggagctggagaacctggacagccgcatccccagctgcagcgtcatctacatccccctgattggcttcctgctgagcatcccccggctgcccagcatggtggaggccagtgactttgagatcaatggcctggacttcatgttcctgtctgaggagaagctgcactaccgcagcgcccggaccaaggagctggatgccctgctgggggacctgcactgtgagatccgggaccaggagaccctgctgatgtaccagctgcagtgccaggtgctggcccgggctgctgtgctgaccagggtgctggacctggccagccggctggatgtgctgctggccctggccagcgctgcccgggactatggctacagccggccccgctacagcccccaggtgctgggcgtgcgcatccagaatggccgccaccccctgatggagctgtgtgcccggacctttgtgcccaacagcacagaatgtggcggggacaagggccgggtgaaggtgatcaccggccccaacagcagcggcaagagcatctacctgaagcaggtgggcctcatcaccttcatggccctggtgggcagctttgtgcctgctgaggaggccgagattggagctgtggatgccatcttcacccgcatccacagctgtgagagcatcagcctgggcctgagcaccttcatgattgacctgaaccaggtggccaaggctgtgaacaatgccacagcccagagcctggtgctgattgatgaatttgggaagggcaccaacacagtggatggcctggccctgctggccgctgtgctgcggcactggctggcccggggccccacctgcccccacatctttgtggccaccaacttcctgagcctggtgcagctgcagctgctgccccagggccccctggtgcagtacctgtag

SEQ ID NO: 248467 - DNA, 1491 bp, Artificial Sequence
  derived and/or modified sequence
actgtgtacagcgccctgggcctgagagatgcctgccgcagcctgccccagagcatccagctgttccgggacatcgcccaggagttcagtgatgacctgcaccacatcgccagcctcatcggcaaggtggtggactttgagggcagcctggccgagaaccgcttcaccgtgctgcccaacattgatcctgagattgatgagaagaagaggcggctgatgggcctgcccagcttcctgacagaggtggccaggaaggagctggagaacctggacagccgcatccccagctgcagcgtcatctacatccccctgattggcttcctgctgagcatcccccggctgcccagcatggtggaggccagtgactttgagatcaatggcctggacttcatgttcctgtctgaggagaagctgcactaccgcagcgcccggaccaaggagctggatgccctgctgggggacctgcactgtgagatccgggaccaggagaccctgctgatgtaccagctgcagtgccaggtgctggcccgggctgctgtgctgaccagggtgctggacctggccagccggctggatgtgctgctggccctggccagcgctgcccgggactatggctacagccggccccgctacagcccccaggtgctgggcgtgcgcatccagaatggccgccaccccctgatggagctgtgtgcccggacctttgtgcccaacagcacagaatgtggcggggacaagggccgggtgaaggtgatcaccggccccaacagcagcggcaagagcatctacctgaagcaggtgggcctcatcaccttcatggccctggtgggcagctttgtgcctgctgaggaggccgagattggagctgtggatgccatcttcacccgcatccacagctgtgagagcatcagcctgggcctgagcaccttcatgattgacctgaaccaggtggccaaggctgtgaacaatgccacagcccagagcctggtgctgattgatgaatttgggaagggcaccaacacagtggatggcctggccctgctggccgctgtgctgcggcactggctggcccggggccccacctgcccccacatctttgtggccaccaacttcctgagcctggtgcagctgcagctgctgccccagggccccctggtgcagtacctgaccatggagacctgtgaagatggaaatgacctggtgttcttctaccaggtgtgtgaaggagtggccaaggccagccacgccagccacacagctgcccaggccggcctgcctgacaagctggtggcccggggcaaggaggtgtctgacctgatccgcagcggcaagcccatcaagcctgtgaaggacctgctgaagaagaaccagatggagaactgccagaccctggtggacaagttcatgaagctggacctggaggaccccaacctggacctgaatgtgttcatgagccaggaggtgctgcctgctgccaccagcatcctgtag

SEQ ID NO: 248468 - DNA, 2184 bp, Artificial Sequence
  derived and/or modified sequence
atggccagcctgggcgccaaccccaggaggaccccccagggccccaggcctggagctgccagcagcggcttccccagccctgcccctgtgcccggcccccgggaggccgaggaggaggaggtggaggaggaggaggagctggccgagatccacctgtgtgtgctgtggaacagcggctacctgggcatcgcctactatgacaccagtgacagcaccatccacttcatgccagatgccccagaccacgagagcctgaagctgctgcagagggtgctggatgagatcaacccccagagcgtggtgaccagcgccaagcaggatgagaacatgacccgcttcctgggcaagctggccagccaggagcaccgggagcccaagaggcctgagatcatcttcctgcccagcgtggactttggcctggagatcagcaagcagaggctgctgagcggcaactacagcttcatcccagatgccatgacagccacagagaagatcctcttcctgagcagcatcatcccctttgactgcctgctgactgtgcgggccctgggcggcctgctgaagttcctgggcagaagaagaattggagtggagctggaggactacaacgtgtctgtgcccatcctgggcttcaagaagttcatgctgacccacctggtgaacatcgaccaggacacctacagcgtgctgcagatcttcaagtctgagagccaccccagcgtgtacaaggtggccagcggcctgaaggagggcctgagcctgtttggcatcctgaaccgctgccactgcaagtggggcgagaagctgctgcggctgtggttcacccggcccacccatgacctgggggagctgagcagccggctggatgtgatccagttcttcctgctgccccagaacctggacatggcccagatgctgcaccggctgctgggccacatcaagaatgtgcccctcatcctgaagaggatgaagctgagccacaccaaggtgtctgactggcaggtgctgtacaagacagtgtacagcgccctgggcctgagagatgcctgccgcagcctgccccagagcatccagctgttccgggacatcgcccaggagttcagtgatgacctgcaccacatcgccagcctcatcggcaaggtggtggactttgagggcagcctggccgagaaccgcttcaccgtgctgcccaacattgatcctgagattgatgagaagaagaggcggctgatgggcctgcccagcttcctgacagaggtggccaggaaggagctggagaacctggacagccgcatccccagctgcagcgtcatctacatccccctgattggcttcctgctgagcatcccccggctgcccagcatggtggaggccagtgactttgagatcaatggcctggacttcatgttcctgtctgaggagaagctgcactaccgcagcgcccggaccaaggagctggatgccctgctgggggacctgcactgtgagatccgggaccaggagaccctgctgatgtaccagctgcagtgccaggtgctggcccgggctgctgtgctgaccagggtgctggacctggccagccggctggatgtgctgctggccctggccagcgctgcccgggactatggctacagccggccccgctacagcccccaggtgctgggcgtgcgcatccagaatggccgccaccccctgatggagctgtgtgcccggacctttgtgcccaacagcacagaatgtggcggggacaagggccgggtgaaggtgatcaccggccccaacagcagcggcaagagcatctacctgaagcaggtgggcctcatcaccttcatggccctggtgggcagctttgtgcctgctgaggaggccgagattggagctgtggatgccatcttcacccgcatccacagctgtgagagcatcagcctgggcctgagcaccttcatgattgacctgaaccaggtggccaaggctgtgaacaatgccacagcccagagcctggtgctgattgatgaatttgggaagggcaccaacacagtggatggcctggccctgctggccgctgtgctgcggcactggctggcccggggccccacctgcccccacatctttgtggccaccaacttcctgagcctggtgcagctgcagctgctgccccagggccccctggtgcagtacctgtag

SEQ ID NO: 248469 - DNA, 408 bp, Artificial Sequence
  derived and/or modified sequence
ggctacagccggccccgctacagcccccaggtgctgggcgtgcgcatccagaatggccgccaccccctgatggagctgtgtgcccggacctttgtgcccaacagcacagaatgtggcggggacaagggccgggtgaaggtgatcaccggccccaacagcagcggcaagagcatctacctgaagcaggtggccaaggctgtgaacaatgccacagcccagagcctggtgctgattgatgaatttgggaagggcaccaacacagtggatggcctggccctgctggccgctgtgctgcggcactggctggcccggggccccacctgcccccacatctttgtggccaccaacttcctgagcctggtgcagctgcagctgctgccccagggccccctggtgcagtacctgtag

SEQ ID NO: 248470 - DNA, 792 bp, Artificial Sequence
  derived and/or modified sequence
cactaccgcagcgcccggaccaaggagctggatgccctgctgggggacctgcactgtgagatccgggaccaggagaccctgctgatgtaccagctgcagtgccaggtgctggcccgggctgctgtgctgaccagggtgctggacctggccagccggctggatgtgctgctggccctggccagcgctgcccgggactatggctacagccggccccgctacagcccccaggtgctgggcgtgcgcatccagaatggccgccaccccctgatggagctgtgtgcccggacctttgtgcccaacagcacagaatgtggcggggacaagggccgggtgaaggtgatcaccggccccaacagcagcggcaagagcatctacctgaagcaggtgggcctcatcaccttcatggccctggtgggcagctttgtgcctgctgaggaggccgagattggagctgtggatgccatcttcacccgcatccacagctgtgagagcatcagcctgggcctgagcaccttcatgattgacctgaaccaggtggccaaggctgtgaacaatgccacagcccagagcctggtgctgattgatgaatttgggaagggcaccaacacagtggatggcctggccctgctggccgctgtgctgcggcactggctggcccggggccccacctgcccccacatctttgtggccaccaacttcctgagcctggtgcagctgcagctgctgccccagggccccctggtgcagtacctggactggccccgggtgtctggccaggagggcggggactag

SEQ ID NO: 248471 - DNA, 471 bp, Artificial Sequence
  derived and/or modified sequence
accgcccagagcctggtgctgatcgacgagttcggcaagggcaccaatacagtggatgggcttgccctgctggccgccgttctccgacattggttggcgaggggtccaacctgtccacacatttttgtcgccacaaattttctttcccttgtccagctacagctcttacctcaaggcccccttgtacagtatctggtttgtgagggcgttgccaaggcatcgcacgcatcgcatactgccgcacaagctggtctccctgataaactggtcgccagaggaaaggaggtgagtgatctcattagatctggcaaacctataaagcctgttaaggacctgctgaagaagaaccagatggaaaattgccaaacactggtggataagtttatgaagttggacctcgaagatcccaacctcgacctgaatgttttcatgagccaggaggtgctgcccgccgcgacatctatcctgtag

SEQ ID NO: 248472 - DNA, 1206 bp, Artificial Sequence
  derived and/or modified sequence
atgtggcccgtgctgctgttcgtgttcctgagccagaccgtgtacagcgctctggggttgcgggacgcttgtaggtccctgccccagtcaatacaactgtttagagacatcgcgcaagaattttctgatgaccttcatcacatcgcctcattaattggcaaggttgtcgatttcgaaggatctctcgcagaaaacagattcactgtgctgccaaacattgatcctgagattgatgaaaaaaaacgtcgattgatgggactgccttcctttttgacggaggtggccaggaaggaattggagaacctcgattctaggattccaagctgtagcgtaatttatataccattgattggttttctcctcagcattcctaggcttccatctatggttgaggcctcagacttcgagataaacggtctggactttatgtttctgagcgaggaaaagctgcactacagatctgcacggacaaaagaactggatgcactgttaggggatttacactgtgaaataagggaccaggaaaccctgctgatgtatcagctgcagtgtcaggtgttggctagggccgcagttctgactcgagtacttgacttggcttcacgcctcgacgtcctgcttgccctggcgtctgccgccagagactacggctacagtcgaccgcgctactcccctcaggttcttggagtaagaatccagaacggacgccatcccctaatggagctatgcgcaaggaccttcgtgcccaattctacagagtgtgggggcgataagggacgtgttaaggtgattacaggtccaaactcttcaggtaagtctatttacctcaaacaagtagggctgatcacctttatggccttggtaggctctttcgttccagcggaggaagcagagatcggagcagtcgatgccatctttactcggattcactcttgcgagtcaatatctctgggtctgtccacctttatgattgacctgaaccaagtcgccaaagcagtgaataacgccaccgctcagagccttgtgctcattgacgagtttgggaagggcacgaacacagtcgatggtcttgccttgctcgcagctgtgcttagacattggctcgctagggggcctacgtgtccccatattttcgtggctacaaacttccttagccttgttcagctccagttgctcccacaggggccgctggtgcagtacctttag

SEQ ID NO: 248473 - DNA, 1491 bp, Artificial Sequence
  derived and/or modified sequence
accgtgtacagcgccctgggcctgcgggacgcctgccggagcctgcctcagtctatccaactgttccgtgacatcgcacaagaattcagtgatgatctccatcatatcgccagcctcatagggaaagttgtcgacttcgagggctctctggccgagaacaggtttacagtgctgccaaatatagatcctgagatagatgagaagaaacggcgcctcatggggctgcctagttttctcactgaggtagctcggaaagaactggaaaatttggattcccggattccatcttgttcggttatctacattccactcataggtttcttattgtcaatcccacgcctccccagcatggtcgaagcctcagattttgagataaacggactcgatttcatgttcctgtccgaggagaaactgcactacagaagcgctcggactaaagagctcgatgcgttgcttggtgatctgcattgcgaaattagagaccaggaaaccctgctcatgtatcaattgcagtgtcaagtgctggcccgcgctgctgtgttgacaagagtgctggaccttgcttcgagacttgacgtccttctggctctcgcgtccgcagctagggattacggatattctcggccacggtatagcccgcaggttctgggggtgaggatccagaacggacggcacccgttaatggaattgtgcgctcgcactttcgtgccgaatagcacagagtgcggcggcgacaagggccgggtaaaagtgattaccggtccgaactctagcggtaagtccatctatcttaaacaagtcggcttaattacttttatggccctcgtggggtcttttgtcccagctgaggaagctgagatcggagcggtcgacgccatcttcactcggatccattcctgcgagagcattagcctcgggctgtcaaccttcatgatcgacctcaatcaggttgcaaaagctgtgaataacgccacagctcagagtttagttctcattgatgagttcgggaagggcacaaatacagttgatggccttgcattactggcggctgtcttgaggcattggctggctagggggcccacctgcccacatatatttgtggcgacaaatttcctctccctcgtgcagcttcagttgcttccacagggccctcttgtccagtatttgaccatggaaacatgcgaggatgggaacgatcttgttttcttttatcaagtgtgcgagggcgtggccaaagcttcacacgcttcacacacagccgctcaggccgggctgcccgataagttggtagctcgcgggaaagaggtgtccgacttgatcagaagtggtaagccgattaaacctgtgaaagaccttctgaagaaaaaccagatggaaaactgtcagacccttgtggacaaattcatgaaactggacctagaggatcctaatctggatctgaatgtctttatgtcacaggaagtccttcctgccgctacaagcattctctag

SEQ ID NO: 248474 - DNA, 585 bp, Artificial Sequence
  derived and/or modified sequence
atggccagcctgggcgccaacccccggcggaccccccagggcccccgccctggagcggcctccagtggcttcccttcacccgccccagtcccgggtcccagagaggcggaagaagaggaagtggaggaagaggaggaacttgctgaaattcatctgtgtgttctctggaatagcggatatcttggcattgcatactatgacacttccgacagcactattcactttatgccagatgcccccgatcacgaatcgttgaagttgcttcagagagtacttgatgaaattaatccacagtcggttgtgacctccgcgaagcaagatgaaaacatgacccggttcctcgggaagctggccagtcaggagcacagggaaccgaagagaccggaaattattttccttccatctgtcgatttcgggctggagatcagcaagcagaggttgctgagcgggaattactcttttatcccggacgcaatgacagcaacggaaaagattctgttcctttcaagtatcattcccttcgactgcctcctgaccgttcgtgcactagggggacttcttaagttcttgggacggcggcggtag

SEQ ID NO: 248475 - DNA, 1002 bp, Artificial Sequence
  derived and/or modified sequence
aagatcctgttcctgagcagcatcatccccttcgactgcctgctgacagttagagccttaggtggtcttctgaaatttctggggcggaggagaatcggagtcgagctggaagattataacgttagcgttccgatcctgggcttcaagaagtttatgttaactcacctggtgaacatagaccaagatacctacagtgttctccaaattttcaagagcgagagtcatcctagcgtttacaaggtcgctagcggactgaaggagggcctttcactgtttggaattctaaatagatgtcactgtaagtggggcgaaaagctcctgcgactgtggtttactcgacccacccatgacctcggggaactgtcatcaaggctggacgtcatccagtttttcctccttccccagaacctggacatggctcagatgctacatcggctccttggacacatcaagaatgtgcccctcatcctgaaacgcatgaagctgagtcataccaaggtctctgactggcaagtgctgtacaagactgtgtacagcgcactcgggctgcgggacgcctgcagatcactgcctcaaagtattcaactgtttagagatattgcacaagaattctcagacgatcttcaccacatcgcaagcttgatcgggaaggtttacttgtccccgcaggtggatttcgaggggtccttggcggaaaatcggtttacagtattgcctaatatcgatccagaaatcgatgaaaaaaagagacgcctgatggggcttccctcttttctgactgaagtggcgcgcaaggaactagagaatcttgatagccgtataccgtcatgttccgttatctacattcccctcatcggattcctgctatcaattccaaggttaccatctatggttgaggctagcgacttcgagattaatggcttagacttcatgtttctgagcgaggaaaagttgcactaccgatctgctagaacaaaggaattggacgccctgctgggttag

SEQ ID NO: 248476 - DNA, 471 bp, Artificial Sequence
  derived and/or modified sequence
accgcccagagcctggtgctgatcgacgagttcggcaagggcaccaacacggttgacggactcgcactactcgcggctgtgctccggcactggttggcccggggacccacatgtccacacatcttcgtcgccactaatttcctctccttagtgcagctgcagttactgcctcagggtcccctggtgcaatatctggtttgcgaaggcgtcgcaaaggcttcccacgctagccataccgccgcccaggcgggcctcccagataagcttgtggcccggggtaaagaggtgtccgatctgattcgttccgggaagcccatcaagcctgtcaaagacctcctgaaaaaaaatcagatggaaaattgccagaccctggttgataaatttatgaaactggacctggaggaccctaatttggatctgaacgtgtttatgtcccaggaggtgcttccggctgccaccagtattctgtag

SEQ ID NO: 248477 - DNA, 2184 bp, Artificial Sequence
  derived and/or modified sequence
atggccagcctgggcgccaacccccggcggaccccccagggccccagaccaggcgcagcttcaagtggatttccgtccccggcacccgtcccaggaccccgcgaggctgaagaggaagaggtcgaggaggaagaggaactggctgagatccacctgtgtgtgctgtggaactccgggtatctaggcattgcatattatgatacaagcgattccacaatccactttatgccggacgcgccagaccacgagagcctgaagctcctccagagggtgctggatgaaattaacccccaatccgtggtgacgtccgccaaacaggacgagaatatgacccgtttcttgggcaagctggcgagtcaagaacatagggaacctaagcggcctgaaatcatattccttccatcagttgatttcggcctggagatctcaaagcagcgactgctctctgggaactactctttcatccccgatgccatgacagccacagagaagatcctgttcctatcctctataattccattcgattgtttgctcacagtgagagcattgggcggtctgcttaagttccttggacgtagacggatcggcgtcgaactggaggactataacgtttccgtacccattctgggattcaaaaaattcatgctcacccacctggtgaatatcgatcaagatacttattctgtgctgcagatcttcaaaagcgaatctcacccttctgtctataaggttgctagcggcctgaaggaaggccttagccttttcggcattctgaatcgatgccactgcaaatggggcgagaaactactcaggctttggtttacccgcccaacacacgacttgggggaactgagcagccggttagacgtaattcagtttttcctcctccctcagaatctggatatggcacagatgctgcataggttgctgggccatattaagaatgtccccctgattctcaagcggatgaagcttagtcatactaaagtgtccgactggcaggtgctgtacaagaccgtgtactcagccctcggcctcagggatgcctgtagatctctgccccaatccattcagcttttccgagacatcgcccaggagttctccgacgatctgcatcatatcgcttctctgattggaaaggttgttgacttcgagggcagtcttgcagagaatcgatttacagtactgcctaatatcgaccctgagatcgacgagaagaagagacggctgatggggttgccctctttccttaccgaagtggcccgtaaggaactggaaaatctcgactctcggattccctcttgcagcgtgatctatattccactgattgggtttcttctatcaattcccagactacccagcatggtggaggcatccgacttcgaaattaatggtctagacttcatgttcctatctgaagagaaactccattaccggtcagccaggaccaaagaattagacgctttgctgggagatctgcattgcgagattcgcgaccaggagacattattgatgtaccagctgcagtgccaggtcctggcccgtgctgctgtgctaaccagagtgctcgatctggctagcagactggatgtgctactggctctggcttctgcggctcgcgactatgggtactccagaccccggtatagtccgcaggtgttgggagtgcgaatccagaatgggcgccaccccctcatggagttgtgtgcccgcaccttcgtccccaacagcaccgaatgcggaggcgacaaggggagagtaaaagtgattacaggtcctaattcatctggaaaatctatctatcttaaacaggttggtctgattacattcatggcactggtcgggagctttgtacctgcagaggaggccgaaattggtgccgtcgacgcaatattcaccagaatccatagttgcgagagcattagtctcggccttagcaccttcatgatcgacctgaatcaggtcgctaaagctgttaataatgccacggcgcagagcttagtgctgattgatgaatttggcaaggggaccaataccgtggacggcctcgccttactggccgcggtgctgaggcattggctagccaggggaccaacctgcccgcacatatttgtggccacgaactttctcagcctcgtccagctccagctcctcccgcagggcccgttagtgcagtacctgtag

SEQ ID NO: 248478 - DNA, 1527 bp, Artificial Sequence
  derived and/or modified sequence
atgtggcccgtgctgctgttcgtgttcctgagccagaccgtgtactctgctctggggcttcgcgatgcttgtcggagtttgccacagtccattcaactgtttagagatattgctcaggaatttagcgacgatctgcaccatatcgcgtctttgatagggaaggtggtggacttcgaagggtccctggccgaaaacaggtttacagtcctcccgaatattgaccctgaaattgatgagaagaagagaagacttatgggtctgccttcgttcctcaccgaagtcgctcgaaaggaactcgagaatcttgattccaggatcccaagttgtagtgtgatttacatccctttgatcggattcctgctctcaatcccccgacttccttccatggtcgaggcatctgattttgagataaatggcctggattttatgttcctgtctgaagagaagcttcactatcgttctgcccgaactaaagagttagacgccctcctgggcgacttacattgcgagatccgcgaccaggagacactgttaatgtaccaactacaatgtcaagtattggctcgggccgcagtgctcactcgcgtcctggacctggcaagcaggctggatgtgttactggccctggcatccgctgcgcgcgactacggatactctcggccacgctacagcccacaagtgctaggcgtgcgaatccagaatgggaggcaccctttgatggaactctgtgcgcgaacatttgttcccaatagcaccgaatgcggaggagataaaggcagggtaaaagtgatcactggccccaatagctccggaaagagcatttacttaaaacaggtgggccttatcacctttatggccttggtgggatccttcgtgcctgctgaggaggccgagataggggcagtcgatgcaattttcacccggattcactcatgcgagagcatatctctcggcctgtcgacgttcatgatcgacctgaaccaggtagctaaggctgtaaacaacgccaccgctcaaagtttggtgctgatcgatgaatttgggaagggtactaatacagtggacggactcgccctcctggcggccgttctccgccactggcttgctagggggccaacatgcccccacatatttgttgccactaactttctgagtttggtccagcttcagctgcttccgcaggggccactcgtgcaatatttgaccatggaaacctgtgaagatggcaacgacctggtcttcttttaccaggtgtgtgagggagtagccaaagcttcgcacgctagccacaccgccgcgcaagccggcttgcccgataagcttgtcgcacgcggaaaagaagtctcagatctgatcagaagcggaaaaccaatcaaaccggtgaaggatttgctgaagaagaaccagatggagaattgccaaaccctcgtcgataagttcatgaagcttgatttagaggaccccaatttggacttgaacgtatttatgtctcaggaggtgctccccgctgccacctcgatcctgtag

SEQ ID NO: 248479 - DNA, 408 bp, Artificial Sequence
  derived and/or modified sequence
ggctacagccggccccggtacagcccccaggtgctgggcgtgcggatccagaacgggcgccacccgctgatggagttgtgcgccagaacttttgtgccgaacagtaccgaatgtggaggtgataaggggagggttaaagtgatcaccggccctaatagctctggaaagagcatttatctgaaacaagttgccaaggccgtgaataatgccacagcccagtctctggtactcattgatgaattcgggaaggggacgaataccgttgatggcctcgctttactggctgcagtcctacgccactggttagcacgcgggcctacgtgcccccatatattcgtggcaaccaatttcttgtcactggttcaactccagcttttgccccagggtcctctggtacaatatttatag

SEQ ID NO: 248480 - DNA, 585 bp, Artificial Sequence
  derived and/or modified sequence
atggccagcctgggcgccaacccccggcggaccccccagggccccaggcctggcgctgcctcgtctggatttcccagccctgcccctgttccaggtcctagggaagcggaggaggaggaagtcgaagaagaggaagagctggccgagatccacttgtgcgtgttgtggaactctgggtacttgggcatcgcctactatgataccagtgattctacaattcatttcatgcccgatgccccagatcatgagtctctgaagttactacagagggtgctcgacgaaattaacccacagagcgtcgtgacctcagctaagcaggatgagaatatgaccaggttcttaggcaagctggcaagtcaggaacatagggaaccaaaacggcctgagattatcttcctcccatctgtggacttcggcctggagatttccaagcaacgactgctttccggcaattactcattcatcccagatgctatgactgctacggaaaagatactgttcttgtctagtatcattccctttgattgcctgctcaccgtgcgcgcactgggaggcctgctcaaattcttgggcaggcggcgatag

SEQ ID NO: 248481 - DNA, 1491 bp, Artificial Sequence
  derived and/or modified sequence
accgtgtacagcgccctgggcctgcgggacgcctgccggagcctgcctcagtccatacagctgtttagagatattgcccaagagttttctgatgacctgcatcacatcgcaagcttaatcggaaaggtcgttgacttcgaggggagcctggccgagaaccgatttaccgtgctaccaaacatcgacccagaaatcgatgagaagaaacgccgtctgatgggcctcccctcatttctcaccgaggtcgcacggaaagagctggagaatctagactctcggatacccagttgctctgtgatatacattccgctcattgggtttctcctgtcaattcccaggctgccatcaatggttgaggcatccgacttcgagatcaatggactggatttcatgttcctgtccgaggagaagctgcattaccggtccgctagaacaaaggaactggacgcgctgctgggcgacctccattgcgagattcgagatcaggagactctgcttatgtaccagctacagtgccaggtgttggcccgagcagcagtgctcacccgcgtgttagaccttgcatctcgcctcgatgtgctgctcgcattggcaagcgcggccagggattatggctactcccggccccggtatagcccccaggtactaggagtgcgtatccagaatggcagacatcctttaatggaattatgcgctcgtacgttcgtgcctaattctaccgagtgtggaggggacaagggtagagtgaaagtgataaccggacccaatagttccgggaaaagcatctacctaaagcaggtcggtctaatcacatttatggcactagtggggtcctttgtccccgcagaggaggccgagataggagcggtcgatgccatttttacacggattcatagctgtgagtctatctccctgggactcagcacgttcatgatcgaccttaatcaggtcgctaaggctgtgaacaatgcaaccgcacaaagccttgttctgatcgacgagttcgggaagggtacaaacaccgtggacggcctggcgctgctggccgctgtgctccggcattggctggcaagaggcccaacctgccctcatatattcgtggccacaaattttttgtcattggtgcaactgcagctgctgccccaaggtcctctcgtacagtaccttaccatggagacttgcgaagacggcaacgacctggtgttcttttatcaggtatgcgagggggtagctaaagccagccacgcttcccataccgcagcccaggcagggttgccggacaagctcgtggcaagagggaaagaggtgagcgacctcatccgttccggtaaaccaattaaaccagtcaaggatctgctgaagaaaaaccagatggaaaattgccaaactctagtggataagttcatgaaattggacttggaggaccctaatttagacctgaatgttttcatgtcgcaggaggttttgccagctgctacctccattctgtag

SEQ ID NO: 248482 - DNA, 2184 bp, Artificial Sequence
  derived and/or modified sequence
atggccagcctgggcgccaacccccggcggaccccccagggcccccggccgggggctgcctcatcaggctttccttcccctgctcctgtgcctggtcctagggaggctgaggaggaggaggtagaggaggaggaggagctggccgagattcacctttgtgtgctgtggaactcaggctacctcggaatcgcctactacgatacaagcgacagcacgattcattttatgccagatgcccccgatcatgaaagtcttaagctcctgcagcgtgtgctggatgaaataaatccccagagtgtcgtgacatcagctaagcaggatgaaaatatgacaaggtttctgggaaagctggcatcacaggaacacagggagcctaagagaccagagatcatatttttaccaagtgttgattttggcctggaaatcagtaaacagcgacttttaagcggaaattactcattcatccctgatgctatgactgcaacggagaaaatactatttctgagtagcatcatccccttcgattgtttactgacagtgagggcactgggcgggctgctgaagttcttgggcaggagacggatcggcgttgagctggaggactacaacgtcagcgtgcctatcttgggctttaagaaatttatgctcacccatctcgttaacatcgatcaggatacgtattctgtgctccagatctttaagtccgagtcacacccgtcagtatataaggtggcctctggcttgaaagaggggctgtccctgttcggcattctgaatcgatgtcactgcaaatggggagagaagctcctgcggctatggttcactcgacctacccatgacctgggcgagcttagctctaggctggatgtgatccagttctttcttctgccacaaaatctcgacatggcccagatgctgcacaggctgctgggacatataaaaaatgttccactcattttgaagagaatgaaactgtcgcacacaaaggtcagcgattggcaagtgctctataagaccgtctattcagcgttgggcctgcgcgatgcctgccgatctttaccccagtctatacagctctttcgggatattgcacaagagttttcagatgatttacaccatattgcatcactgatcgggaaagtggtggactttgagggttcattggccgagaataggttcacggttctcccgaatatagaccctgagattgacgagaagaaaagacgactcatgggcttaccctcctttctgaccgaagtggctcgcaaggagctggaaaatctcgacagtagaatcccctcctgctcagtcatctacattccgcttataggcttcctgctcagcattccacgcttgccatccatggtcgaggcaagcgatttcgaaattaacggattggattttatgtttctgagcgaggaaaaactgcactatcgctctgcccggaccaaggagttagatgccttgctgggcgacctgcattgcgagatccgagaccaggaaacactgctcatgtatcagctgcagtgccaggtgctcgctcgtgctgcagttttgacacgagtattggatctggccagcagattagatgtgcttctcgccctggcctccgcggcccgagactatgggtattcacgcccacgatactcaccgcaggtgctcggggtgcgaattcagaatggccggcatccattgatggaactgtgcgctagaacctttgtgcccaactctactgaatgtggtggcgataagggcagggtgaaggtcatcactgggccaaactctagtggcaaatccatttatctgaagcaagtcggcctgattacatttatggcactggtgggctctttcgttcccgctgaggaagccgagatcggcgccgtggacgccatctttacaaggatccatagctgcgaatctatcagcctgggcctgtctacgtttatgatagacctgaaccaggtcgcgaaggctgttaataatgctactgcgcagtctcttgtcctcatcgatgagttcggcaaagggacaaatacagtggatggcctggccttactagcagctgtcctcaggcattggctggccaggggccctacttgtccacacatcttcgtcgctactaactttttgagtctggtacagcttcagctgcttcctcagggaccactagtgcaatacctgtag

SEQ ID NO: 248483 - DNA, 765 bp, Artificial Sequence
  derived and/or modified sequence
atggccagcctgggcgccaacccccggcggaccccccagggccccagacctggcgcagcatcctctggcttcccatctccagcacctgtgccagggccaagagaggccgaggaagaggaggtggaggaggaggaagagttggcagagattcacctgtgtgtgctgtggaatagcgggtatctgggcatcgcatattacgacacttctgattcaaccattcactttatgccagatgcaccagatcacgaaagccttaagctactgcagcgtgtgctggatgagatcaacccccaatctgtggtaacatccgctaagcaagatgagaacatgactagatttctggggaagttggccagccaggagcacagagaaccgaaaagacctgagattattttccttcctagtgttgatttcggcctcgagatctctaagcagcgtttactctctggaaactactcatttataccagatgcgatgaccgccacagagaagatccttttcctgtcctcaatcattccttttgattgtcttctgaccgtaagagccctgggagggctcctgaaattcctcggccgtcgccggatcggggtggaattagaggactacaatgtgagcgtcccaatactgggtttcaagaagttcatgcttacccacttagtgaacattgaccaagacacatataggcttgagtgcaatggcgcaatctcagcccagtgcaatctgtgcctactgggttctagcgactcgccggccagtgcctcatag

SEQ ID NO: 248484 - DNA, 792 bp, Artificial Sequence
  derived and/or modified sequence
cactaccggagcgcccggaccaaggagctggacgccctgctgggcgacttacactgcgagatccgggaccaggaaaccttgctgatgtaccagcttcagtgtcaagtgctagctagagcagccgtcctgacacgggtactagacttagcctctcgactggacgtgcttttggctcttgcatcagccgcacgcgactatggctacagccgaccaaggtactcacctcaggtgttaggcgttaggatccagaatgggaggcacccattaatggagctttgcgcaagaaccttcgtgcccaatagcacagaatgtgggggagacaagggtcgtgtcaaagtcatcaccgggcccaacagcagcggtaagtcaatatatctgaagcaggtcgggctgataacctttatggcactcgtgggtagttttgtgccagcagaggaggcagagattggcgccgtcgatgctatctttacacgcattcactcctgtgaatcaatttctcttggactgtccacattcatgatcgacctgaaccaggtggccaaagcggtcaacaatgcgacagcacaatcattggtgctgatcgacgagttcggtaaagggacgaataccgtggatggtctggcattactggcagctgtgctaaggcattggctcgcaagaggccccacttgcccgcacatcttcgttgctaccaacttcctgagcctagtccagctccagctcctccctcaaggcccactcgtacagtacctggactggcccagagtgtccggacaagaaggcggagactag

SEQ ID NO: 248485 - DNA, 2236 bp, Artificial Sequence
  derived and/or modified sequence
gtgatagaaatcatatagaaatacagaaaattgcttgatatttcccccactcttttttttttgagacagagtcttgctctgtcaccaggctggagtgcagtggcacaatcttggctcactgcaacctccacctcccgggttgggtttcaagtgattctcctgcctcagcctcccgagtagctgggactataggcgtgtgccaccatgcctggctaatttttgtatttttagtagagacagggtttcaccatgatggccaggatggtcttgatctcttgacctcgtgatccacccgcctcggcctcccaaagtgctgggattacaggtgtgagccaccgcgcccggccctgatagccgatgaggtttttttgtcattgttcttcttgtatcattacagactcatggccttttatagctatatttctctttctcccgactctgtacaaactcctttgttttagagtttgcacaaccctctatcaaagcacctaccacctcacttttaaatcttctgcatgtatttctgtcttccttcctagactgtgagcacatctgggacagggaccatatctttttttgtttatttgttttgttttgagacagagtctcgctctgtcggccaggctggagtgcaatggcgtgatctggctataacctccacctcccgggttcaagagattctcctgcctcagcctcccaagtagctggaattacatgtgcatgccaccaagcccagttaattttttgtattttgagtagagacagggtttcaccatgttggtgaggctgatctcgaactcctgacctcaggtgatctacccacctcagcctcccaaagtgctgggattacaggcatgagccactgtgcctggccaggaccatatcttaattgtctttgtagtttcagtgtttggtacagtgcctctcactgtttctttttgcctttgagatcttccctctttgttactgtgatcttccctactggtctttgttcttctgagtctgtccctatcaccacctcaacccgagctggatgtggcctgtcctcctttttgtgtttctctcacagactgtgtacagtgccctgggcctgagggatgcctgccgctccctgccgcagtccatccagctctttcgggacattgcccaagagttctctgatgacctgcaccatatcgccagcctcattgggaaagtagtggactttgagggcagccttgctgaaaatcgcttcacagtcctccccaacatagatcctgaaattgatgagaaaaagcgaagactgatgggacttcccagtttccttactgaggttgcccgcaaggagctggagaatctggactcccgtattccttcatgcagtgtcatctacatccctctgattggcttccttctttctattccccgcctgccttccatggtagaggccagtgactttgagattaatggactggacttcatgtttctctcagaggagaagctgcactatcgtagtgcccgaaccaaggagctggatgcattgctgggggacctgcactgcgagatccgggaccaggagacgctgctgatgtaccagctacagtgccaggtgctggcacgagcagctgtcttaacccgagtattggaccttgcctcccgcctggacgtcctgctggctcttgccagtgctgcccgggactatggctactcaaggccgcgttactccccacaagtccttggggtacgaatccagaatggcagacatcctctgatggaactctgtgcccgaacctttgtgcccaactccacagaatgtggtggggacaaagggagggtcaaagtcatcactggacccaactcatcagggaagagcatatacctcaaacaggtaggcttgatcacattcatggccctggtaggcagctttgtgccagcagaggaggccgaaattggggcagtagacgccatcttcacacgaattcatagctgcgaatccatctcccttggcctctccaccttcatgatcgacctcaaccaggtggcgaaagcagtgaacaatgccactgcacagtcgctggtccttattgatgaatttggaaagggaaccaacacggtggatgggctcgcgcttctggccgctgtgctccgacactggctggcacgtggacccacatgcccccacatctttgtggccaccaactttctgagccttgttcagctacaactgctgccacaagggcccctggtgcagtatttg

SEQ ID NO: 248486 - DNA, 1636 bp, Artificial Sequence
  derived and/or modified sequence
actgtgtacagtgccctgggcctgagggatgcctgccgctccctgccgcagtccatccagctctttcgggacattgcccaagagttctctgatgacctgcaccatatcgccagcctcattgggaaagtagtggactttgagggcagccttgctgaaaatcgcttcacagtcctccccaacatagatcctgaaattgatgagaaaaagcgaagactgatgggacttcccagtttccttactgaggttgcccgcaaggagctggagaatctggactcccgtattccttcatgcagtgtcatctacatccctctgattggcttccttctttctattccccgcctgccttccatggtagaggccagtgactttgagattaatggactggacttcatgtttctctcagaggagaagctgcactatcgtagtgcccgaaccaaggagctggatgcattgctgggggacctgcactgcgagatccgggaccaggagacgctgctgatgtaccagctacagtgccaggtgctggcacgagcagctgtcttaacccgagtattggaccttgcctcccgcctggacgtcctgctggctcttgccagtgctgcccgggactatggctactcaaggccgcgttactccccacaagtccttggggtacgaatccagaatggcagacatcctctgatggaactctgtgcccgaacctttgtgcccaactccacagaatgtggtggggacaaagggagggtcaaagtcatcactggacccaactcatcagggaagagcatatacctcaaacaggtaggcttgatcacattcatggccctggtaggcagctttgtgccagcagaggaggccgaaattggggcagtagacgccatcttcacacgaattcatagctgcgaatccatctcccttggcctctccaccttcatgatcgacctcaaccaggtggcgaaagcagtgaacaatgccactgcacagtcgctggtccttattgatgaatttggaaagggaaccaacacggtggatgggctcgcgcttctggccgctgtgctccgacactggctggcacgtggacccacatgcccccacatctttgtggccaccaactttctgagccttgttcagctacaactgctgccacaagggcccctggtgcagtatttgaccatggagacctgtgaggatggcaacgatcttgtcttcttctatcaggtttgcgaaggtgttgcgaaggccagccatgcctcccacacagctgcccaggctgggcttcctgacaagcttgtggctcgtggcaaggaggtctcagacttgatccgcagtggaaaacccatcaagcctgtcaaggatttgctaaagaagaaccaaatggaaaattgccagacattagtggataagtttatgaaactggatttggaagatcctaacctggacttgaacgttttcatgagccaggaagtgctgcctgctgccaccagcatcctctgagagtccttccagtgtcctccccagcctcctgagactccggtgggctgccatgccctctttgtttccttatctccctcagacgcagagtttttagtttctctagaaattttgtttcatattaggaataaagtttattttgaagaaa

SEQ ID NO: 248487 - DNA, 2260 bp, Artificial Sequence
  derived and/or modified sequence
gcgcgctccttttgcaggctcgtggcggtcggtcagcggggcgttctcccacctgtagcgactcagagcctccaagctcatggcctccttaggagcgaacccaaggaggacaccgcagggaccgagacctggggcggcctcctccggcttccccagcccggccccagtgccgggccccagggaggccgaggaggaggaagtcgaggaggaggaggagctggccgagatccatctgtgtgtgctgtggaattcaggatacttgggcattgcctactatgatactagtgactccactatccacttcatgccagatgccccagaccacgagagcctcaagcttctccagagagttctggatgagatcaatccccagtctgttgttacgagtgccaaacaggatgagaatatgactcgatttctgggaaagcttgcctcccaggagcacagagagcctaaaagacctgaaatcatatttttgccaagtgtggattttggtctggagataagcaaacaacgcctcctttctggaaactactccttcatcccagacgccatgactgccactgagaaaatcctcttcctctcttccattattccctttgactgcctcctcacagttcgagcacttggagggctgctgaagttcctgggtcgaagaagaatcggggttgaactggaagactataatgtcagcgtccccatcctgggctttaagaaatttatgttgactcatctggtgaacatagatcaagacacttacagtgttctacagatttttaagagtgagtctcacccctcagtgtacaaagtggccagtggactgaaggaggggctcagcctctttggaatcctcaacagatgccactgtaagtggggagagaagctgctcaggctatggttcacacgtccgactcatgacctgggggagctcagttctcgtctggacgtcattcagttttttctgctgccccagaatctggacatggctcagatgctgcatcggctcctgggtcacatcaagaacgtgcctctgattctgaaacgcatgaagttgtcccacaccaaggtcagcgactggcaggttctctacaagactgtgtacagtgccctgggcctgagggatgcctgccgctccctgccgcagtccatccagctctttcgggacattgcccaagagttctctgatgacctgcaccatatcgccagcctcattgggaaagtagtggactttgagggcagccttgctgaaaatcgcttcacagtcctccccaacatagatcctgaaattgatgagaaaaagcgaagactgatgggacttcccagtttccttactgaggttgcccgcaaggagctggagaatctggactcccgtattccttcatgcagtgtcatctacatccctctgattggcttccttctttctattccccgcctgccttccatggtagaggccagtgactttgagattaatggactggacttcatgtttctctcagaggagaagctgcactatcgtagtgcccgaaccaaggagctggatgcattgctgggggacctgcactgcgagatccgggaccaggagacgctgctgatgtaccagctacagtgccaggtgctggcacgagcagctgtcttaacccgagtattggaccttgcctcccgcctggacgtcctgctggctcttgccagtgctgcccgggactatggctactcaaggccgcgttactccccacaagtccttggggtacgaatccagaatggcagacatcctctgatggaactctgtgcccgaacctttgtgcccaactccacagaatgtggtggggacaaagggagggtcaaagtcatcactggacccaactcatcagggaagagcatatacctcaaacaggtaggcttgatcacattcatggccctggtaggcagctttgtgccagcagaggaggccgaaattggggcagtagacgccatcttcacacgaattcatagctgcgaatccatctcccttggcctctccaccttcatgatcgacctcaaccaggtggcgaaagcagtgaacaatgccactgcacagtcgctggtccttattgatgaatttggaaagggaaccaacacggtggatgggctcgcgcttctggccgctgtgctccgacactggctggcacgtggacccacatgcccccacatctttgtggccaccaactttctgagccttgttcagctacaactgctgccacaagggcccctggtgcagtatttg

SEQ ID NO: 248488 - DNA, 405 bp, Artificial Sequence
  derived and/or modified sequence
ggctactcaaggccgcgttactccccacaagtccttggggtacgaatccagaatggcagacatcctctgatggaactctgtgcccgaacctttgtgcccaactccacagaatgtggtggggacaaagggagggtcaaagtcatcactggacccaactcatcagggaagagcatatacctcaaacaggtggcgaaagcagtgaacaatgccactgcacagtcgctggtccttattgatgaatttggaaagggaaccaacacggtggatgggctcgcgcttctggccgctgtgctccgacactggctggcacgtggacccacatgcccccacatctttgtggccaccaactttctgagccttgttcagctacaactgctgccacaagggcccctggtgcagtatttg

SEQ ID NO: 248489 - DNA, 2415 bp, Artificial Sequence
  derived and/or modified sequence
cgctccttttgcaggctcgtggcggtcggtcagcggggcgttctcccacctgtagcgactcaggttactgaaaaggcgggaaaacgctgcgatggcggcagctgggggaggaggaagataagcgcgtgaggctggggtcctggcgcgtggttggcagaggcagagacataagacgtgcacgactcgccccacagggccctcagaccccttccttccaaaggagcctccaagctcatggcctccttaggagcgaacccaaggaggacaccgcagggaccgagacctggggcggcctcctccggcttccccagcccggccccagtgccgggccccagggaggccgaggaggaggaagtcgaggaggaggaggagctggccgagatccatctgtgtgtgctgtggaattcaggatacttgggcattgcctactatgatactagtgactccactatccacttcatgccagatgccccagaccacgagagcctcaagcttctccagagagttctggatgagatcaatccccagtctgttgttacgagtgccaaacaggatgagaatatgactcgatttctgggaaagcttgcctcccaggagcacagagagcctaaaagacctgaaatcatatttttgccaagtgtggattttggtctggagataagcaaacaacgcctcctttctggaaactactccttcatcccagacgccatgactgccactgagaaaatcctcttcctctcttccattattccctttgactgcctcctcacagttcgagcacttggagggctgctgaagttcctgggtcgaagaagaatcggggttgaactggaagactataatgtcagcgtccccatcctgggctttaagaaatttatgttgactcatctggtgaacatagatcaagacacttacagtgttctacagatttttaagagtgagtctcacccctcagtgtacaaagtggccagtggactgaaggaggggctcagcctctttggaatcctcaacagatgccactgtaagtggggagagaagctgctcaggctatggttcacacgtccgactcatgacctgggggagctcagttctcgtctggacgtcattcagttttttctgctgccccagaatctggacatggctcagatgctgcatcggctcctgggtcacatcaagaacgtgcctctgattctgaaacgcatgaagttgtcccacaccaaggtcagcgactggcaggttctctacaagactgtgtacagtgccctgggcctgagggatgcctgccgctccctgccgcagtccatccagctctttcgggacattgcccaagagttctctgatgacctgcaccatatcgccagcctcattgggaaagtagtggactttgagggcagccttgctgaaaatcgcttcacagtcctccccaacatagatcctgaaattgatgagaaaaagcgaagactgatgggacttcccagtttccttactgaggttgcccgcaaggagctggagaatctggactcccgtattccttcatgcagtgtcatctacatccctctgattggcttccttctttctattccccgcctgccttccatggtagaggccagtgactttgagattaatggactggacttcatgtttctctcagaggagaagctgcactatcgtagtgcccgaaccaaggagctggatgcattgctgggggacctgcactgcgagatccgggaccaggagacgctgctgatgtaccagctacagtgccaggtgctggcacgagcagctgtcttaacccgagtattggaccttgcctcccgcctggacgtcctgctggctcttgccagtgctgcccgggactatggctactcaaggccgcgttactccccacaagtccttggggtacgaatccagaatggcagacatcctctgatggaactctgtgcccgaacctttgtgcccaactccacagaatgtggtggggacaaagggagggtcaaagtcatcactggacccaactcatcagggaagagcatatacctcaaacaggtaggcttgatcacattcatggccctggtaggcagctttgtgccagcagaggaggccgaaattggggcagtagacgccatcttcacacgaattcatagctgcgaatccatctcccttggcctctccaccttcatgatcgacctcaaccaggtggcgaaagcagtgaacaatgccactgcacagtcgctggtccttattgatgaatttggaaagggaaccaacacggtggatgggctcgcgcttctggccgctgtgctccgacactggctggcacgtggacccacatgcccccacatctttgtggccaccaactttctgagccttgttcagctacaactgctgccacaagggcccctggtgcagtatttg

SEQ ID NO: 248490 - DNA, 792 bp, Artificial Sequence
  derived and/or modified sequence
cactatcgtagtgcccgaaccaaggagctggatgcattgctgggggacctgcactgcgagatccgggaccaggagacgctgctgatgtaccagctacagtgccaggtgctggcacgagcagctgtcttaacccgagtattggaccttgcctcccgcctggacgtcctgctggctcttgccagtgctgcccgggactatggctactcaaggccgcgttactccccacaagtccttggggtacgaatccagaatggcagacatcctctgatggaactctgtgcccgaacctttgtgcccaactccacagaatgtggtggggacaaagggagggtcaaagtcatcactggacccaactcatcagggaagagcatatacctcaaacaggtaggcttgatcacattcatggccctggtaggcagctttgtgccagcagaggaggccgaaattggggcagtagacgccatcttcacacgaattcatagctgcgaatccatctcccttggcctctccaccttcatgatcgacctcaaccaggtggcgaaagcagtgaacaatgccactgcacagtcgctggtccttattgatgaatttggaaagggaaccaacacggtggatgggctcgcgcttctggccgctgtgctccgacactggctggcacgtggacccacatgcccccacatctttgtggccaccaactttctgagccttgttcagctacaactgctgccacaagggcccctggtgcagtatttggattggccaagggtttcaggacaggaaggaggtgattga

SEQ ID NO: 248491 - DNA, 816 bp, Artificial Sequence
  derived and/or modified sequence
atgttcctgagcgaggagaagctgcactaccggagcgcccggaccaaggaactggatgccctgttgggcgacctccactgtgagattagagaccaagaaaccttactgatgtaccagctccagtgtcaggtcctggcacgcgcagcagtccttacaagagtgttagatctcgcatcacgactggatgtgttgttagctcttgcatccgctgcgcgcgactatggctattctcgacctagatacagcccacaggtgttaggcgtgcgtatccaaaacggccggcatcccctgatggaactgtgtgcacgcacgtttgtcccaaactcgaccgaatgtggcggagataaagggcgcgtgaaagtgatcaccggaccaaatagttctggaaaatccatttacctcaagcaggtcggactgataacttttatggccttggtcgggagcttcgttcccgccgaggaggctgaaattggggcggtagacgccattttcacccggatccatagttgcgagtctatctcccttgggttgtccacatttatgatagatcttaatcaggttgccaaggctgtcaataacgctacggcccagtccctggtgcttatcgacgaattcggcaaagggactaacacagtggacggacttgcactcctggccgccgtgctgcggcattggctcgcccgaggtcccacatgtccgcatatctttgtggcaacgaattttctttccctagttcaactacagcttttgcctcaggggccactggtccagtacctggattggcccagagtatccggccaagaaggcggagattag

SEQ ID NO: 248492 - DNA, 471 bp, Artificial Sequence
  derived and/or modified sequence
accgcacaatccctagtgctgatcgacgaatttggcaaaggtactaatacagtggatggtcttgctctgcttgccgctgtgctgcggcactggttggcacgaggcccaacatgtcctcacattttcgttgctacaaactttttaagtttagtgcaactacaactgttgccccaggggccactggtgcagtacctggtctgcgagggtgtagctaaagcatcacacgcctcccataccgccgcacaagccggattacctgacaaacttgtggcacgcggaaaagaggtatcagacctgatccggagtggtaaacccatcaaacccgtgaaggacctgctcaaaaaaaaccagatggagaactgtcagacgctggtagacaagtttatgaagctcgacctggaggatccaaatttggatctcaacgtgtttatgagccaggaagtcctccctgcagcaacaagcatcttatag

SEQ ID NO: 248493 - DNA, 1206 bp, Artificial Sequence
  derived and/or modified sequence
atgtggcccgtactcctattcgtgtttctcagtcagacagtgtactctgccctaggtctgagagacgcatgtaggtcactcccccagtccatccagctttttagagacattgctcaggaattctcagacgacctgcaccacattgcatccctcatcggcaaggtcgtggactttgaaggatcccttgctgaaaatagattcaccgtgctgcccaacattgatcccgaaatcgacgagaaaaagaggcgactaatgggtctaccttcttttttgacagaggtggctaggaaagagctcgagaatttggacagtaggatcccttcgtgctctgtgatctatataccgttgatcggattcttgctcagtattccaaggctcccctctatggtcgaggcgtctgacttcgagattaatggactggattttatgttcctgtccgaagagaagttgcactaccggtctgctaggaccaaggaactcgatgcgctgctgggcgacctgcactgtgaaattcgagatcaagagacactcctgatgtaccagttgcaatgtcaggtcctggctagggctgcagtgctgactcgggtccttgacctggcatctagactcgacgtgcttcttgctttggcttcagccgctcgggactacgggtatagcagaccccgttatagtcctcaggtacttggggtgagaatccagaatggcaggcaccccttgatggagctttgtgcaaggaccttcgtgccaaacagtaccgaatgtggtggagataaaggaagggtcaaggtgatcactggccctaatagcagtgggaagtccatttatctcaagcaggttggcctaataaccttcatggcactcgttggttctttcgtgcctgccgaagaggcggaaataggtgccgtggatgccatatttactcgcatccactcatgcgagtctatcagtcttggactaagcacattcatgatagatctgaatcaagtggctaaagctgttaacaacgctaccgcgcagtctttggtgctaatagacgaatttggaaagggtacgaatacagttgatggcctggctttgctcgcagctgttctgcgccattggctcgcgagaggcccaacatgtccgcatatctttgttgccaccaatttcctctcccttgtccagctccagctcttgccacagggccctctggtgcagtacttgtag

SEQ ID NO: 248494 - DNA, 1491 bp, Artificial Sequence
  derived and/or modified sequence
accgtatacagcgccctgggtctgagggatgcgtgcagaagccttcctcagtctattcagctcttcagggatattgcccaagagttttccgacgatctgcaccacattgcatccttaatcggcaaggttgtggactttgagggcagcctggctgaaaataggtttacagtgttgccgaatattgatccagagattgatgaaaaaaaaagacgcttgatgggccttccctcatttcttactgaagtggctagaaaggagctcgagaacctggatagcagaatccccagctgctcagtcatctatatacccctgatcggattccttctctccatccctagattgccgtcgatggttgaagcctccgatttcgaaatcaacggtctcgactttatgttcctgtctgaggagaagctccattacaggtcagccagaacaaaagaactggatgcgctgcttggggatctgcactgcgagataagggaccaggagacactgttaatgtatcagctccagtgtcaggtcctggcgagagccgctgtgctgacccgcgtcctggacctggcatctcgtctggatgtgttgctggctttagcttctgctgcacgcgattacggctactcgcgcccaaggtactcgcctcaagtgctaggagtcaggatacagaacggtagacatcctctgatggagttgtgtgctcggacatttgttcccaacagcacggagtgcggaggcgacaaaggtagagtgaaggtgatcaccggccctaacagctcgggtaagtctatctatctaaaacaggtgggacttataaccttcatggcgctggtggggagctttgtgccggcagaggaggccgaaattggagcggtcgatgccatctttacacgtattcattcttgcgagagcattagcctcgggctttccacctttatgattgatctcaaccaagtggctaaggcagtgaataatgcgaccgcccaaagcctcgttctgatcgatgagttcggcaagggaactaatactgttgatggtctagccctcctcgctgccgtactgcgccactggctggcacgtggcccaacctgcccccacatcttcgtggccacaaacttcctgagccttgtgcagctccagctgctgccccaggggcctcttgtgcagtatctgacaatggagacctgcgaagatggtaatgacttggtgttcttttaccaagtgtgcgaaggcgtcgccaaagcctcccacgcttctcacactgctgcacaggccggactccctgacaagcttgttgccagagggaaagaagtctctgaccttattcgctcaggtaagccaataaaacctgtgaaagacctgcttaaaaagaatcaaatggagaattgccagacattagtcgacaagtttatgaagctggatcttgaggaccctaatctggacctgaatgtgttcatgtcccaggaagttctccccgctgccacaagtatactgtag

SEQ ID NO: 248495 - DNA, 585 bp, Artificial Sequence
  derived and/or modified sequence
atggcttccctgggagcaaatcctcgccgtacaccacagggacctaggcctggggctgccagttccggattcccatcacccgcaccagtgccaggccctagagaagctgaggaagaggaggtggaagaggaagaagaactagccgagattcacttgtgtgtcctttggaactctgggtatcttggcatagcctactatgatactagcgactcaaccatccatttcatgcccgatgccccagaccacgaaagcttaaagctcctgcagcgggtgctggacgagatcaatccccagagtgtcgtcacatctgcgaaacaggatgagaacatgacacgattcttgggcaaattggcgtctcaggagcaccgagagccaaaacgccctgagataatcttcctcccaagcgtagatttcgggctggagatcagtaaacagcgattactgagtgggaactactccttcatcccagacgcgatgacagcaactgaaaaaatactgtttttgtcctctataattcccttcgattgcctcctgactgttcgcgcactcggcggtttgctgaaattcctgggtcggagacggtag

SEQ ID NO: 248496 - DNA, 1002 bp, Artificial Sequence
  derived and/or modified sequence
aaaattctgttcttatcaagtatcatcccgtttgattgtctgctcacagtgagagcccttgggggtctcctgaagttccttggtcgccgtagaattggcgtcgagttggaagactacaacgtttccgtgccaattcttgggttcaagaagttcatgctgacacacctcgtcaacatagatcaggatacatacagcgttctacagatatttaaaagcgagtcgcatccatctgtgtacaaggtggcaagtggcctgaaagaaggactgtcattattcgggatactgaatagatgtcattgtaagtggggagagaagctgctgaggttgtggttcacccggccaacccatgatctcggggaattgtcctcccggttagacgtaattcaattttttctgctgccgcagaatctagacatggcacaaatgttgcacaggttgttaggccacatcaagaacgtccctctgatcctcaagcggatgaagctgtcccacaccaaagtgtccgattggcaggttctgtacaagacagtttattccgcattaggactacgagacgcctgtaggtccctgcctcagagcattcagctgttccgggacatcgcacaggagttctcagatgatctccaccacatagccagcttaattggtaaagtgtacctgagccctcaggtcgacttcgaaggctcccttgccgaaaatcggtttacagtcctgccgaacattgatcccgagattgacgagaagaagagaaggttgatgggccttccctctttcctgaccgaggtggcgagaaaggagctcgaaaacctggattcccggatccctagttgtagtgtgatctatattccgcttatcggattccttctgagcatacctagactaccttctatggtcgaggcatccgattttgaaatcaacggactcgactttatgttcctgagcgaggaaaaattacactaccgcagtgcacgaaccaaggagctggacgctctgctggggtag

SEQ ID NO: 248497 - DNA, 471 bp, Artificial Sequence
  derived and/or modified sequence
acagctcagtcactggtcctaatcgacgagttcggaaagggcaccaatactgtggatggactggcactgctcgctgccgtgctgagacactggcttgctagagggccaacatgccctcacatattcgtcgctactaatttcctgtccttggtgcagctgcagcttctgccgcagggtccgctagtgcaatatctcgtttgtgaaggcgtagcaaaagcttcccacgcaagccacacagccgctcaggcaggtctgcccgacaagctagtagctagggggaaggaggtctctgatctcataagaagcggcaaaccaattaagccagtcaaggatctgctgaagaagaaccagatggagaactgtcagacactagtagacaagttcatgaaattagatctcgaagatccaaatctcgatttgaatgtgtttatgtcccaggaagtgctccccgctgctaccagcatactttag

SEQ ID NO: 248498 - DNA, 2184 bp, Artificial Sequence
  derived and/or modified sequence
atggcttcgttgggagcgaaccctcgccgaacacctcagggcccacgcccaggcgctgcttcaagcgggttcccgtcaccggctcccgtgccgggacccagggaggcagaggaagaagaggtggaggaggaagaagagctggcagagattcacctgtgcgtgctgtggaatagcggctatctaggcattgcgtactacgataccagcgactcaaccattcacttcatgccagacgcacctgaccacgaatctttgaaactcctccagagggtgctcgacgagattaatcctcagagcgtcgttaccagtgcaaagcaggatgagaatatgactcggttcctaggcaaactggcatcccaagaacatcgcgagccaaagcgcccagaaataatttttctcccatccgtggacttcgggctagaaatatcaaaacagcggcttctgtctggcaactacagtttcataccggacgctatgactgccactgagaaaatcctctttctaagcagcatcatccccttcgattgtctgctgacagtaagggcccttggagggctgctcaaatttctgggtaggagacgtattggcgtggaactggaggattataacgtgtctgtcccaatccttggctttaagaagttcatgctgacacatctggtgaacatcgaccaggacacctacagcgtgctgcagatcttcaagtccgagtcgcatcctagcgtctacaaggtggcttccgggctaaaagaaggacttagtttgtttggcatcctaaatcgctgccactgtaaatggggcgaaaagctcttaagactgtggtttacacggcctacacatgacctgggggagttatcatcacgactagacgtgatccagttttttctcctgccccaaaatctcgatatggcacagatgctccaccggctcctgggacacataaagaacgtgccactcattttgaaaagaatgaaactgagtcatacaaaagtatccgattggcaagtattgtacaaaaccgtgtactctgccctcggccttcgtgacgcctgtaggagtcttcctcagagcatccaactgtttcgggacatcgctcaggaattctccgatgacctccatcatattgccagcctgattggaaaggtcgtagatttcgaaggttcactggctgagaataggttcaccgtgcttcctaacatagaccccgagattgacgagaaaaaaagacggctcatgggcctcccatccttcctgacagaggtggcgcgtaaagagttggaaaacctggactctcgaattccttcctgctccgtgatttatattccgcttatagggtttttgctgagcatccctagactgccatcaatggtggaagcttctgattttgaaattaacggcctggactttatgtttttatcagaggaaaagctgcactaccgctcagcccgaactaaagaactcgacgcgctgctgggagatctccactgtgaaatccgtgaccaggaaaccctcctgatgtatcagctgcagtgccaagttctcgctcgcgcagcagtgctcaccagggtgctggatttggcctcgcgcctggacgtgctgctcgccctggcgagcgccgcacgcgactatggatactcccggcctcgctactcacctcaggtgttgggtgtaagaatccaaaacggacggcacccattgatggaattgtgcgcaaggaccttcgtgcctaattctactgagtgcggcggagacaagggccgtgtaaaggtcataaccggaccgaatagcagcggaaaatccatctaccttaagcaggtgggcttaataactttcatggccctggttggctcgttcgtcccagctgaggaggcagaaatcggggctgtggacgccatattcactaggattcattcgtgtgagtccattagcttaggactgagcaccttcatgatcgatctgaaccaagtagccaaggccgtaaataacgcaacagcccaatcacttgtgcttatcgacgagtttggtaaggggaccaacacagtcgacggtctggctctgctcgcggcagtgttgcgccactggctggctcgcggaccaacatgcccacacatcttcgtcgctacaaacttcttgtccctcgtgcagctccagctcctgccgcagggccctctcgtgcagtacctctag

SEQ ID NO: 248499 - DNA, 1527 bp, Artificial Sequence
  derived and/or modified sequence
atgtggccagtactgctctttgtcttcctgtcacagactgtgtactcagctctgggacttcgcgatgcctgtagaagtctgccacagagcattcagctttttcgggacatcgcacaggaattctctgatgatctgcatcacatcgcaagtctaatcggaaaggtggttgactttgaaggttcgcttgccgagaatcgctttaccgtcttaccaaatattgatccagaaattgacgaaaaaaaaagacgtctgatgggactgccatccttcctgactgaggtcgcacgcaaagagctggagaatctggacagccgtattcctagttgcagcgtaatctatattccactgattgggttcctactgagcatccctaggttgccctcaatggtggaggcaagtgacttcgagatcaacgggctggattttatgttccttagcgaagaaaagctgcattataggtcagccagaaccaaggaacttgacgccctgctgggcgacctccattgtgaaatccgggaccaggaaactctgctcatgtatcagctgcagtgccaggtgctggctcgcgctgctgtgctcaccagagttttggatctggccagtagactggacgtcttgctggctctggctagcgcagccagggattatgggtactctagacccagatactccccgcaagtcctgggcgttagaatccagaacggcaggcacccattaatggaactctgcgcacggacattcgtcccgaactctactgaatgtggcggagataagggcagagtcaaagtcataactgggcctaatagctccggaaagagtatctacctgaagcaagttgggttaataaccttcatggccctggtaggctcattcgtacctgctgaggaggcagaaataggggcagtggatgctatttttactcggattcactcttgcgagtctatcagcttaggactgagcaccttcatgattgacctcaaccaggtggccaaggcagtaaacaacgccaccgcacagagtcttgttcttatcgacgaattcggaaaagggactaacacagttgacggactggcactgctggcggcagtgctccgtcactggctggcgagggggcctacctgccctcacatctttgttgctactaattttctcagcttggtgcagctccaacttctgcctcagggccctctggtgcagtacctgactatggagacctgcgaggacgggaacgatctcgtctttttctatcaagtatgtgagggcgtggcaaaggcttcgcatgcctctcacaccgcagcacaggccggacttcctgataagttggtcgctaggggcaaggaggtgagtgacctgattaggtcagggaaaccaatcaagccggtcaaagatctcttaaaaaagaaccaaatggagaattgccagaccttagtcgacaaatttatgaaactggacctggaagatccaaacctggacctaaatgtatttatgagccaggaagtactgcccgctgccacttctatcctctag

SEQ ID NO: 248500 - DNA, 408 bp, Artificial Sequence
  derived and/or modified sequence
ggttattcccgtcccaggtactcgcctcaagtcctcggtgtgcgcattcagaacgggaggcacccgttaatggagctctgtgctcggacatttgtccctaattcgacagagtgtggcggtgacaaaggcagggtcaaagtgataacaggtcctaattcctccggtaaatccatctacctgaaacaagtggcgaaagccgtgaataacgctaccgcccagtcgctggtcttaattgacgaattcggcaaggggacaaataccgtcgacggactggcgctcctggcggctgtacttaggcattggttggcaagagggccaacttgtcctcatattttcgtggccactaatttcttgtcgcttgtccagctccagctgcttccccaaggcccactggtgcagtatctgtag

SEQ ID NO: 248501 - DNA, 585 bp, Artificial Sequence
  derived and/or modified sequence
atggcctcccttggagctaatcccagaagaaccccacaaggcccaagacccggagccgcttctagcggctttccttcccctgcacctgtgccaggccctcgagaagccgaggaggaggaagtggaggaggaggaggagttagccgaaatccacctctgcgtcctgtggaatagcggttacctcgggatcgcttattacgatactagcgatagtaccatacacttcatgccagatgctcccgaccatgagagcctcaagctgctgcagagggttctcgacgagataaatccacaatcagtagtgacaagcgcaaagcaggacgagaatatgactcgatttctgggtaagctcgcctcacaggagcatagggagccaaagcgcccagagatcatcttccttccaagtgtcgactttgggctggaaattagcaagcaaaggctgttgtctggcaattactccttcatccctgacgctatgacagcaaccgagaagatcctgttcctctcttcaattatcccttttgactgcctgctgaccgttagggcacttgggggtctcctgaagttcctgggacgcagaaggtag

SEQ ID NO: 248502 - DNA, 1491 bp, Artificial Sequence
  derived and/or modified sequence
acggtgtacagtgccctgggtctgagggacgcatgccgctctttaccccaatccatccagctgttcagggatatcgcacaagagttcagtgatgatcttcaccacattgcttctttgattggcaaagtggtggattttgagggcagtctggccgaaaatcggtttactgttctgcctaacatcgacccggagattgacgaaaaaaagcgtcgtctaatggggttgccatcctttctgactgaggtggcccgtaaggagctcgagaatctagactcaaggatcccaagttgtagcgtaatttatatccccctgattggctttttattgagtattcctcgactacctagcatggtcgaagcatctgactttgagattaacggcctggactttatgtttctgagcgaagagaagttacattatagatcggctagaactaaggagctcgatgccctcctgggcgatctgcactgcgagatacgcgatcaggagacccttcttatgtaccaacttcagtgtcaggtcttagctcgagctgcagtccttacgagagtgctagaccttgctagcaggctggatgtcctcttagcattagcttcggcagccagagattatgggtatagtcggccaagatactccccgcaggtgctgggagtgcgaatacagaacggacggcacccactcatggaactatgtgcccgtacctttgtgcctaatagcaccgagtgcgggggtgacaagggccgtgtgaaagtgataaccggtccaaatagctctggaaagtctatctacctgaaacaggtggggctgataacttttatggcgctggtcggatcgttcgttcccgctgaggaggctgaaatcggcgctgtggatgcgatatttaccaggatccatagctgcgaaagcatcagcttaggcttgtcaaccttcatgatagacttgaatcaggtcgctaaagcagtcaataacgccacagctcagagtctcgtgctcatcgatgagtttggtaaaggcactaatacagtggacggcttagccctgttggcggcagtcttgcgtcattggctagcacgtggaccgacttgcccacacatttttgtcgcaacgaactttttgtcgctggttcaattgcagctgctcccccagggtcctctggtccagtacctgacaatggaaacatgtgaggatggtaacgacctggtatttttttaccaagtatgcgaaggcgttgctaaagccagtcatgcatcccatactgccgctcaggcagggctacccgataaattggtagctcgagggaaggaagtgagtgacctgatacgctcaggcaagcctattaagccagttaaagatttactcaagaaaaatcagatggaaaattgccagactcttgttgataagttcatgaagcttgatctggaagatcccaacctggaccttaacgtgttcatgtctcaggaagttttacctgccgcaactagtattttgtag

SEQ ID NO: 248503 - DNA, 2184 bp, Artificial Sequence
  derived and/or modified sequence
atggcctctctgggggcaaatccgcgtaggactccacaaggacctcggccaggagcggcttcgtcaggatttccaagccctgccccagtacccggtccaagagaagccgaggaagaagaggtggaagaggaagaggaactcgctgagatccacctttgtgtgctgtggaacagcgggtacctgggtatcgcctactatgacacctccgactccactatccactttatgcctgatgcaccagatcatgagagtctgaagttattgcagagagtccttgatgagatcaatccccagtcagtggtgacatccgctaagcaggatgagaacatgacccgattcctagggaagttagcctcacaggaacaccgcgaacctaagagaccggagatcattttcctgcccagcgtcgactttggcctggagataagcaagcagcggctgctctccggaaattacagctttatccccgacgcaatgactgcaacagagaagattctgttcctgtcaagcattattccctttgattgccttctgactgtgcgcgctctcgggggactgctcaagttcctaggaaggcgcaggatcggcgtggaactcgaggattataacgtctcggtcccaattcttggctttaagaaatttatgctgacacatctggtgaacattgatcaagacacatatagcgttctccaaatttttaagtcagaatcccacccaagtgtgtacaaagttgcctccggacttaaggaggggctcagcttatttggaatcctaaaccggtgccattgtaagtggggtgagaagctgctcagactttggttcactagacctacgcatgatctgggagagctgagctcaaggctggacgtgattcagttttttcttttaccgcagaacttggacatggctcaaatgttacaccgcctgctcggacacatcaaaaatgtgccactgattctgaagcggatgaagctgtcccatactaaggtgtctgactggcaggtgctctacaagactgtctatagtgccttagggttgagagatgcttgcagatctctgccacagagtatccagctgtttcgcgatatcgctcaggaattctccgatgacctgcatcacatcgcttctctcatcggcaaagtggttgatttcgaaggcagtttggcagagaacaggtttaccgtgctcccaaatatagacccagagatcgatgagaagaagaggagactgatgggtctcccttcctttctgaccgaggttgcacggaaggagctggaaaacctggacagcaggattcccagctgctcagtgatatatattcctttgattggcttccttctgagcatccccaggctgccaagcatggtagaggcttccgatttcgaaatcaacggactcgactttatgtttttgagtgaagagaagcttcattaccgtagtgccagaacaaaggagctggacgcactactgggagacctgcattgcgagatccgggatcaggagacactgctgatgtatcaacttcaatgtcaggtgcttgcacgtgctgccgttctaacccgagtgctcgacctggcctccagactggatgtgctgttggccttagcttctgccgctagggattacgggtattctcggcctcggtattccccccaagtgctcggcgtccgtatccagaacggacgtcaccctctgatggaactgtgtgctagaacctttgtacccaacagtacagagtgtggaggggacaaagggagagttaaggtgatcacaggtcccaattccagcggcaaatcgatttacctgaagcaggtcggactcatcaccttcatggcactggtaggtagcttcgtccctgccgaggaggccgagattggcgctgtcgatgctattttcactagaattcacagctgcgaatctatttcactggggctttccaccttcatgattgacctgaatcaggtggccaaagctgtcaataatgcgacagcgcagagcctggtcttaatcgacgaattcggaaagggcaccaataccgtcgacggcctcgcgttgctggccgctgtgctgcggcattggctggccagaggacccacttgcccccatatcttcgtggctaccaacttcctgtccctggtgcagctgcagttgttgccgcagggtcctctggtgcaatacctttag

SEQ ID NO: 248504 - DNA, 765 bp, Artificial Sequence
  derived and/or modified sequence
atggcgtcattgggcgctaatcctaggagaacaccgcaggggccaaggccaggcgcagcctcctctggctttccctcccctgcgcctgtacccggaccaagagaagcagaggaggaggaagtggaagaggaagaagagttggccgagatccacctgtgcgtgttgtggaattctggatatcttggcattgcctattatgacacatccgattctacaatacacttcatgccagacgcacctgatcacgagagtctgaaactgctccagagagtgctcgatgagataaatccccaaagcgtagtcacgagcgcaaaacaggatgaaaatatgacccgattcttaggtaagctggcaagccaggagcatcgcgaacccaaacggccagagatcatttttctcccatcagtggattttggccttgaaatctccaaacagcgcctcctgtctgggaattatagtttcatccccgatgctatgacagccactgagaagatcttgtttttgtcctccattatcccattcgactgcctcctgacggtccgggcactaggaggcctactcaaatttttaggccgtagacgtatcggcgttgagttagaggattacaacgtttccgtgcccatcctgggcttcaagaagttcatgctgacccacttagtgaacattgaccaggacacatatagactggaatgcaacggcgctatcagcgctcagtgcaatttgtgtcttttgggaagtagtgactcacccgcatcagcaagctag

SEQ ID NO: 248505 - DNA, 792 bp, Artificial Sequence
  derived and/or modified sequence
cattacagatcagctaggactaaggagttggacgcactgctgggagacttacattgtgaaatccgcgaccaggagactctgctgatgtaccagcttcagtgtcaggtgcttgctcgcgcagctgtgctcacacgagtcctggacctggcctctagattggacgtactcctcgcgcttgcatccgccgcacgcgattatgggtacagccgtccaagatacagtccacaggttttaggcgtgaggattcagaatggaagacacccgctcatggagctgtgcgccaggacctttgttccaaactcgaccgaatgtggcggtgacaagggtcgggtgaaggtcataaccggtcctaattcatctggcaaatccatatacctgaagcaagtgggcctcatcaccttcatggctcttgttggaagctttgtaccagccgaagaggcagagatcggagcagtggatgctattttcacaaggatccattcgtgtgagtcaatctccctcggactgtccactttcatgatcgacttaaaccaggttgctaaggctgtgaacaatgcaacggcgcaatcccttgtcctgatcgacgagttcggcaaaggcacaaatactgttgacgggttggcactgcttgcagcggtgcttagacactggttagctcggggacctacatgcccccacatcttcgtcgccaccaactttctatctctggttcaactgcagctgctgcctcaagggcctctcgtccaatatttggactggccacgagtttccggccaagaagggggagattag

SEQ ID NO: 248506 - DNA, 816 bp, Artificial Sequence
  derived and/or modified sequence
atgttcctgtcagaagagaagctgcactatagaagcgcgaggactaaggagctggacgccctactgggagacctccactgcgagattcgagatcaagagacactactcatgtaccagttgcagtgtcaagtgctagcgagggctgccgtcctcacgcgggtccttgaccttgcctcccgtctggacgttttattagcactcgcctcagccgctagggactacggttactccagacctagatactctccgcaggtcctgggagtgcggatccaaaacgggaggcaccctctgatggagctgtgtgccaggacttttgtgcctaactcaactgagtgtggaggagacaaaggaagggtaaaagtcatcaccggtcccaacagcagtggcaagtccatttatttgaagcaagtggggttaatcacttttatggctctggtcgggagttttgtgcctgccgaagaggccgaaataggagctgtcgatgcaattttcacacggattcacagctgcgaatcaatcagcctgggactgtcaactttcatgatagacttgaatcaggttgccaaggcagtgaacaatgccactgcccagagcctggtcctcatcgacgagtttggcaaggggactaatacagtggacggccttgccttgctcgccgctgtgttgcgtcactggctcgcaaggggccctacctgcccacatatcttcgtggccaccaattttttgagtctggttcagctgcaattgctcccacagggaccgctggtacagtacttagattggcctcgcgtatcgggacaggaaggaggtgactag

SEQ ID NO: 248507 - DNA, 2348 bp, Artificial Sequence
  derived and/or modified sequence
agcggctaggagggcggggcgcgtgcgcgcgcacctcgctcacgcgccggcgcgctccttttgcaggctcgtggcggtcggtcagcggggcgttctcccacctgtagcgactcagagcctccaagctcatggcctccttaggagcgaacccaaggaggacaccgcagggaccgagacctggggcggcctcctccggcttccccagcccggccccagtgccgggccccagggaggccgaggaggaggaagtcgaggaggaggaggagctggccgagatccatctgtgtgtgctgtggaattcaggatacttgggcattgcctactatgatactagtgactccactatccacttcatgccagatgccccagaccacgagagcctcaagcttctccagagagttctggatgagatcaatccccagtctgttgttacgagtgccaaacaggatgagaatatgactcgatttctgggaaagcttgcctcccaggagcacagagagcctaaaagacctgaaatcatatttttgccaagtgtggattttggtctggagataagcaaacaacgcctcctttctggaaactactccttcatcccagacgccatgactgccactgagaaaatcctcttcctctcttccattattccctttgactgcctcctcacagttcgagcacttggagggctgctgaagttcctgggtcgaagaagaatcggggttgaactggaagactataatgtcagcgtccccatcctgggctttaagaaatttatgttgactcatctggtgaacatagatcaagacacttacagtgttctacagatttttaagagtgagtctcacccctcagtgtacaaagtggccagtggactgaaggaggggctcagcctctttggaatcctcaacagatgccactgtaagtggggagagaagctgctcaggctatggttcacacgtccgactcatgacctgggggagctcagttctcgtctggacgtcattcagttttttctgctgccccagaatctggacatggctcagatgctgcatcggctcctgggtcacatcaagaacgtgcctctgattctgaaacgcatgaagttgtcccacaccaaggtcagcgactggcaggttctctacaagactgtgtacagtgccctgggcctgagggatgcctgccgctccctgccgcagtccatccagctctttcgggacattgcccaagagttctctgatgacctgcaccatatcgccagcctcattgggaaagtagtggactttgagggcagccttgctgaaaatcgcttcacagtcctccccaacatagatcctgaaattgatgagaaaaagcgaagactgatgggacttcccagtttccttactgaggttgcccgcaaggagctggagaatctggactcccgtattccttcatgcagtgtcatctacatccctctgattggcttccttctttctattccccgcctgccttccatggtagaggccagtgactttgagattaatggactggacttcatgtttctctcagaggagaagctgcactatcgtagtgcccgaaccaaggagctggatgcattgctgggggacctgcactgcgagatccgggaccaggagacgctgctgatgtaccagctacagtgccaggtgctggcacgagcagctgtcttaacccgagtattggaccttgcctcccgcctggacgtcctgctggctcttgccagtgctgcccgggactatggctactcaaggccgcgttactccccacaagtccttggggtacgaatccagaatggcagacatcctctgatggaactctgtgcccgaacttttgtgcccaactccacagaatgtggtggggacaaagggagggtcaaagtcatcactggacccaactcatcagggaagagcatatacctcaaacaggtaggcttgatcacattcatggccctggtaggcagctttgtgccagcagaggaggccgaaattggggcagtagacgccatcttcacacgaattcatagctgcgaatccatctcccttggcctctccaccttcatgatcgacctcaaccaggtggcgaaagcagtgaacaatgccactgcacagtcgctggtccttattgatgaatttggaaagggaaccaacacggtggatgggctcgcgcttctggccgctgtgctccgacactggctggcacgtggacccacatgcccccacatctttgtggccaccaactttctgagccttgttcagctacagctgctgccacaagggcccctggtgcagtatttggattggccaagggtttcaggacaggaaggaggtgattga

SEQ ID NO: 248508 - protein, 371 aa, Artificial Sequence
  derived and/or modified sequence
MAGPRYPVSVQGAALVQIKRLQTFAFSVRWSDGSDTFVRRSWDEFRQLKKTLKETFPVEAGLLRRSDRVLPKLLDAPLLGRVGRTSRGLARLQLLETYSRRLLATAERVARSPTITGFFAPQPLDLEPALPPGSRVILPTPEEQPLSRAAGRLSIHSLEAQSLRCLQPFCTQDTRDRPFQAQAQESLDVLLRHPSGWWLVENEDRQTAWFPAPYLEEAAPGQGREGGPSLGSSGPQFCASRAYESSRADELSVPAGARVRVLETSDRGWWLCRYGDRAGLLPAVLLRPEGLGALLSGTGFRGGDDPAGEARGFPEPSQATAPPPTVPTRPSPGAIQSRCCTVTRRALERRPRRQGRPRGCVDSVPHPTTEQ

SEQ ID NO: 248509 - DNA, 1116 bp, Artificial Sequence
  derived and/or modified sequence
atggccggccccagataccccgtgagcgtgcagggcgccgccctggtgcagatcaagagactgcagaccttcgccttcagcgtgagatggagcgacggcagcgacaccttcgtgagaagaagctgggacgagttcagacagctgaagaagaccctgaaggagaccttccccgtggaggccggcctgctgagaagaagcgacagagtgctgcccaagctgctggacgcccccctgctgggcagagtgggcagaaccagcagaggcctggccagactgcagctgctggagacctacagcagaagactgctggccaccgccgagagagtggccagaagccccaccatcaccggcttcttcgccccccagcccctggacctggagcccgccctgccccccggcagcagagtgatcctgcccacccccgaggagcagcccctgagcagagccgccggcagactgagcatccacagcctggaggcccagagcctgagatgcctgcagcccttctgcacccaggacaccagagacagacccttccaggcccaggcccaggagagcctggacgtgctgctgagacaccccagcggctggtggctggtggagaacgaggacagacagaccgcctggttccccgccccctacctggaggaggccgcccccggccagggcagagagggcggccccagcctgggcagcagcggcccccagttctgcgccagcagagcctacgagagcagcagagccgacgagctgagcgtgcccgccggcgccagagtgagagtgctggagaccagcgacagaggctggtggctgtgcagatacggcgacagagccggcctgctgcccgccgtgctgctgagacccgagggcctgggcgccctgctgagcggcaccggcttcagaggcggcgacgaccccgccggcgaggccagaggcttccccgagcccagccaggccaccgcccccccccccaccgtgcccaccagacccagccccggcgccatccagagcagatgctgcaccgtgaccagaagagccctggagagaagacccagaagacagggcagacccagaggctgcgtggacagcgtgccccaccccaccaccgagcagtag

SEQ ID NO: 248510 - DNA, 1116 bp, Artificial Sequence
  derived and/or modified sequence
atggctggcccaagatatccggtgtctgtgcaaggtgctgccctggtccagataaagaggctgcaaaccttcgcctttagcgttcgctggtctgacggatctgatacttttgtgaggagatcctgggacgagtttaggcaactgaagaaaaccctgaaggagacatttcccgtggaggctggtcttctccggcgctccgacagggtactgccgaaactgctggacgcgcccctgctcggaagagttgggcggacttcaagaggcctagcccgccttcagctgctcgaaacctactcacgccgtttgttggccaccgcagaacgcgtggcacggtctccaacaatcacaggattcttcgctcctcagccgctggacttggagcctgctctgccccccggcagtcgagtgattctgccaactcccgaagagcagcccctgtctcgggccgctggtagactgtccattcactcgttagaggctcaaagtctgcggtgcctgcagccattctgcacccaggacacccgagaccgaccgtttcaagctcaagcgcaagagagtctggacgtgctcctgcgtcatccaagtggctggtggctggtcgagaatgaggacaggcagactgcctggttccctgccccttacctcgaggaagcagcccccggccagggacgagagggagggcccagtttgggatcgtcaggccctcaattttgcgccagccgggcatatgaatcttccagagctgatgaattgtctgtgcctgcaggcgccagagtcagagtactagagaccagcgacaggggctggtggctttgccgatatggtgaccgagctgggctactgccagcagtactactgagacccgagggactgggggcgcttctgagtggaactggtttccgcgggggggatgatccagcaggggaggctaggggtttcccggagccaagccaggctactgctccgcccccaaccgtgccaacaaggccgagtcctggcgcaatacagtcccgttgttgtacagtcacaagaagggcgctggaacgccggccccggcgccagggaaggcctcgtgggtgcgtggatagtgttccacaccccaccacagaacagtag

SEQ ID NO: 248511 - DNA, 1116 bp, Artificial Sequence
  derived and/or modified sequence
atggccggcccccgctaccctgtgtctgtgcagggcgccgccctggtgcagatcaagaggctgcagacctttgccttctctgtgcgctggagcgatggcagtgacacctttgtgagaagatcctgggatgagttccggcagctgaagaagaccctgaaggagaccttccctgtggaggccggcctgctgcggcggagtgacagagtgctgcccaagctgctggatgcccccctgctgggccgggtgggccgcaccagccggggcctggcccggctgcagctgctggagacctacagccggcggctgctggccacagctgagcgggtggcccggagccccaccatcaccggcttctttgccccccagcccctggacctggagcccgccctgcccccaggcagcagggtcatcctgcccaccccagaggagcagcccctgagcagagctgctggccgcctgagcatccacagcctggaggcccagagcctgcgctgcctgcagcccttctgcacccaggacacccgggaccggcccttccaggcccaggcccaggagagcctggatgtgctgctgcggcaccccagcggctggtggctggtggagaatgaagatcggcagacagcctggttccctgccccctacctggaggaggccgcccctggccagggccgggagggcggccccagcctgggcagcagcggcccccagttctgtgccagccgggcctatgagagcagcagagcagatgagctgtctgtgcctgctggggcccgggtgcgggtgctggagaccagtgaccggggctggtggctgtgccgctacggggaccgggccggcctgctgcctgctgtgctgctgcggcctgagggcctgggcgccctgctgagcggcaccggcttcagaggaggagatgatcctgctggggaggcccggggcttccctgagcccagccaggccacagcccccccacccaccgtgcccacccggcccagccctggggccatccagagccgctgctgcaccgtgacccggcgggccctggagcggcggccccggcggcagggccggccccggggctgtgtggacagcgtgccccaccccaccacagagcagtag

SEQ ID NO: 248512 - DNA, 1539 bp, Artificial Sequence
  derived and/or modified sequence
tcttgcacgcctccagggctggaaagctcattcttcttcttcctcccagcagctctgcctggaagtcccccaatccctgtgctcctgcccccagatcgtgggcttgggggacagcaagaaagctgcaaaggactcagctggggcggctccacaaggaccccacaggcttgaggtgttgccaggattctatcccagggggttttctgggtcccccagagccctctcaagcacggggaggcagaagggtcctcgcccatttcaggaatctgcagcctggaagccacagccatggcaggcccccgatacccagtttcagtgcaaggggcagccctggtgcagatcaagaggctccaaacgtttgccttctctgtgcgctggtcagacggcagcgacaccttcgtgcgcaggagttgggacgaattcaggcagctcaagaagaccctcaaggagaccttcccggtggaggcgggcctgctgcggagatctgaccgcgttctcccaaagcttctcgatgcaccactgttgggacgcgtggggcgcacgagccgcggcctggcgcgcctgcagctgttggaaacctattctcggaggctgctggcgactgcagagcgcgtggcacggagcccgacgatcactggcttcttcgcaccgcaacccctggacctggagcccgcgctgccacccggcagccgggtgatcctgcccaccccagaggagcagcctctttctcgcgctgcgggccgcctctccatccacagtctggaggctcagagcctgcgctgcctgcagcccttctgtacccaggacacgcgggataggccttttcaggcgcaggcccaggagagcctggacgtgctgctgcggcacccctcaggctggtggctggtggagaacgaagaccggcagaccgcctggtttccagcgccctacctggaggaggcggccccgggccaaggccgggagggaggcccgtccctagggagcagcggtccccagttctgtgcttcccgcgcctacgagagcagccgcgcagatgagctgtccgtgcccgcgggggcgcgcgtgcgcgtgttggaaacgtcagaccgcggctggtggctatgcaggtacggcgaccgggcgggcctactccccgcggtgctgctgcggccggaagggctgggcgctctcctgagcgggacggggttccgtggaggagacgacccggcgggtgaggcccggggcttccctgaaccctcccaggccaccgcccctccccccaccgtgcccacccgaccttcgccgggcgccatccagagccgctgctgcaccgtcacacgcagggccctggagcggcgcccacggcgccagggccgccctcgagggtgcgtggactctgtgccgcaccccacgacggagcagtgagcgcgaggatcccgatgaggggatggaccgcgccatcccagggctggggaggagcggggagggcggatctccctggccagcagggatgggagggggccatttgctgttcctctgagtaaagcttgttctgcatga

SEQ ID NO: 248513 - DNA, 1116 bp, Artificial Sequence
  derived and/or modified sequence
atggccggcccccggtaccccgtgagcgtgcagggcgccgccctggtgcaaattaagagactccagacctttgctttttcagtccgctggtcagacggtagtgacacttttgtgagaaggtcatgggatgagtttcggcagctgaagaagacccttaaagagacctttcccgtggaggcaggactgctccgcagaagcgatcgcgtgctgccaaagttattggatgcgcccctcttgggtcgagtgggccgtacctctagagggctggcacgcttgcagcttcttgagacttattcccgcaggctgcttgcgaccgctgagagggttgcacgctccccaactatcaccggcttctttgctccacaacccttagacctcgagcccgctttgcctccgggaagccgggtcattctgccaacacctgaggagcagcccctgtctagagctgctggtaggttgtcaatccattccctcgaggcccaatcgctccgctgtctgcaaccattctgcacacaggatactagagaccgtccattccaggctcaggcccaagagtccctggatgtactactgcggcatcctagcggctggtggcttgtggaaaatgaagataggcagactgcatggtttccggccccatatttagaggaggcagcccctggacagggtcgcgagggaggacctagcctcggatcttccggaccacagttctgtgcttctcgtgcctacgaaagctcccgggcagacgaacttagtgttccagctggtgcccgagtgagagtcctcgaaacatccgaccgcggctggtggctttgtagatatggtgacagagcaggcctgctccctgctgttctcctccggcctgaaggtctcggtgccctactaagtgggactggttttagggggggagacgacccagccggagaagcgagaggtttcccggaaccgtctcaagccaccgcaccaccaccgacggtgccaaccagaccttctcctggtgctatccagagtcgttgttgcacagttactcgccgcgcacttgaaagacgccctaggcggcaaggccgtcccagggggtgtgtggacagtgtccctcatccaaccacggaacagtag

SEQ ID NO: 248514 - DNA, 1116 bp, Artificial Sequence
  derived and/or modified sequence
atggctggtccgcgatacccagtgtcggtccagggggcagcgctggtgcagatcaagaggctgcagacatttgcatttagcgtgagatggtcggatggaagcgacacctttgtgcgcagaagctgggatgagtttcggcagctgaagaaaaccctcaaagagacttttccagtggaagccggtctgttgagacgaagtgaccgggtgctgcctaagctgcttgacgccccactcttgggcagggtgggccgaacttctaggggtctggccagattgcagctgcttgagacttatagtaggcggctccttgctactgctgaaagggtcgctcggagcccaacaatcaccggatttttcgccccacaacccctggatttagaacccgcactgcctcccggttccagggtgatcctgcccacccccgaagagcaaccgctgagtcgggcagctggtagactcagcatacattccctcgaggcacagtcgctgcggtgcctacagcctttttgtacacaggataccagggatagaccttttcaagcccaagcccaggaaagtcttgacgtgcttctgcgccacccttcagggtggtggctggttgagaacgaagatcgccaaactgcctggttccccgcaccttacttagaagaagcagcaccgggacaaggaagggaaggaggtcccagtctcggatccagcggaccgcagttctgcgcctcgcgggcttacgagagttccagagccgatgagttaagcgtaccggcaggcgcacgggtgcgggtgctggagacatcagacagaggatggtggctctgtcgctatggcgaccgggctggtctgctgcctgccgtacttcttcgcccagaagggctcggcgcactgcttagcggaaccggcttcaggggcggtgatgatccggctggggaggcccgaggtttccctgaacccagccaggcaacggcaccacccccaacagtccctacaagaccgagcccgggagcgattcaatctcgctgttgcaccgtgacgcgcagggctctagagcggaggcctagacgccagggacgccctcggggatgtgtggattcagtcccacatcctacaacagagcagtag

SEQ ID NO: 248515 - protein, 527 aa, Artificial Sequence
  derived and/or modified sequence
MATTATCTRFTDDYQLFEELGKGAFSVVRRCVKKTSTQEYAAKIINTKKLSARDHQKLEREARICRLLKHPNIVRLHDSISEEGFHYLVFDLVTGGELFEDIVAREYYSEADASHCIHQILESVNHIHQHDIVHRDLKPENLLLASKCKGAAVKLADFGLAIEVQGEQQAWFGFAGTPGYLSPEVLRKDPYGKPVDIWACGVILYILLVGYPPFWDEDQHKLYQQIKAGAYDFPSPEWDTVTPEAKNLINQMLTINPAKRITADQALKHPWVCQRSTVASMMHRQETVECLRKFNARRKLKGAILTTMLVSRNFSVGRQSSAPASPAASAAGLAGQAAKSLLNKKSDGGVKKRKSSSSVHLMEPQTTVVHNATDGIKGSTESCNTTTEDEDLKVRKQEIIKITEQLIEAINNGDFEAYTKICDPGLTSFEPEALGNLVEGMDFHKFYFENLLSKNSKPIHTTILNPHVHVIGEDAACIAYIRLTQYIDGQGRPRTSQSEETRVWHRRDGKWLNVHYHCSGAPAAPLQ

SEQ ID NO: 248516 - DNA, 1584 bp, Artificial Sequence
  derived and/or modified sequence
atggctaccactgcaacatgtacgcgcttcactgacgattatcaattattcgaggaattaggaaagggggccttcagtgtggttcggcggtgcgtgaagaagactagcacccaggagtatgcagctaagattattaatacaaagaagctctcggccagagatcaccagaagctggaaagggaggcccgaatatgtcgactgctgaagcacccaaacatagttaggctgcacgacagtatatccgaggagggatttcactacctggtgttcgacctcgtaaccggcggggagctatttgaggacattgtcgctagggaatactattccgaggccgatgctagccactgtattcaccagatcctagagtccgtgaatcatatccaccaacatgacatagtgcatagagacctcaaaccagagaacctgctactggcaagcaagtgcaaaggcgctgctgtgaagctggcagattttgggctggctattgaggtgcagggcgagcagcaggcctggtttggatttgctgggactccaggttatcttagtcccgaggttctgcggaaggacccctacggtaagcccgtggatatttgggcttgcggcgtcatactgtacatcctcttagttggatatcctcccttctgggacgaggaccagcataaactgtaccagcagattaaggctggcgcgtacgatttcccatctccagagtgggacacagttacaccagaggccaagaatctcattaatcagatgctcacaattaatcccgccaagcggatcacagccgatcaagccttgaaacatccctgggtgtgccagaggtcaactgtggcaagcatgatgcatagacaggagactgttgaatgcctccggaaatttaatgcccgcaggaaacttaagggggcaatactgacaacaatgctcgtatccagaaacttctcggtgggacggcaatccagcgctccagccagtcccgcagcttcagccgctgggctggccggacaagctgctaagtccctgttgaacaaaaaaagcgatgggggcgtgaagaaacgcaaaagttcaagctcggtgcacttaatggaacctcaaaccactgtcgtgcataatgccaccgacggcatcaagggatccactgagtcttgcaacacgaccaccgaagatgaagatttaaaagtgagaaaacaggagattataaaaatcacagagcagctcatcgaggcaataaataacggagatttcgaggcttatactaagatctgcgaccccggcttgacaagcttcgagccagaggcactggggaatctcgtggaagggatggacttccataaattttactttgagaacctcttgtccaagaatagtaagcccattcatacgactattttgaacccgcacgtgcacgtgattggggaagacgccgcgtgcatcgcctatattcggctgacccagtatattgacggccaaggacggccaaggactagtcagagcgaggaaacgagagtgtggcacaggagggatggcaagtggctgaatgtccattatcactgttccggagctcccgctgcacctttgcagtag

SEQ ID NO: 248517 - DNA, 1584 bp, Artificial Sequence
  derived and/or modified sequence
atggccaccacagccacctgcacccgcttcacagatgactaccagctgtttgaggagctgggcaagggggccttctctgtggtgagaagatgtgtgaagaagaccagcacccaggagtatgctgccaagatcatcaacaccaagaagctgagcgcccgggaccaccagaagctggagcgggaggcccgcatctgccgcctgctgaagcaccccaacatcgtgcggctgcatgacagcatcagcgaggagggcttccactacctggtgtttgacctggtgactggaggagagctgtttgaggacatcgtggcccgggagtactacagcgaggctgatgccagccactgcatccaccagatcctggagagcgtgaaccacatccaccagcacgacatcgtgcaccgggacctgaagccagagaacctgctgctggccagcaaatgtaaaggagctgctgtgaagctggccgactttggcctggccatcgaggtgcagggcgagcagcaggcctggtttggatttgctggcaccccaggctacctgagccctgaggtgctgaggaaggacccctacggcaagcctgtggacatctgggcctgtggggtcatcctgtacatcctgctggtgggctacccacccttctgggatgaggaccagcacaagctgtaccagcagatcaaggccggggcctatgacttccccagccctgagtgggacacagtgaccccagaggccaagaacctgatcaaccagatgctgaccatcaacccagccaagaggatcacagctgaccaggccctgaagcacccctgggtgtgccagaggagcacagtggcctccatgatgcaccggcaggagaccgtggagtgcctgaggaagttcaatgcccggaggaagctgaagggggccatcctgaccaccatgctggtgtccaggaacttctctgtgggccggcagagcagcgccccagccagccctgctgccagcgctgctggcctggccggccaggccgccaagagcctgctgaacaagaagagtgatggaggagtgaagaagaggaagagcagcagctctgtgcacctgatggagccccagaccaccgtggtgcacaatgccacagatggcatcaagggcagcacagagagctgcaacaccaccacagaagatgaggacctgaaggtgaggaagcaggagatcatcaagatcacagagcagctgattgaggccatcaacaacggggactttgaggcctacaccaagatctgtgaccccggcctgaccagctttgagcctgaggccctgggcaacctggtggagggcatggacttccacaagttctactttgagaacctgctgagcaagaacagcaagcccatccacaccaccatcctgaacccccacgtgcacgtgattggagaagatgctgcctgcatcgcctacatccggctgacccagtacattgatggccagggccggcccaggaccagccagagcgaggagaccagggtgtggcacagaagagatggcaagtggctgaatgtgcactaccactgcagcggggccccagctgcccccctgcagtag

SEQ ID NO: 248518 - DNA, 1584 bp, Artificial Sequence
  derived and/or modified sequence
atggccaccaccgccacctgcacccggttcaccgacgactaccagttgtttgaggagttgggtaaaggggcgtttagtgtggtccgtaggtgcgttaaaaagactagtacccaagagtatgctgccaagatcatcaacacgaagaagttaagtgccagagatcatcaaaagctggaacgggaggccagaatttgcaggctgctgaaacatcccaacatcgtccgcctgcacgacagcataagcgaggagggattccattaccttgtctttgaccttgtcaccggaggggagctgttcgaggacattgtagctcgcgagtattacagtgaagccgatgcatctcattgcatacatcaaatccttgagtcagttaatcatatccaccagcacgacatcgtccaccgtgacctgaagcccgaaaatttgctcctcgcttctaaatgtaaaggggcagcggttaagctcgcggatttcgggctggcgatagaagtccagggagagcagcaggcatggtttggcttcgccggtacgccaggctacctctctccagaggtgctgcgtaaggacccctacggtaaaccagtggacatctgggcttgcggggtcattctgtacatcttattagtcggatacccacctttttgggatgaagaccagcacaaactttaccagcagattaaggcaggtgcatatgatttcccctcacctgagtgggataccgtgacccccgaggccaaaaaccttatcaatcagatgttgactataaatcccgcaaaaagaataactgccgatcaggctctcaaacatccctgggtctgtcaacggagcaccgtcgcttccatgatgcatcggcaggaaaccgtggagtgtctaagaaagttcaacgccaggcgcaaactaaagggtgccatccttactacaatgctggtttcccgcaatttctccgtaggacgacagtcttctgcccccgcaagccctgctgcctcagccgccggtcttgccggacaggcagcaaagtccctgctcaataagaagagtgacgggggcgtgaagaagagaaaatccagctcctctgtgcatctcatggagccgcagactactgttgtccacaacgctaccgacggaatcaaagggagtaccgagagctgcaatactaccactgaggatgaggacctaaaggtgcgaaaacaagagattataaaaatcaccgaacagcttattgaagctatcaacaacggagactttgaagcgtataccaaaatctgtgatcccgggctcacctcctttgagccagaagcactcggcaatctggtcgagggcatggatttccacaagttttacttcgaaaacctgcttagtaaaaactccaagccaatccacaccaccattctgaacccccacgtacacgtgattggtgaggacgcagcctgcattgcatatatccgattaacccagtacatcgacgggcagggacggcctcggacgtctcaaagcgaggaaacgcgagtctggcataggcgggacggcaagtggttaaatgttcattaccactgctctggtgcccccgctgccccactgcaatag

SEQ ID NO: 248519 - DNA, 1584 bp, Artificial Sequence
  derived and/or modified sequence
atggccacaacagcgacctgcacacgctttactgatgactaccagttatttgaagagctgggtaagggcgcattcagcgtggtgcggaggtgcgttaagaaaacctccactcaggagtatgctgccaaaataataaacactaaaaagcttagtgcacgggatcatcagaagctagagagggaggctcggatctgtagactcctgaagcatcccaacatcgtccgcttacatgacagtattagtgaagaagggtttcattacttggtgtttgacctggtcaccggaggcgaattatttgaagatattgttgctagggagtactacagcgaggccgacgcgtcccactgtattcatcagattttggaatctgtgaatcacattcatcaacacgatattgtgcatagggatttgaaacccgagaacctgctgctcgcatccaagtgcaagggggcagcggtaaaactggctgacttcgggttagccatagaagtccagggagaacaacaggcttggttcgggtttgctggaacgccaggctaccttagccccgaggtactcaggaaggacccctacggcaaaccagtggacatttgggcgtgtggggttatattatatatccttctggtcggctatcctccattttgggatgaagaccagcacaagctgtaccagcagataaaagcgggagcgtatgactttccaagtccagagtgggacacggtcactcctgaggccaagaacctgatcaaccagatgttgactatcaacccagcaaagaggattacggcagaccaagcccttaagcacccctgggtgtgccagcgatccacagtggcaagcatgatgcacagacaagaaaccgtcgagtgcttgagaaagttcaacgctcggagaaaactgaaaggcgcaattcttacgactatgctggtttcccgcaacttctcagtgggaagacaaagctccgcccctgcctcacctgctgctagtgccgcaggcttagccggacaagcggcaaaaagcctcctgaataagaagtccgatgggggagtcaaaaaaagaaaaagtagtagctccgtgcatctaatggaaccacaaaccactgtcgtccacaatgccaccgacggcatcaaaggctcaacagaatcatgcaatacgactactgaggatgaagatctgaaagtgcgaaaacaggaaattattaagatcactgaacagttgatcgaggcaatcaacaatggggattttgaggcgtatactaaaatctgtgaccccggtttgacatcctttgaaccagaagctttgggtaatctggtcgagggaatggacttccataagttctacttcgaaaatctcttgtccaagaatagcaaacctattcatacaaccatcctgaaccctcacgtacacgtgattggtgaagacgccgcttgcatcgcctacatccggctgacccagtacatcgacggacagggcaggccccgaacttctcagagtgaggaaacccgcgtgtggcatagacgcgatggcaaatggctgaacgtgcactaccattgcagcggggctccagctgctccgttgcagtag

SEQ ID NO: 248520 - DNA, 3720 bp, Artificial Sequence
  derived and/or modified sequence
agtctcgcggtgctgccgggctcagccccgtctcctcctcttgctccctcggccgggcggcggtgactgtgcaccgacgtcggcgcgggctgcaccgccgcgtccgcccgcccgccagcatggccaccaccgccacctgcacccgtttcaccgacgactaccagctcttcgaggagcttggcaagggtgctttctctgtggtccgcaggtgtgtgaagaaaacctccacgcaggagtacgcagcaaaaatcatcaataccaagaagttgtctgcccgggatcaccagaaactagaacgtgaggctcggatatgtcgacttctgaaacatccaaacatcgtgcgcctccatgacagtatttctgaagaagggtttcactacctcgtgtttgaccttgttaccggcggggagctgtttgaagacattgtggccagagagtactacagtgaagcagatgccagccactgtatacatcagattctggagagtgttaaccacatccaccagcatgacatcgtccacagggacctgaagcctgagaacctgctgctggcgagtaaatgcaagggtgccgccgtcaagctggctgattttggcctagccatcgaagtacagggagagcagcaggcttggtttggttttgctggcaccccaggttacttgtcccctgaggtcttgaggaaagatccctatggaaaacctgtggatatctgggcctgcggggtcatcctgtatatcctcctggtgggctatcctcccttctgggatgaggatcagcacaagctgtatcagcagatcaaggctggagcctatgatttcccatcaccagaatgggacacggtaactcctgaagccaagaacttgatcaaccagatgctgaccataaacccagcaaagcgcatcacggctgaccaggctctcaagcacccgtgggtctgtcaacgatccacggtggcatccatgatgcatcgtcaggagactgtggagtgtttgcgcaagttcaatgcccggagaaaactgaagggtgccatcctcacgaccatgcttgtctccaggaacttctcagttggcaggcagagctccgcccccgcctcgcctgccgcgagcgccgccggcctggccgggcaagctgccaaaagcctattgaacaagaagtcggatggcggtgtcaagaaaaggaagtcgagttccagcgtgcacctaatggagccacaaaccactgtggtacacaacgctacagatgggatcaagggctccacagagagctgcaacaccaccacagaagatgaggacctcaaagtgcgaaaacaggagatcattaagattacagaacagctgattgaagccatcaacaatggggactttgaggcctacacgaagatttgtgatccaggcctcacttcctttgagcctgaggcccttggtaacctcgtggaggggatggatttccataagttttactttgagaatctcctgtccaagaacagcaagcctatccataccaccatcctaaacccacacgtccacgtgattggggaggacgcagcgtgcatcgcctacatccgcctcacccagtacatcgacgggcagggtcggcctcgcaccagccagtcagaagagacccgggtctggcaccgtcgggatggcaagtggctcaatgtccactatcactgctcaggggcccctgccgcaccgctgcagtgagctcagccacaggggctttaggagattccagccggaggtccaaccttcgcagccagtggctctggagggcctgagtgacagcggcagtcctgtttgtttgaggtttaaaacaattcaattacaaaagcggcagcagccaatgcacgcccctgcatgcagccctcccgcccgcccttcgtgtctgtctctgctgtaccgaggtgttttttacatttaagaaaaaaaaaaaagaaaaaaagattgtttaaaaaaaaaaggaatccataccatgatgcgttttaaaaccaccgacagcccttgggttggcaagaaggcaggagtatgtatgaggtccatcctggcatgagcagtggctcacccaccggccttgaagaggtgagcttggcctctctggtccccatggacttagggggaccaggcaagaactctgacagagctttgggggccgtgatgtgattgcagctcctgaggtggcctgcttaccccaggtctaggaatgaacttctttggaacttgcataggcgcctagaatggggctgatgagaacatcgtgaccatcagacctacttgggagagaacgcagagctcccagcctgctgtggaggcagctgagaagtggtggcctcaggactgagagcccggacgttgctgtactgtcttgtttagtgtagaagggaagagaattggtgctgcagaagtgtacccgccatgaagccgatgagaaacctcgtgttagtctgacatgcactcactcatccatttctataggatgcacaatgcatgtgggccctaatattgaggccttatccctgcagctaggagggggaggggttgttgctgctttgcttcgtgttttcttctaacctggcaaggagagagccaggccctggtcagggctcccgtgccgcctttggcggttctgtttctgtgctgatctggaccatctttgtcttgccttttcacggtagtggtccccatgctgaccctcatctgggcctgggccctctgccaagtgcccctgtgggatgggaggagtgaggcagtgggagaagaggtggtggtcgtttctatgcattcaggctgcctttggggctgcctcccttcttattcttccttgctgcacgtccatctcttttcctgtctttgagattgacctgactgctctggcaagaagaagaggtgtccttacagaggcctctttactgaccaactgaagtatagacttactgctggacaatctgcatgggcatcacccctccccgcatgtaacccaaaagaggtgtccagagccaaggcttctaccttcattgtccctctctgtgctcaaggagttccattccaggaggaagagatctataccctaagcagatagcaaagaagataatggaggagcaattggtcatggccttggtttccctcaaaacaacgctgcagatttatctgcacaaacatctccacttttgggggaaaggtgggtagattccagttccctggactaccttcaggaggcacgagagctgggagaagaggcaaagctacaggtttacttgggagccagctgagaagagagcagactcacaggtgctggtgcttggatttagccaggctcctccgagcacctcatgcatgtcccagcccctgggccctagccctttcctgccctgcagtctgcagtgccagcacgcaaatcccttcaccacagggtttcgttttgctggcttgaagacaaatggtcttagaattcattgagacccatagcttcatatggctgctccagccccacttcttagcattcttactcctcttctggggctaatgtcagcatctatagacaatagactattaaaaaatcaccttttaaacaagaaacggaaggcatttgatgcagaatttttgcatgacaacatagaaataatttaaaaatagtgtttgttctgaatgttggtagacccttcatagctttgttacaatgaaaccttgaactgaaaatatttaataaaataacctttaaacagtc

SEQ ID NO: 248521 - DNA, 1584 bp, Artificial Sequence
  derived and/or modified sequence
atggccaccaccgccacctgcaccagattcaccgacgactaccagctgttcgaggagctgggcaagggcgccttcagcgtggtgagaagatgcgtgaagaagaccagcacccaggagtacgccgccaagatcatcaacaccaagaagctgagcgccagagaccaccagaagctggagagagaggccagaatctgcagactgctgaagcaccccaacatcgtgagactgcacgacagcatcagcgaggagggcttccactacctggtgttcgacctggtgaccggcggcgagctgttcgaggacatcgtggccagagagtactacagcgaggccgacgccagccactgcatccaccagatcctggagagcgtgaaccacatccaccagcacgacatcgtgcacagagacctgaagcccgagaacctgctgctggccagcaagtgcaagggcgccgccgtgaagctggccgacttcggcctggccatcgaggtgcagggcgagcagcaggcctggttcggcttcgccggcacccccggctacctgagccccgaggtgctgagaaaggacccctacggcaagcccgtggacatctgggcctgcggcgtgatcctgtacatcctgctggtgggctacccccccttctgggacgaggaccagcacaagctgtaccagcagatcaaggccggcgcctacgacttccccagccccgagtgggacaccgtgacccccgaggccaagaacctgatcaaccagatgctgaccatcaaccccgccaagagaatcaccgccgaccaggccctgaagcacccctgggtgtgccagagaagcaccgtggccagcatgatgcacagacaggagaccgtggagtgcctgagaaagttcaacgccagaagaaagctgaagggcgccatcctgaccaccatgctggtgagcagaaacttcagcgtgggcagacagagcagcgcccccgccagccccgccgccagcgccgccggcctggccggccaggccgccaagagcctgctgaacaagaagagcgacggcggcgtgaagaagagaaagagcagcagcagcgtgcacctgatggagccccagaccaccgtggtgcacaacgccaccgacggcatcaagggcagcaccgagagctgcaacaccaccaccgaggacgaggacctgaaggtgagaaagcaggagatcatcaagatcaccgagcagctgatcgaggccatcaacaacggcgacttcgaggcctacaccaagatctgcgaccccggcctgaccagcttcgagcccgaggccctgggcaacctggtggagggcatggacttccacaagttctacttcgagaacctgctgagcaagaacagcaagcccatccacaccaccatcctgaacccccacgtgcacgtgatcggcgaggacgccgcctgcatcgcctacatcagactgacccagtacatcgacggccagggcagacccagaaccagccagagcgaggagaccagagtgtggcacagaagagacggcaagtggctgaacgtgcactaccactgcagcggcgcccccgccgcccccctgcagtag

SEQ ID NO: 248522 - protein, 453 aa, Artificial Sequence
  derived and/or modified sequence
RLLKHPNIVRLHDSISEEGFHYLVFDLVTGGELFEDIVAREYYSEADASHCIHQILESVNHIHQHDIVHRDLKPENLLLASKCKGAAVKLADFGLAIEVQGEQQAWFGFAGTPGYLSPEVLRKDPYGKPVDIWACGVILYILLVGYPPFWDEDQHKLYQQIKAGAYDFPSPEWDTVTPEAKNLINQMLTINPAKRITADQALKHPWVCQRSTVASMMHRQETVECLRKFNARRKLKGAILTTMLVSRNFSAAKSLLNKKSDGGVKPQSNNKNSLVSPAQEPAPLQTAMEPQTTVVHNATDGIKGSTESCNTTTEDEDLKVRKQEIIKITEQLIEAINNGDFEAYTKICDPGLTSFEPEALGNLVEGMDFHKFYFENLLSKNSKPIHTTILNPHVHVIGEDAACIAYIRLTQYIDGQGRPRTSQSEETRVWHRRDGKWLNVHYHCSGAPAAPLQ

SEQ ID NO: 248523 - DNA, 1362 bp, Artificial Sequence
  derived and/or modified sequence
cgtctcctcaagcaccctaacatcgtcagattgcatgacagtatatccgaggaaggcttccactacttagtgttcgacctggtgacaggcggcgaactttttgaggatatcgtggctagggagtactactcagaggcggatgctagccattgtattcatcagattctcgagagcgtaaatcacattcaccagcatgacatagtgcacagggacctgaaaccagagaacctcctgctcgccagcaagtgtaaaggcgccgcggtaaaactcgctgatttcggattagcgatcgaagtgcaaggcgaacaacaggcttggttcggctttgctggaactccaggctacctaagtccagaggtccttcgcaaggacccatacggtaagcctgtagacatctgggcttgcggcgtcattctctacatccttctcgtcggctacccccctttctgggatgaagaccaacacaagctgtaccagcagatcaaagctggcgcttacgactttcctagccctgaatgggacaccgttaccccggaggcaaagaacctaataaaccaaatgcttacgattaacccggcaaagcggattaccgccgatcaggccctgaaacacccttgggtctgccagcggagtaccgtggctagtatgatgcatcgacaggagacagtcgaatgcctgagaaaattcaacgctcggcggaaattgaagggtgcgattctcaccaccatgttggtgtccagaaacttctcggccgcaaagtccctgcttaataaaaaatcggatgggggggtgaagccccaatccaacaataaaaactctctcgtatcacctgctcaagagccagccccccttcaaactgccatggagccacagacaacagtggtacataacgccactgacggcatcaaaggcagcacagagtcctgcaacacaacaacagaggatgaggacctcaaggtgagaaaacaggagatcatcaagatcacggagcagctgattgaagcgatcaacaatggtgacttcgaggcatacacgaagatctgtgatccaggtctgacaagctttgagccagaggccctaggaaacctggtggaaggtatggatttccataaattttacttcgagaacctcctgtccaagaatagcaagcctattcataccacgattttgaacccgcacgtgcatgtcatcggtgaagatgctgcctgcatcgcatacatccgcctgactcagtatatcgacgggcaggggaggccccgaacgtcccaatcagaagagacccgcgtctggcatcgccgcgacggcaagtggctgaacgtgcactaccattgcagtggtgctccagccgccccactgcagtag

SEQ ID NO: 248524 - DNA, 1362 bp, Artificial Sequence
  derived and/or modified sequence
cggctgctgaagcaccccaacatcgtgcggctgcatgacagcatcagcgaggagggcttccactacctggtgtttgacctggtgactggaggagagctgtttgaagatattgtggcccgggagtactacagcgaggctgatgccagccactgcatccaccagatcctggagagcgtgaaccacatccaccagcacgacatcgtgcaccgggacctgaagccagagaacctgctgctggccagcaagtgcaagggagctgctgtgaagctggccgactttggcctggccatcgaggtgcagggcgagcagcaggcctggtttggatttgctggcaccccaggctacctgagccctgaggtgctgaggaaggacccctacggcaagcctgtggacatctgggcctgtggggtcatcctgtacatcctgctggtgggctacccacccttctgggatgaggaccagcacaagctgtaccagcagatcaaggccggggcctatgacttccccagccctgagtgggacacagtgaccccagaggccaagaacctgatcaaccagatgctgaccatcaacccagccaagaggatcacagctgaccaggccctgaagcacccctgggtgtgccagaggagcacagtggcctccatgatgcaccggcaggagaccgtggagtgcctgaggaagttcaatgcccggaggaagctgaagggggccatcctgaccaccatgctggtgtccaggaacttctctgctgccaagagcctgctgaacaagaagagtgatggaggagtgaagccccagagcaacaacaagaacagcctggtgtccccagcccaggagcccgcccccctgcagacagccatggagccccagaccaccgtggtgcacaatgccacagatggcatcaagggcagcacagagagctgcaacaccaccacagaagatgaggacctgaaggtgaggaagcaggagatcatcaagatcacagagcagctgattgaggccatcaacaacggggactttgaggcctacaccaagatctgtgaccccggcctgaccagctttgagcctgaggccctgggcaacctggtggagggcatggacttccacaagttctactttgagaacctgctgagcaagaacagcaagcccatccacaccaccatcctgaacccccacgtgcacgtgattggagaagatgctgcctgcatcgcctacatccggctgacccagtacattgatggccagggccggcccaggaccagccagagcgaggagaccagggtgtggcacagaagagatggcaagtggctgaatgtgcactaccactgcagcggggccccagctgcccccctgcagtag

SEQ ID NO: 248525 - DNA, 1362 bp, Artificial Sequence
  derived and/or modified sequence
cggctgctgaagcaccccaacatcgtgcggctgcacgacagcatctcagaggaggggtttcattatctcgtcttcgatctcgtaaccggcggcgagctatttgaggatatcgtggcacgggaatattatagcgaagccgacgcaagccattgcatccaccagatcctcgaaagcgttaatcatatccatcagcatgacatcgttcacagggacctcaagccagaaaacctgctgctggcctccaagtgtaagggagccgcggtgaagcttgcggacttcggcttggccatagaggttcaaggagaacagcaggcttggttcggatttgctgggacgcccggctacctgagccccgaggtgctgcgcaaggacccctacggaaaacctgtggacatatgggcttgtggggtgatcctctacatacttctcgtgggatatccacccttctgggacgaagaccaacataagctgtatcagcagattaaggcaggcgcttatgactttcccagtccagagtgggacacggtgacaccagaggccaaaaacctcatcaaccaaatgctgaccatcaatccagcaaaaagaatcaccgccgaccaggctttaaagcacccttgggtgtgccagcgatccaccgttgccagcatgatgcacaggcaagaaaccgtggaatgcctccggaaatttaacgctcgccgtaaactcaagggcgccatcttgaccaccatgttggtttcccggaatttctcagccgctaagagtctgctgaataagaagtcagacggcggagttaagccacagagcaacaacaaaaacagtttggttagtcccgcccaagaaccagctcccctgcagaccgccatggagccccagactactgtagtccacaatgcaacagatggcatcaaaggttcgaccgagtcctgcaatacaactacggaggatgaggatttgaaggttcgtaagcaggagatcattaagataaccgaacagcttattgaggccatcaacaatggcgatttcgaagcttacacaaaaatctgcgacccgggactcacatcgttcgagccggaagccctcggaaacttggtcgagggtatggactttcacaaattttacttcgagaacctgttatcgaagaactctaagccaatccacaccacaatcctgaacccccacgtgcacgtgataggcgaagacgcggcatgcattgcttatatcaggctaacccagtacatcgatggccagggcagacctcgtactagccagagcgaggagacaagagtctggcataggcgggacggaaagtggcttaacgtgcactaccactgctccggcgctcccgcggcacccttacagtag

SEQ ID NO: 248526 - DNA, 1362 bp, Artificial Sequence
  derived and/or modified sequence
cggctacttaagcaccctaatatcgtcagactgcacgatagcatctctgaggaggggtttcactacctggttttcgacctcgtcaccggcggtgagttgtttgaagatatagtggccagagaatattatagtgaggccgacgcctctcactgtatccaccagattctggaatccgtcaaccacattcatcaacatgacattgtccaccgggacttaaagccagagaaccttctgctggcctctaagtgtaagggcgcagccgtaaaactggctgattttgggttggctattgaggtgcagggggagcagcaggcctggttcggatttgccggaactccagggtatctctcccctgaggttctcaggaaggacccttacggaaaacccgtggacatttgggcctgcggcgtgatcctttacattttgttagtcggatacccgcctttctgggatgaggaccagcataaactgtatcagcagattaaagcgggagcttacgacttcccaagtcctgagtgggataccgtcacacctgaggccaaaaacctgatcaaccagatgttgactattaacccggctaaacgtatcaccgctgatcaggccctaaagcatccttgggtgtgtcagaggagcaccgttgcaagtatgatgcacaggcaggaaaccgtggagtgcctgcgtaagttcaacgcgcgaagaaagctgaagggtgccattctcaccaccatgttggtatcacgcaacttctctgccgctaaaagcctgctgaataagaaatcagatgggggagtaaagccccaaagcaacaataagaatagtctcgtgtcacccgctcaggagcccgcacccctgcaaacggcaatggaaccccagactacagttgtgcacaatgctactgacggaatcaaaggaagcactgaatcttgtaataccacaacagaagacgaagacctgaaggtgcgcaaacaagagatcattaaaatcaccgaacagctaattgaggcgattaacaacggggactttgaggcctacactaagatctgtgaccccggactgaccagctttgaacctgaagctctgggtaaccttgtcgaaggaatggattttcacaagttctattttgaaaacctgttaagtaagaattccaagccaatccacacaaccatcttaaatccccacgtacacgtgattggcgaggatgctgcttgtatcgcctatatcaggctcacccagtatatagacgggcagggcagacctcgcacttctcaaagtgaggagacgagggtatggcacaggcgggacggtaaatggctgaacgttcactaccattgcagcggtgcacccgctgctccattgcaatag

SEQ ID NO: 248527 - DNA, 1618 bp, Artificial Sequence
  derived and/or modified sequence
cgacttctgaaacatccaaacatcgtgcgcctccatgacagtatttctgaagaagggtttcactacctcgtgtttgaccttgttaccggcggggagctgtttgaagacattgtggccagagagtactacagtgaagcagatgccagccactgtatacatcagattctggagagtgttaaccacatccaccagcatgacatcgtccacagggacctgaagcctgagaacctgctgctggcgagtaaatgcaagggtgccgccgtcaagctggctgattttggcctagccatcgaagtacagggagagcagcaggcttggtttggttttgctggcaccccaggttacttgtcccctgaggtcttgaggaaagatccctatggaaaacctgtggatatctgggcctgcggggtcatcctgtatatcctcctggtgggctatcctcccttctgggatgaggatcagcacaagctgtatcagcagatcaaggctggagcctatgatttcccatcaccagaatgggacacggtaactcctgaagccaagaacttgatcaaccagatgctgaccataaacccagcaaagcgcatcacggctgaccaggctctcaagcacccgtgggtctgtcaacgatccacggtggcatccatgatgcatcgtcaggagactgtggagtgtttgcgcaagttcaatgcccggagaaaactgaagggtgccatcctcacgaccatgcttgtctccaggaacttctcagctgccaaaagcctattgaacaagaagtcggatggcggtgtcaagccacagagcaacaacaaaaacagtctcgtaagcccagcccaagagcccgcgcccttgcagacggccatggagccacaaaccactgtggtacacaacgctacagatgggatcaagggctccacagagagctgcaacaccaccacagaagatgaggacctcaaagtgcgaaaacaggagatcattaagattacagaacagctgattgaagccatcaacaatggggactttgaggcctacacgaagatttgtgatccaggcctcacttcctttgagcctgaggcccttggtaacctcgtggaggggatggatttccataagttttactttgagaatctcctgtccaagaacagcaagcctatccataccaccatcctaaacccacacgtccacgtgattggggaggacgcagcgtgcatcgcctacatccgcctcacccagtacatcgacgggcagggtcggcctcgcaccagccagtcagaagagacccgggtctggcaccgtcgggatggcaagtggctcaatgtccactatcactgctcaggggcccctgccgcaccgctgcagtgagctcagccacaggggctttaggagattccagccggaggtccaaccttcgcagccagtggctctggagggcctgagtgacagcggcagtcctgtttgtttgaggtttaaaacaattcaattacaaaagcggcagcagccaatgcacgcccctgcatgcagccctcccgcccgcccttcgtgtctgtctctgctgtaccgaggtgttttttacatttaagaaaaaaaaaaaagaaaaaaagattgtttaaaaaaaaaa

SEQ ID NO: 248528 - DNA, 1362 bp, Artificial Sequence
  derived and/or modified sequence
agactgctgaagcaccccaacatcgtgagactgcacgacagcatcagcgaggagggcttccactacctggtgttcgacctggtgaccggcggcgagctgttcgaggacatcgtggccagagagtactacagcgaggccgacgccagccactgcatccaccagatcctggagagcgtgaaccacatccaccagcacgacatcgtgcacagagacctgaagcccgagaacctgctgctggccagcaagtgcaagggcgccgccgtgaagctggccgacttcggcctggccatcgaggtgcagggcgagcagcaggcctggttcggcttcgccggcacccccggctacctgagccccgaggtgctgagaaaggacccctacggcaagcccgtggacatctgggcctgcggcgtgatcctgtacatcctgctggtgggctacccccccttctgggacgaggaccagcacaagctgtaccagcagatcaaggccggcgcctacgacttccccagccccgagtgggacaccgtgacccccgaggccaagaacctgatcaaccagatgctgaccatcaaccccgccaagagaatcaccgccgaccaggccctgaagcacccctgggtgtgccagagaagcaccgtggccagcatgatgcacagacaggagaccgtggagtgcctgagaaagttcaacgccagaagaaagctgaagggcgccatcctgaccaccatgctggtgagcagaaacttcagcgccgccaagagcctgctgaacaagaagagcgacggcggcgtgaagccccagagcaacaacaagaacagcctggtgagccccgcccaggagcccgcccccctgcagaccgccatggagccccagaccaccgtggtgcacaacgccaccgacggcatcaagggcagcaccgagagctgcaacaccaccaccgaggacgaggacctgaaggtgagaaagcaggagatcatcaagatcaccgagcagctgatcgaggccatcaacaacggcgacttcgaggcctacaccaagatctgcgaccccggcctgaccagcttcgagcccgaggccctgggcaacctggtggagggcatggacttccacaagttctacttcgagaacctgctgagcaagaacagcaagcccatccacaccaccatcctgaacccccacgtgcacgtgatcggcgaggacgccgcctgcatcgcctacatcagactgacccagtacatcgacggccagggcagacccagaaccagccagagcgaggagaccagagtgtggcacagaagagacggcaagtggctgaacgtgcactaccactgcagcggcgcccccgccgcccccctgcagtag

SEQ ID NO: 248529 - protein, 556 aa, Artificial Sequence
  derived and/or modified sequence
MATTATCTRFTDDYQLFEELGKGAFSVVRRCVKKTSTQEYAAKIINTKKLSARDHQKLEREARICRLLKHPNIVRLHDSISEEGFHYLVFDLVTGGELFEDIVAREYYSEADASHCIHQILESVNHIHQHDIVHRDLKPENLLLASKCKGAAVKLADFGLAIEVQGEQQAWFGFAGTPGYLSPEVLRKDPYGKPVDIWACGVILYILLVGYPPFWDEDQHKLYQQIKAGAYDFPSPEWDTVTPEAKNLINQMLTINPAKRITADQALKHPWVCQRSTVASMMHRQETVECLRKFNARRKLKGAILTTMLVSRNFSAAKSLLNKKSDGGVKPQSNNKNSLVSPAQEPAPLQTAMEPQTTVVHNATDGIKGSTESCNTTTEDEDLKAAPLRTGNGSSVPEGRSSRDRTAPSAGMQPQPSLCSSAMRKQEIIKITEQLIEAINNGDFEAYTKICDPGLTSFEPEALGNLVEGMDFHKFYFENLLSKNSKPIHTTILNPHVHVIGEDAACIAYIRLTQYIDGQGRPRTSQSEETRVWHRRDGKWLNVHYHCSGAPAAPLQ

SEQ ID NO: 248530 - protein, 335 aa, Artificial Sequence
  derived and/or modified sequence
  misc_feature (1)..(1): Xaa can be any naturally occurring amino acid
XYQQIKAGAYDFPSPEWDTVTPEAKNLINQMLTINPAKRITADQALKHPWVCQRSTVASMMHRQETVECLRKFNARRKLKGAILTTMLVSRNFSAAKSLLNKKSDGGVKPQSNNKNSLVSPAQEPAPLQTAMEPQTTVVHNATDGIKGSTESCNTTTEDEDLKAAPLRTGNGSSVPEGRSSRDRTAPSAGMQPQPSLCSSAMRKQEIIKITEQLIEAINNGDFEAYTKICDPGLTSFEPEALGNLVEGMDFHKFYFENLLSKNSKPIHTTILNPHVHVIGEDAACIAYIRLTQYIDGQGRPRTSQSEETRVWHRRDGKWLNVHYHCSGAPAAPLQ

SEQ ID NO: 248531 - DNA, 1671 bp, Artificial Sequence
  derived and/or modified sequence
atggcaaccaccgccacctgcacacggtttacagacgattaccagctgtttgaagagctaggcaaaggcgctttttccgtggtgcgcaggtgcgtcaagaagacttccacacaggagtatgctgcaaaaatcatcaacactaaaaaactctctgcaagagatcaccagaagctggagagagaggcacggatttgcaggctgctcaaacaccctaacatcgttaggttgcacgatagcatcagcgaggaagggttccactacttggtctttgacctggtcaccggcggtgagctattcgaagatatcgtagcaagggaatattacagcgaagcggatgcatcccattgtatccatcaaatcttggagagtgttaatcacatacatcagcacgacatcgtgcacagagacttgaagccagagaacctcctcctggcctccaaatgtaagggcgctgctgtgaagctggccgacttcggcctagccattgaagttcagggagagcaacaggcttggttcgggtttgcgggaacccccggctacttgagccccgaggtgctcagaaaagacccctacggtaagcccgttgacatttgggcatgcggcgttatcctatatatcctgttggtaggctacccccctttctgggacgaagatcagcacaaactgtatcaacagatcaaggctggcgcctatgacttcccttcgcctgaatgggacactgtgacccctgaagcaaagaatttaatcaatcaaatgctgacaatcaacccagctaagcggatcactgctgatcaggccctgaaacacccatgggtgtgtcagcggtcaacagtggcctctatgatgcaccgccaggagacagtggagtgtctgcgcaaattcaacgcaaggcgcaagcttaaaggagcaattctcaccactatgctagtgtcccgcaacttctcagcggccaagtccttgctgaacaaaaaatctgatggcggtgtcaagccacagtcgaataacaagaatagtctggtgagcccagcccaggagcccgcccccttgcagacggctatggagcctcagacaactgtggtgcataatgcgaccgacggtattaagggttctaccgagagttgcaacactactaccgaagacgaagacctgaaggcggcgcccctgcggacgggaaatggcagcagcgtgcctgagggccgaagttctcgagacagaacagcaccttccgcaggaatgcagcctcaacctagcctgtgtagcagtgcgatgcggaaacaggaaatcattaagattactgagcagctcattgaggccattaataacggagattttgaagcatacaccaagatttgcgaccccggacttacgtcattcgagccagaggctctggggaacctagttgaggggatggattttcacaaattttatttcgaaaacctcctgagtaagaactccaaaccaatccacactacgatcttgaacccccacgtgcatgtgatcggtgaagacgccgcttgcatcgcgtacatccgtttgacccaatatatcgacggccagggacggcccagaacctcgcagtccgaggagacaagagtatggcacaggagggacggcaagtggcttaacgttcattaccactgcagcggagcacccgcagctcctctccagtag

SEQ ID NO: 248532 - DNA, 1008 bp, Artificial Sequence
  derived and/or modified sequence
tagtatcagcagatcaaggctggggcttacgacttcccatccccggagtgggataccgtcaccccagaagccaaaaatctcattaatcagatgttgacaatcaacccagccaaaagaataaccgccgaccaggcgctcaaacacccctgggtctgccagcgttcaaccgttgcatccatgatgcaccggcaagaaactgtggagtgccttcgaaaattcaatgcccgacgcaagctgaagggcgctatcctcaccacaatgttggtcagccggaattttagcgccgcaaagtcactgttgaataagaagtccgacggtggggtaaaacctcaaagcaataacaagaatagtctggtgtccccggctcaggagcccgctccgttacagacggctatggagccacagacgacagtggtgcacaatgctacagacggcatcaaaggcagtaccgagtcttgcaatacaacgaccgaagatgaagatctcaaagccgctccccttagaacagggaatggctcctcagtacccgagggtcgttcctcccgagaccggaccgccccatccgccggaatgcagccacagcccagcctgtgttcctcagccatgaggaagcaagagatcattaagattaccgagcagttgatcgaggctatcaacaatggcgacttcgaagcctacaccaaaatttgtgatcccggcttgaccagctttgagcctgaagccctgggcaacctggtggagggaatggacttccacaagttctactttgaaaatctgcttagtaaaaatagcaagcctatccataccacgatcttgaatccccacgtgcacgtgatcggcgaggatgctgcttgcatagcttatattaggctgacccaatatatcgatggccagggacgaccccgcacgagccagagtgaagaaacacgagtatggcaccggcgagatggaaaatggctgaatgtgcactatcattgctcaggagcccccgcggctcccctgcagtag

SEQ ID NO: 248533 - DNA, 1671 bp, Artificial Sequence
  derived and/or modified sequence
atggccaccacagccacctgcacccgcttcacagatgactaccagctgtttgaggagctgggcaagggggccttctctgtggtgagaagatgtgtgaagaagaccagcacccaggagtatgctgccaagatcatcaacaccaagaagctgagcgcccgggaccaccagaagctggagcgggaggcccgcatctgccgcctgctgaagcaccccaacatcgtgcggctgcatgacagcatcagcgaggagggcttccactacctggtgtttgacctggtgactggaggagagctgtttgaggacatcgtggcccgggagtactacagcgaggctgatgccagccactgcatccaccagatcctggagagcgtgaaccacatccaccagcacgacatcgtgcaccgggacctgaagccagagaacctgctgctggccagcaaatgtaaaggagctgctgtgaagctggccgactttggcctggccatcgaggtgcagggcgagcagcaggcctggtttggatttgctggcaccccaggctacctgagccctgaggtgctgaggaaggacccctacggcaagcctgtggacatctgggcctgtggggtcatcctgtacatcctgctggtgggctacccacccttctgggatgaggaccagcacaagctgtaccagcagatcaaggccggggcctatgacttccccagccctgagtgggacacagtgaccccagaggccaagaacctgatcaaccagatgctgaccatcaacccagccaagaggatcacagctgaccaggccctgaagcacccctgggtgtgccagaggagcacagtggcctccatgatgcaccggcaggagaccgtggagtgcctgaggaagttcaatgcccggaggaagctgaagggggccatcctgaccaccatgctggtgtccaggaacttctctgctgccaagagcctgctgaacaagaagagtgatggcggcgtgaagccccagagcaacaacaagaacagcctggtgtccccagcccaggagcccgcccccctgcagacagccatggagccccagaccaccgtggtgcacaatgccacagatggcatcaagggcagcacagagagctgcaacaccaccacagaagatgaggacctgaaggccgcccccctgaggactggaaatggcagctctgtgcctgagggccgcagcagccgggacagaacagcccccagcgctggcatgcagccccagcccagcctgtgcagcagcgccatgaggaagcaggagatcatcaagatcacagagcagctgattgaggccatcaacaatggagactttgaggcctacaccaagatctgtgaccccggcctgaccagctttgagcctgaggccctgggcaacctggtggagggcatggacttccacaagttctactttgagaacctgctgagcaagaacagcaagcccatccacaccaccatcctgaacccccacgtgcacgtgattggagaagatgctgcctgcatcgcctacatccggctgacccagtacattgatggccagggccggcccaggaccagccagagcgaggagaccagggtgtggcacagaagagatggcaagtggctgaatgtgcactaccactgcagcggggccccagctgcccccctgcagtag

SEQ ID NO: 248534 - DNA, 1008 bp, Artificial Sequence
  derived and/or modified sequence
tgataccagcagatcaaggccggggcctatgacttccccagccctgagtgggacacagtgaccccagaggccaagaacctgatcaaccagatgctgaccatcaacccagccaagaggatcacagctgaccaggccctgaagcacccctgggtgtgccagaggagcacagtggcctccatgatgcaccggcaggagaccgtggagtgcctgaggaagttcaatgcccggaggaagctgaagggggccatcctgaccaccatgctggtgtccaggaacttctctgctgccaagagcctgctgaacaagaagagtgatggaggagtgaagccccagagcaacaacaagaacagcctggtgtccccagcccaggagcccgcccccctgcagacagccatggagccccagaccaccgtggtgcacaatgccacagatggcatcaagggcagcacagagagctgcaacaccaccacagaagatgaggacctgaaggccgcccccctgaggactggaaatggcagctctgtgcctgagggccgcagcagccgggacagaacagcccccagcgctggcatgcagccccagcccagcctgtgcagcagcgccatgaggaagcaggagatcatcaagatcacagagcagctgattgaggccatcaacaacggggactttgaggcctacaccaagatctgtgaccccggcctgaccagctttgagcctgaggccctgggcaacctggtggagggcatggacttccacaagttctactttgagaacctgctgagcaagaacagcaagcccatccacaccaccatcctgaacccccacgtgcacgtgattggagaagatgctgcctgcatcgcctacatccggctgacccagtacattgatggccagggccggcccaggaccagccagagcgaggagaccagggtgtggcacagaagagatggcaagtggctgaatgtgcactaccactgcagcggggccccagctgcccccctgcagtag

SEQ ID NO: 248535 - DNA, 1671 bp, Artificial Sequence
  derived and/or modified sequence
atggccaccaccgccacctgcacccggttcaccgacgactaccagctttttgaagagctggggaagggagccttctcagttgtgagacggtgtgtgaagaaaaccagtacccaggagtacgcagcaaaaattatcaacacaaagaagctttctgcccgtgatcatcaaaaattggagagagaagcgcggatctgtaggctactcaagcatccaaacatagtgcggctccacgactcgatatcagaagagggtttccattacctggtgttcgatttagtcacagggggagaacttttcgaggacatcgtagcccgagaatattactctgaggccgacgcatcgcattgtatacaccagatcctggagagcgtgaatcatatccaccagcacgatatagttcacagagatctgaagcccgagaacctgttactcgccagtaagtgtaaaggcgcagccgtgaaactggctgactttggacttgctattgaggtacagggggagcagcaggcttggtttggcttcgccggtactcctggctacctcagccccgaggtgctgcgcaaagacccatacggcaagcctgtcgatatctgggcctgcggcgttattctctacatcctgcttgttggctacccccccttctgggatgaggatcagcacaaactgtaccaacagattaaggcgggcgcctatgattttccctcacccgagtgggatacagtgacccccgaagctaaaaacctgataaatcagatgctgactattaacccagccaaaagaattaccgccgatcaggccctgaaacacccttgggtttgtcagaggtccaccgtggcttctatgatgcacaggcaggagaccgttgaatgtctccgcaaattcaatgcacgacggaaactcaaaggggcgatattgacgaccatgctcgtgagccggaatttctcagcagcaaaatccctcctcaacaaaaagagcgatggaggagttaagcctcagtctaataacaaaaatagtcttgtgtcccccgcccaggagcccgctccattgcaaacagcgatggaacctcaaacgaccgtcgtccacaatgccaccgacggaataaagggatccactgaatcctgtaacaccactacagaggatgaagatcttaaggcagcaccactgcgcacaggaaacggttcatccgtgccggagggacgttcgtcgcgcgaccgtaccgcaccttccgctggcatgcaaccccagcctagcttgtgttcctcggccatgcgcaaacaggagatcattaaaatcactgaacagctgatcgaggctattaacaacggagattttgaggcttatactaagatttgtgacccaggccttacttccttcgagccagaggccttgggaaacttggtggaaggcatggattttcacaaattctacttcgaaaacctgctaagcaaaaatagcaagcccattcatactaccatcctcaatcctcacgttcatgtgatcggcgaggatgcagcatgcatcgcatatatcagactgacccagtacattgacgggcagggacgcccaaggaccagtcagagcgaggagactagggtctggcaccggagggatggaaagtggctgaacgtgcactatcactgttctggcgcgccagctgctcccttgcagtag

SEQ ID NO: 248536 - DNA, 1008 bp, Artificial Sequence
  derived and/or modified sequence
tgataccagcagatcaaggccggcgcctacgacttccccagccccgagtgggacacagttacacccgaagccaagaatcttatcaatcaaatgctgaccattaaccctgctaaaagaatcaccgctgaccaggcactgaagcatccatgggtgtgccagcgatcgactgtagccagtatgatgcatcgccaggaaactgtggagtgcctgagaaagttcaacgctcgacgcaaacttaagggtgcaatcttgacaacaatgctggtgtcacggaactttagcgccgccaaaagcttgctgaacaaaaaaagcgatggaggcgtgaaaccacaaagcaacaacaaaaacagcctggtgtcacctgcccaagagcctgctcccctgcaaacagccatggaacctcaaacaacagttgttcacaatgccaccgacgggattaaaggaagtactgaatcttgcaatacaactacggaagatgaggatctcaaggccgcgccgctgcgcacgggcaacggctcatcggtgcctgagggccgctcatcccgagataggactgcgcccagtgccggtatgcagccccagccatccttatgtagttccgctatgagaaagcaggaaatcatcaaaattaccgagcaactgatcgaggccatcaataatggggattttgaagcttacaccaagatatgtgaccccgggcttacctcctttgagcccgaagctttgggtaatctggtggaagggatggattttcacaagttttactttgagaacctgctttctaaaaacagcaagccaatccataccacaattctgaaccctcacgtgcacgttattggggaagatgccgcgtgcatcgcttacatccgactgacgcaatatatcgatgggcagggccgacccaggacttctcaaagtgaagagacccgggtttggcaccggcgcgacggaaagtggcttaatgttcactaccactgttccggagctccggcagcccctctgcaatag

SEQ ID NO: 248537 - DNA, 1671 bp, Artificial Sequence
  derived and/or modified sequence
atggcgactacagctacctgcacacggtttacagacgactatcaattgtttgaggaactgggcaaaggtgctttcagcgtcgtgcgcaggtgtgtgaagaagacctctacccaagagtacgcagcgaaaatcataaatacgaaaaaactctctgctcgagaccaccagaaattggagagggaggccagaatttgcagacttctcaagcatcctaacatcgttcgactgcatgactccatctcagaagagggcttccactacctcgtgttcgatttagttaccggaggagaactctttgaggacatagtggccagagaatactattccgaagccgatgcctcccactgtatacatcagatacttgagagcgtgaaccacatacaccagcacgacatagtgcaccgggaccttaagccggaaaatctactgcttgcctctaagtgtaagggcgcagctgtgaaactcgccgatttcgggctcgcaatcgaagtgcagggcgagcaacaggcctggtttggctttgccggaaccccaggctacctttctccagaggtgctgcgcaaagacccatacggaaaaccagtagatatctgggcatgcggtgtgatcctgtacatcctgctcgtcgggtatccacccttttgggatgaggatcagcataaactctatcagcagattaaagcaggcgcttatgacttcccttcgccggagtgggacacagtcacacccgaagccaaaaatttgatcaaccagatgttgacgatcaatccagccaagagaattactgcagaccaggctctgaaacacccttgggtatgtcagagaagcactgtggccagtatgatgcacagacaggaaacagtggaatgcctgcgaaaattcaatgcaagacgcaaattgaagggagccatattgactaccatgctggtgtcgagaaatttttcggcggctaaaagccttctcaacaaaaagtccgacgggggtgtgaagccccagtcaaacaataaaaactcattggttagccccgcacaggagcctgctccactccaaactgcaatggaaccccagaccaccgtcgtccataacgccaccgatggtatcaagggaagcacagaaagttgtaataccaccacagaagacgaagacctgaaagccgctcctcttcggacaggcaatggatcttctgttcctgagggcaggtcttccagagaccggacagccccatctgccggaatgcagcctcagcctagtctgtgctcctccgccatgcgcaagcaggagatcattaagatcacagaacagttaattgaagccatcaataatggcgacttcgaggcttatactaaaatctgcgatccaggactgacaagcttcgagcccgaggctctggggaatctcgtggagggtatggacttccacaaattctattttgaaaacctgttgtccaagaactccaagcctattcatactactatactgaatccccacgtgcacgtaattggtgaagatgccgcatgcatagcctacatccgcctcacacagtatatcgacggacagggcagacctcggacatctcagagtgaggaaacccgagtgtggcataggcgggacgggaagtggcttaacgtgcactaccattgcagcggcgcacctgcagctccactccagtag

SEQ ID NO: 248538 - DNA, 1008 bp, Artificial Sequence
  derived and/or modified sequence
tgatatcagcagatcaaggctggtgcctacgacttcccttcgcccgagtgggacaccgtgactccagaggctaagaatctcatcaaccagatgcttaccattaacccagctaaaaggataacggcagaccaggcgctaaaacatccatgggtgtgtcagagaagtacggtggcctccatgatgcacagacaggaaaccgtggaatgtctccggaaatttaatgctagacgaaagttaaaaggcgcaatcctcaccacgatgctcgtgagcagaaacttctcggccgcaaaatcacttctgaacaaaaaatccgacggcggtgtgaaaccccagagcaataataaaaactccctggtgtccccagcccaagaaccggcaccactgcagactgccatggagcctcagactacggtggtccacaatgccaccgatggtataaagggttctactgaatcttgtaacaccacaaccgaggatgaggatttaaaggctgcacccttgcgcacagggaatggcagcagtgtcccagaaggacgatcctcccgggacagaacagctccatccgcagggatgcaacctcaaccatccctttgttcttcggcaatgcgaaagcaagaaattattaagattacagagcagttgatagaggctatcaataatggagactttgaagcttacactaagatctgtgacccaggtttaactagcttcgagcccgaagccctgggtaatctcgtggaaggcatggactttcataaattttatttcgagaacctgttgagcaagaattctaagcccattcatactacaattctcaatcctcacgtgcacgtcataggtgaagacgctgcctgcatcgcctacattcggttgacgcaatacatcgacggtcaaggcaggccacgcaccagtcagagcgaggaaactcgcgtttggcacaggcgggacggaaaatggctcaacgtgcattaccactgctccggcgcacccgctgcgcctctgcagtag

SEQ ID NO: 248539 - DNA, 3812 bp, Artificial Sequence
  derived and/or modified sequence
ggtaaagtctcgcggtgctgccgggctcagccccgtctcctcctcttgctccctcggccgggcggcggtgactgtgcaccgacgtcggcgcgggctgcaccgccgcgtccgcccgcccgccagcatggccaccaccgccacctgcacccgtttcaccgacgactaccagctcttcgaggagcttggcaagggtgctttctctgtggtccgcaggtgtgtgaagaaaacctccacgcaggagtacgcagcaaaaatcatcaataccaagaagttgtctgcccgggatcaccagaaactagaacgtgaggctcggatatgtcgacttctgaaacatccaaacatcgtgcgcctccatgacagtatttctgaagaagggtttcactacctcgtgtttgaccttgttaccggcggggagctgtttgaagacattgtggccagagagtactacagtgaagcagatgccagccactgtatacatcagattctggagagtgttaaccacatccaccagcatgacatcgtccacagggacctgaagcctgagaacctgctgctggcgagtaaatgcaagggtgccgccgtcaagctggctgattttggcctagccatcgaagtacagggagagcagcaggcttggtttggttttgctggcaccccaggttacttgtcccctgaggtcttgaggaaagatccctatggaaaacctgtggatatctgggcctgcggggtcatcctgtatatcctcctggtgggctatcctcccttctgggatgaggatcagcacaagctgtatcagcagatcaaggctggagcctatgatttcccatcaccagaatgggacacggtaactcctgaagccaagaacttgatcaaccagatgctgaccataaacccagcaaagcgcatcacggctgaccaggctctcaagcacccgtgggtctgtcaacgatccacggtggcatccatgatgcatcgtcaggagactgtggagtgtttgcgcaagttcaatgcccggagaaaactgaagggtgccatcctcacgaccatgcttgtctccaggaacttctcagctgccaaaagcctattgaacaagaagtcggatggcggtgtcaagccacagagcaacaacaaaaacagtctcgtaagcccagcccaagagcccgcgcccttgcagacggccatggagccacaaaccactgtggtacacaacgctacagatgggatcaagggctccacagagagctgcaacaccaccacagaagatgaggacctcaaagctgccccgctccgcactgggaatggcagctcggtgcctgaaggacggagctcccgggacagaacagccccctctgcaggcatgcagccccagccttctctctgctcctcagccatgcgaaaacaggagatcattaagattacagaacagctgattgaagccatcaacaatggggactttgaggcctacacgaagatttgtgatccaggcctcacttcctttgagcctgaggcccttggtaacctcgtggaggggatggatttccataagttttactttgagaatctcctgtccaagaacagcaagcctatccataccaccatcctaaacccacacgtccacgtgattggggaggacgcagcgtgcatcgcctacatccgcctcacccagtacatcgacgggcagggtcggcctcgcaccagccagtcagaagagacccgggtctggcaccgtcgggatggcaagtggctcaatgtccactatcactgctcaggggcccctgccgcaccgctgcagtgagctcagccacaggggctttaggagattccagccggaggtccaaccttcgcagccagtggctctggagggcctgagtgacagcggcagtcctgtttgtttgaggtttaaaacaattcaattacaaaagcggcagcagccaatgcacgcccctgcatgcagccctcccgcccgcccttcgtgtctgtctctgctgtaccgaggtgttttttacatttaagaaaaaaaaaaaagaaaaaaagattgtttaaaaaaaaaaggaatccataccatgatgcgttttaaaaccaccgacagcccttgggttggcaagaaggcaggagtatgtatgaggtccatcctggcatgagcagtggctcacccaccggccttgaagaggtgagcttggcctctctggtccccatggacttagggggaccaggcaagaactctgacagagctttgggggccgtgatgtgattgcagctcctgaggtggcctgcttaccccaggtctaggaatgaacttctttggaacttgcataggcgcctagaatggggctgatgagaacatcgtgaccatcagacctacttgggagagaacgcagagctcccagcctgctgtggaggcagctgagaagtggtggcctcaggactgagagcccggacgttgctgtactgtcttgtttagtgtagaagggaagagaattggtgctgcagaagtgtacccgccatgaagccgatgagaaacctcgtgttagtctgacatgcactcactcatccatttctataggatgcacaatgcatgtgggccctaatattgaggccttatccctgcagctaggagggggaggggttgttgctgctttgcttcgtgttttcttctaacctggcaaggagagagccaggccctggtcagggctcccgtgccgcctttggcggttctgtttctgtgctgatctggaccatctttgtcttgccttttcacggtagtggtccccatgctgaccctcatctgggcctgggccctctgccaagtgcccctgtgggatgggaggagtgaggcagtgggagaagaggtggtggtcgtttctatgcattcaggctgcctttggggctgcctcccttcttattcttccttgctgcacgtccatctcttttcctgtctttgagattgacctgactgctctggcaagaagaagaggtgtccttacagaggcctctttactgaccaactgaagtatagacttactgctggacaatctgcatgggcatcacccctccccgcatgtaacccaaaagaggtgtccagagccaaggcttctaccttcattgtccctctctgtgctcaaggagttccattccaggaggaagagatctataccctaagcagatagcaaagaagataatggaggagcaattggtcatggccttggtttccctcaaaacaacgctgcagatttatctgcacaaacatctccacttttgggggaaaggtgggtagattccagttccctggactaccttcaggaggcacgagagctgggagaagaggcaaagctacaggtttacttgggagccagctgagaagagagcagactcacaggtgctggtgcttggatttagccaggctcctccgagcacctcatgcatgtcccagcccctgggccctagccctttcctgccctgcagtctgcagtgccagcacgcaaatcccttcaccacagggtttcgttttgctggcttgaagacaaatggtcttagaattcattgagacccatagcttcatatggctgctccagccccacttcttagcattcttactcctcttctggggctaatgtcagcatctatagacaatagactattaaaaaatcaccttttaaacaagaaacggaaggcatttgatgcagaatttttgcatgacaacatagaaataatttaaaaatagtgtttgttctgaatgttggtagacccttcatagctttgttacaatgaaaccttgaactgaaaatatttaataaaataacctttaaacagtc

SEQ ID NO: 248540 - DNA, 1224 bp, Artificial Sequence
  derived and/or modified sequence
gtatcagcagatcaaggctggagcctatgatttcccatcaccagaatgggacacggtaactcctgaagccaagaacttgatcaaccagatgctgaccataaacccagcaaagcgcatcacggctgaccaggctctcaagcacccgtgggtctgtcaacgatccacggtggcatccatgatgcatcgtcaggagactgtggagtgtttgcgcaagttcaatgcccggagaaaactgaagggtgccatcctcacgaccatgcttgtctccaggaacttctcagctgccaaaagcctattgaacaagaagtcggatggcggtgtcaagccacagagcaacaacaaaaacagtctcgtaagcccagcccaagagcccgcgcccttgcagacggccatggagccacaaaccactgtggtacacaacgctacagatgggatcaagggctccacagagagctgcaacaccaccacagaagatgaggacctcaaagctgccccgctccgcactgggaatggcagctcggtgcctgaaggacggagctcccgggacagaacagccccctctgcaggcatgcagccccagccttctctctgctcctcagccatgcgaaaacaggagatcattaagattacagaacagctgattgaagccatcaacaatggggactttgaggcctacacgaagatttgtgatccaggcctcacttcctttgagcctgaggcccttggtaacctcgtggaggggatggatttccataagttttactttgagaatctcctgtccaagaacagcaagcctatccataccaccatcctaaacccacacgtccacgtgattggggaggacgcagcgtgcatcgcctacatccgcctcacccagtacatcgacgggcagggtcggcctcgcaccagccagtcagaagagacccgggtctggcaccgtcgggatggcaagtggctcaatgtccactatcactgctcaggggcccctgccgcaccgctgcagtgagctcagccacaggggctttaggagattccagccggaggtccaaccttcgcagccagtggctctggagggcctgagtgacagcggcagtcctgtttgtttgaggtttaaaacaattcaattacaaaagcggcagcagccaatgcacgcccctgcatgcagccctcccgcccgcccttcgtgtctgtctctgctgtaccgaggtgttttttacatttaag

SEQ ID NO: 248541 - DNA, 1092 bp, Artificial Sequence
  derived and/or modified sequence
aaagtctcgcggtgctgccgggctcagccccgtctcctcctcttgctccctcggccgggcggcggtgactgtgcaccgacgtcggcgcgggctgcaccgccgcgtccgcccgcccgccagcatggccaccaccgccacctgcacccgtttcaccgacgactaccagctcttcgaggagcttggcaagggtgctttctctgtggtccgcaggtgtgtgaagaaaacctccacgcaggagtacgcagcaaaaatcatcaataccaagaagttgtctgcccgggatcaccagaaactagaacgtgaggctcggatatgtcgacttctgaaacatccaaacatcgcaacgatccacggtggcatccatgatgcatcgtcaggagactgtggagtgtttgcgcaagttcaatgcccggagaaaactgaagggtgccatcctcacgaccatgcttgtctccaggaacttctcagctgccaaaagcctattgaacaagaagtcggatggcggtgtcaagccacagagcaacaacaaaaacagtctcgtaagcccagcccaagagcccgcgcccttgcagacggccatggagccacaaaccactgtggtacacaacgctacagatgggatcaagggctccacagagagctgcaacaccaccacagaagatgaggacctcaaagctcggtgcctgaaggacggagctcccgggacagaacagccccctctgcaggcatgcagccccagccttctctctgctcctcagccattacgtctgtgctggaggatgcctttgtctgctgcttttcctcccaccatctatccttgcagagtttctaagcacaaccctcttcgcccgtggggccccagtcaggtcatccagatgggtctggtggggttggagagggtgtgtgtgttgtgggtgcacacctgcctgctgcttttggaagccgatcgaactccttgcttcccttaacctgctgcttgctcacctggagctgtggcctagcggggctgacggctgtggggccccctcctggatgtgcctttggctgcgctgccctgtcccaactgtgctgcttggctgtgctggcccggct

SEQ ID NO: 248542 - DNA, 1671 bp, Artificial Sequence
  derived and/or modified sequence
atggccaccaccgccacctgcaccagattcaccgacgactaccagctgttcgaggagctgggcaagggcgccttcagcgtggtgagaagatgcgtgaagaagaccagcacccaggagtacgccgccaagatcatcaacaccaagaagctgagcgccagagaccaccagaagctggagagagaggccagaatctgcagactgctgaagcaccccaacatcgtgagactgcacgacagcatcagcgaggagggcttccactacctggtgttcgacctggtgaccggcggcgagctgttcgaggacatcgtggccagagagtactacagcgaggccgacgccagccactgcatccaccagatcctggagagcgtgaaccacatccaccagcacgacatcgtgcacagagacctgaagcccgagaacctgctgctggccagcaagtgcaagggcgccgccgtgaagctggccgacttcggcctggccatcgaggtgcagggcgagcagcaggcctggttcggcttcgccggcacccccggctacctgagccccgaggtgctgagaaaggacccctacggcaagcccgtggacatctgggcctgcggcgtgatcctgtacatcctgctggtgggctacccccccttctgggacgaggaccagcacaagctgtaccagcagatcaaggccggcgcctacgacttccccagccccgagtgggacaccgtgacccccgaggccaagaacctgatcaaccagatgctgaccatcaaccccgccaagagaatcaccgccgaccaggccctgaagcacccctgggtgtgccagagaagcaccgtggccagcatgatgcacagacaggagaccgtggagtgcctgagaaagttcaacgccagaagaaagctgaagggcgccatcctgaccaccatgctggtgagcagaaacttcagcgccgccaagagcctgctgaacaagaagagcgacggcggcgtgaagccccagagcaacaacaagaacagcctggtgagccccgcccaggagcccgcccccctgcagaccgccatggagccccagaccaccgtggtgcacaacgccaccgacggcatcaagggcagcaccgagagctgcaacaccaccaccgaggacgaggacctgaaggccgcccccctgagaaccggcaacggcagcagcgtgcccgagggcagaagcagcagagacagaaccgcccccagcgccggcatgcagccccagcccagcctgtgcagcagcgccatgagaaagcaggagatcatcaagatcaccgagcagctgatcgaggccatcaacaacggcgacttcgaggcctacaccaagatctgcgaccccggcctgaccagcttcgagcccgaggccctgggcaacctggtggagggcatggacttccacaagttctacttcgagaacctgctgagcaagaacagcaagcccatccacaccaccatcctgaacccccacgtgcacgtgatcggcgaggacgccgcctgcatcgcctacatcagactgacccagtacatcgacggccagggcagacccagaaccagccagagcgaggagaccagagtgtggcacagaagagacggcaagtggctgaacgtgcactaccactgcagcggcgcccccgccgcccccctgcagtag

SEQ ID NO: 248543 - DNA, 1008 bp, Artificial Sequence
  derived and/or modified sequence
tgataccagcagatcaaggccggcgcctacgacttccccagccccgagtgggacaccgtgacccccgaggccaagaacctgatcaaccagatgctgaccatcaaccccgccaagagaatcaccgccgaccaggccctgaagcacccctgggtgtgccagagaagcaccgtggccagcatgatgcacagacaggagaccgtggagtgcctgagaaagttcaacgccagaagaaagctgaagggcgccatcctgaccaccatgctggtgagcagaaacttcagcgccgccaagagcctgctgaacaagaagagcgacggcggcgtgaagccccagagcaacaacaagaacagcctggtgagccccgcccaggagcccgcccccctgcagaccgccatggagccccagaccaccgtggtgcacaacgccaccgacggcatcaagggcagcaccgagagctgcaacaccaccaccgaggacgaggacctgaaggccgcccccctgagaaccggcaacggcagcagcgtgcccgagggcagaagcagcagagacagaaccgcccccagcgccggcatgcagccccagcccagcctgtgcagcagcgccatgagaaagcaggagatcatcaagatcaccgagcagctgatcgaggccatcaacaacggcgacttcgaggcctacaccaagatctgcgaccccggcctgaccagcttcgagcccgaggccctgggcaacctggtggagggcatggacttccacaagttctacttcgagaacctgctgagcaagaacagcaagcccatccacaccaccatcctgaacccccacgtgcacgtgatcggcgaggacgccgcctgcatcgcctacatcagactgacccagtacatcgacggccagggcagacccagaaccagccagagcgaggagaccagagtgtggcacagaagagacggcaagtggctgaacgtgcactaccactgcagcggcgcccccgccgcccccctgcagtag

SEQ ID NO: 248544 - protein, 135 aa, Artificial Sequence
  derived and/or modified sequence
MVLGTIDLCSCFSAGLPKTEANWVNVISDLKKIEDLIQSMHIDATLYTESDVHPSCKVTAMKCFLLELQVISLESGDASIHDTVENLIILANNSLSSNGNVTESGCKECEELEEKNIKEFLQSFVHIVQMFINTS

SEQ ID NO: 248545 - DNA, 408 bp, Artificial Sequence
  derived and/or modified sequence
atggtgctgggcaccatcgacctgtgcagctgcttcagcgccggcctgcccaagaccgaggccaactgggtgaacgtgatcagcgacctgaagaagatcgaggacctgatccagagcatgcacatcgacgccaccctgtacaccgagagcgacgtgcaccccagctgcaaggtgaccgccatgaagtgcttcctgctggagctgcaggtgatcagcctggagagcggcgacgccagcatccacgacaccgtggagaacctgatcatcctggccaacaacagcctgagcagcaacggcaacgtgaccgagagcggctgcaaggagtgcgaggagctggaggagaagaacatcaaggagttcctgcagagcttcgtgcacatcgtgcagatgttcatcaacaccagctag

SEQ ID NO: 248546 - DNA, 408 bp, Artificial Sequence
  derived and/or modified sequence
atggtgttaggaactatcgatctgtgctcatgtttttccgccggacttcccaagaccgaagcgaactgggtcaacgtcatatcagacctgaagaagattgaagatttgatccagagcatgcacattgatgcgaccctttacaccgagtcggacgtacaccccagctgcaaggtaaccgctatgaagtgctttctcctggagctccaagtgatcagtctggaatccggggatgcaagcattcacgataccgtggaaaatcttataattttagccaacaatagcctgtcatctaacggcaacgtgactgaaagcggctgcaaggagtgcgaggaactggaggagaaaaatattaaggaattcctgcaaagctttgtgcacatcgtgcagatgtttatcaacacaagttag

SEQ ID NO: 248547 - DNA, 408 bp, Artificial Sequence
  derived and/or modified sequence
atggtattgggaaccatagacttgtgttcttgctttagcgccgggctccccaagaccgaggcaaattgggtgaatgtgatatctgacctgaaaaagatcgaggacctgattcagagtatgcacattgatgctactctgtatactgaatccgatgtgcacccaagctgcaaagtgaccgctatgaagtgtttcctgttagaactgcaagttatctcgctggaaagcggggatgcctctattcacgatacagtcgaaaacctgatcatactggctaataatagtctgtcaagcaacggtaatgtgactgaaagcggctgtaaagaatgcgaagagctcgaagaaaaaaacatcaaggaatttttgcagtcctttgtgcacatagtgcaaatgtttatcaatacttcatag

SEQ ID NO: 248548 - DNA, 408 bp, Artificial Sequence
  derived and/or modified sequence
atggtcctcgggacgatcgatttatgctcctgctttagcgccggcctccccaaaactgaggcaaactgggtgaatgttatctcagacttaaagaaaattgaagacctgatacagtccatgcacatcgacgcaactctctacactgaaagcgatgtacatccctcctgtaaagtgaccgctatgaagtgttttttgttggaattacaggtcatttccctagagagcggagacgccagcattcacgatactgtggaaaacctcatcattctggcaaacaactctctctcgagcaacggtaacgtcacagaatcgggatgtaaggagtgcgaggagttggaggagaaaaatataaaagaattcctccaaagctttgttcacatagtccagatgttcatcaacacgtcctag

SEQ ID NO: 248549 - DNA, 408 bp, Artificial Sequence
  derived and/or modified sequence
atggtgctgggcaccatcgacctgtgcagctgcttctctgctggcctgcccaagacagaggccaactgggtgaatgtcatcagtgacctgaagaagattgaggacctgatccagagcatgcacattgatgccaccctgtacacagaaagtgatgtgcaccccagctgcaaggtgacagccatgaagtgcttcctgctggagctgcaggtgatcagcctggagagcggagatgccagcatccatgacacagtggagaacctgatcatcctggccaacaacagcctgagcagcaatggaaatgtgacagagagcggctgcaaggaatgtgaggagctggaggagaagaacatcaaggagttcctgcagagctttgtgcacatcgtgcagatgttcatcaacaccagctag

SEQ ID NO: 248550 - DNA, 1018 bp, Artificial Sequence
  derived and/or modified sequence
atggtattgggaaccatagatttgtgcagctgtttcagtgcagggcttcctaaaacagaagccaactgggtgaatgtaataagtgatttgaaaaaaattgaagatcttattcaatctatgcatattgatgctactttatatacggaaagtgatgttcaccccagttgcaaagtaacagcaatgaagtgctttctcttggagttacaagttatttcacttgagtccggagatgcaagtattcatgatacagtagaaaatctgatcatcctagcaaacaacagtttgtcttctaatgggaatgtaacagaatctggatgcaaagaatgtgaggaactggaggaaaaaaatattaaagaatttttgcagagttttgtacatattgtccaaatgttcatcaacacttcttgattgcaattgattctttttaaagtgtttctgttattaacaaacatcactctgctgcttagacataacaaaacactcggcatttcaaatgtgctgtcaaaacaagtttttctgtcaagaagatgatcagaccttggatcagatgaactcttagaaatgaaggcagaaaaatgtcattgagtaatatagtgactatgaacttctctcagacttactttactcatttttttaatttattattgaaattgtacatatttgtggaataatgtaaaatgttgaataaaaatatgtacaagtgttgttttttaagttgcactgatattttacctcttattgcaaaatagcatttgtttaagggtgatagtcaaattatgtattggtggggctgggtaccaatgctgcaggtcaacagctatgctggtaggctcctgccagtgtggaaccactgactactggctctcattgacttccttactaagcatagcaaacagaggaagaatttgttatcagtaagaaaaagaagaactatatgtgaatcctcttctttatactgtaatttagttattgatgtataaagcaactgttatgaaataaagaaattgcaataactggc

SEQ ID NO: 248551 - DNA, 1388 bp, Artificial Sequence
  derived and/or modified sequence
cctgcagccaggactcgatggagaatccattccaatatatggccatgtggctctttggagcaatgttccatcatgttccatgctgctgacgtcacatggagcacagaaatcaatgttagcagatagccagcccatacaagatcgttttcaactagtggccccactgtgtccggaattgatgggttcttggtctcactgacttcaagaatgaagccgcggaccctcgcggtgagtgttacagctcttaaggtggcgcatctggagtttgttccttctgatgttcggatgtgttcggagtttcttccttctggtgggttcgtggtctcgctggctcaggagtgaagctacagaccttcgcggaggcattgtggatggatggctgctggaaaccccttgccatagccagctcttcttcaatacttaaggatttaccgtggctttgagtaatgagaatttcgaaaccacatttgagaagtatttccatccagtgctacttgtgtttacttctaaacagtcattttctaactgaagctggcattcatgtcttcattttgggatgcagctaatatacccagttggcccaaagcacctaacctatagttatataatctgactctcagttcagttttactctactaatgccttcatggtattgggaaccatagatttgtgcagctgtttcagtgcagggcttcctaaaacagaagccaactgggtgaatgtaataagtgatttgaaaaaaattgaagatcttattcaatctatgcatattgatgctactttatatacggaaagtgatgttcaccccagttgcaaagtaacagcaatgaagtgctttctcttggagttacaagttatttcacttgagtccggagatgcaagtattcatgatacagtagaaaatctgatcatcctagcaaacaacagtttgtcttctaatgggaatgtaacagaatctggatgcaaagaatgtgaggaactggaggaaaaaaatattaaagaatttttgcagagttttgtacatattgtccaaatgttcatcaacacttcttgattgcaattgattctttttaaagtgtttctgttattaacaaacatcactctgctgcttagacataacaaaacactcggcatttcaaatgtgctgtcaaaacaagtttttctgtcaagaagatgatcagaccttggatcagatgaactcttagaaatgaaggcagaaaaatgtcattgagtaatatagtgactatgaacttctctcagacttactttactcatttttttaatttattattgaaattgtacatatttgtggaataatgtaaaatgttgaataaaaatatgtacaagtgttgttttttaagttgcactgatattttacctcttattgc

SEQ ID NO: 248552 - DNA, 408 bp, Artificial Sequence
  derived and/or modified sequence
atggtgctgggcaccatcgacctgtgcagctgcttcagcgccggcctgcccaaaacagaggccaactgggtgaatgtaatctccgatctgaagaagatagaggatctgattcagtcaatgcacattgacgccacactgtacaccgagagcgatgtgcaccctagttgcaaagttacagctatgaaatgtttcttactcgaattgcaggtgattagcctcgaatcaggcgacgcatcaattcatgatactgtagaaaacctcatcatactggccaacaactcgctgagtagcaatgggaatgtgaccgaatctgggtgcaaggaatgcgaagaactcgaggagaagaatataaaagagttcttgcagagctttgtgcatatagtccaaatgttcatcaacacaagttag

SEQ ID NO: 248553 - DNA, 408 bp, Artificial Sequence
  derived and/or modified sequence
atggtgctgggcaccatcgacctgtgcagctgcttcagcgccggcctcccaaaaacagaagctaattgggtgaatgtgatttctgatctcaaaaaaatagaggatctgatccagtccatgcatatcgacgcgacactttacactgagtccgacgtccaccctagctgtaaggttacagctatgaaatgctttctgttggagctgcaagtgatttccctggaatcgggtgacgcttccattcatgatactgtcgaaaatttaattattctggcaaataactccttgagcagcaacggaaacgtgactgagtccggatgtaaggagtgtgaagaactggaggagaagaatatcaaagagttccttcaaagcttcgttcatattgtccagatgtttatcaacacatcatag

SEQ ID NO: 248554 - DNA, 408 bp, Artificial Sequence
  derived and/or modified sequence
atggtgctgggcaccatcgacctgtgcagctgcttcagcgccggccttcctaaaactgaagccaactgggtcaacgttattagcgacctaaagaagatcgaagatctgatccaatccatgcacatcgacgccactctgtatactgagagcgatgtgcacccatcgtgtaaggtaacagcaatgaaatgtttcctgcttgagttgcaggtgatttccctggagtccggtgacgctagcattcacgatactgtggagaatctgatcatcctggcgaacaactcccttagtagtaacgggaacgtgaccgagtccggttgcaaagagtgcgaggagctagaagaaaaaaacattaaggagttcttgcagtcattcgtgcatatcgtgcagatgtttatcaatacatcgtag

SEQ ID NO: 248555 - DNA, 408 bp, Artificial Sequence
  derived and/or modified sequence
atggtgctcggcaccatcgacctgtgtagctgcttttctgccggactgcccaaaactgaagcaaattgggtaaatgtgattagtgacctcaaaaaaattgaagacctgatacagagtatgcacattgacgcaactctgtacactgaatccgacgtgcatcctagctgtaaagtcaccgccatgaagtgctttttgctggagctccaggtcatttccctggaaagtggagacgcttccattcacgacacggtcgaaaacctcatcatattggctaacaatagtctgtcaagtaacggaaacgtgacagaatctgggtgcaaggaatgtgaggagcttgaagagaagaacattaaagagttcctgcagtctttcgtgcatattgtgcagatgtttatcaatacatcatag

SEQ ID NO: 248556 - DNA, 408 bp, Artificial Sequence
  derived and/or modified sequence
atggttctggggactatagatctgtgctcttgcttctccgccggtctccccaagacggaggccaattgggttaacgtaatctctgacctcaaaaagatagaggatctgatacagtctatgcatatagatgcaactctgtatactgaaagtgacgtccaccctagctgcaaagttaccgctatgaagtgctttcttctggaactccaggtgatctccctggaatcaggcgacgctagcatccatgacactgtagagaatctgatcatattggccaataattcattgtcatctaacggcaacgtgacggagtccggctgtaaagaatgcgaggaactggaggagaaaaacataaaggagttcctccagtcttttgtgcacattgtccagatgtttatcaacacatcgtag

SEQ ID NO: 248557 - DNA, 408 bp, Artificial Sequence
  derived and/or modified sequence
atggtgttgggaacgatcgatctgtgctcttgtttctcagctggtctgccgaaaactgaagcaaattgggtaaacgtgatctccgacttgaaaaagattgaagaccttatccagagcatgcatatcgatgccacattgtacacggagtccgatgtgcaccctagttgcaaagtaacagccatgaagtgttttctcctagaactgcaagtgatctctctggaaagcggggatgcttccattcacgatacagtggagaatctgatcatcctggcaaataactctctgtcaagtaatggcaatgtgaccgaaagcgggtgcaaagaatgcgaggagctggaagagaaaaatattaaggagttccttcagtccttcgttcatattgtgcagatgtttatcaacaccagttag

SEQ ID NO: 248558 - DNA, 405 bp, Artificial Sequence
  derived and/or modified sequence
atggtgctgggcaccatcgacctgtgcagctgcttcagcgccggcctgcccaagaccgaggccaactgggtgaacgtgatcagcgacctgaagaagatcgaggacctgatccagagcatgcacatcgacgccaccctgtacaccgagagcgacgtgcaccccagctgcaaggtgaccgccatgaagtgcttcctgctggagctgcaggtgatcagcctggagagcggcgacgccagcatccacgacaccgtggagaacctgatcatcctggccaacaacagcctgagcagcaacggcaacgtgaccgagagcggctgcaaggagtgcgaggagctggaggagaagaacatcaaggagttcctgcagagcttcgtgcacatcgtgcagatgttcatcaacaccagc

SEQ ID NO: 248559 - protein, 406 aa, Artificial Sequence
  derived and/or modified sequence
MADSQLFCVAEERSGHCAVVDGNFLYVWGGYVSIEDNEVYLPNDEIWTYDIDSGLWRMHLMEGELPASMSGSCGACINGKLYIFGGYDDKGYSNRLYFVNLRTRDETYIWEKITDFEGQPPTPRDKLSCWVYKDRLIYFGGYGCRRHSELQDCFDVHDASWEEQIFWGWHNDVHIFDTKTQTWFQPEIKGGVPPQPRAAHTCAVLGNKGYIFGGRVLQTRMNDLHYLNLDTWTWSGRITINGESPKHRSWHTLTPIADDKLFLCGGLSADNIPLSDGWIHNVTTNCWKQLTHLPKTRPRLWHTACLGKENEIMVFGGSKDDLLALDTGHCNDLLIFQTQPYSLLRSCLDCIGKNSIMLESQISLLPPKLLQQVLKKITFWAAANHREEQRVQKEETENKYQWISSN

SEQ ID NO: 248560 - DNA, 1221 bp, Artificial Sequence
  derived and/or modified sequence
atggccgacagccagctgttctgcgtggccgaggagagaagcggccactgcgccgtggtggacggcaacttcctgtacgtgtggggcggctacgtgagcatcgaggacaacgaggtgtacctgcccaacgacgagatctggacctacgacatcgacagcggcctgtggagaatgcacctgatggagggcgagctgcccgccagcatgagcggcagctgcggcgcctgcatcaacggcaagctgtacatcttcggcggctacgacgacaagggctacagcaacagactgtacttcgtgaacctgagaaccagagacgagacctacatctgggagaagatcaccgacttcgagggccagccccccacccccagagacaagctgagctgctgggtgtacaaggacagactgatctacttcggcggctacggctgcagaagacacagcgagctgcaggactgcttcgacgtgcacgacgccagctgggaggagcagatcttctggggctggcacaacgacgtgcacatcttcgacaccaagacccagacctggttccagcccgagatcaagggcggcgtgcccccccagcccagagccgcccacacctgcgccgtgctgggcaacaagggctacatcttcggcggcagagtgctgcagaccagaatgaacgacctgcactacctgaacctggacacctggacctggagcggcagaatcaccatcaacggcgagagccccaagcacagaagctggcacaccctgacccccatcgccgacgacaagctgttcctgtgcggcggcctgagcgccgacaacatccccctgagcgacggctggatccacaacgtgaccaccaactgctggaagcagctgacccacctgcccaagaccagacccagactgtggcacaccgcctgcctgggcaaggagaacgagatcatggtgttcggcggcagcaaggacgacctgctggccctggacaccggccactgcaacgacctgctgatcttccagacccagccctacagcctgctgagaagctgcctggactgcatcggcaagaacagcatcatgctggagagccagatcagcctgctgccccccaagctgctgcagcaggtgctgaagaagatcaccttctgggccgccgccaaccacagagaggagcagagagtgcagaaggaggagaccgagaacaagtaccagtggatcagcagcaactag

SEQ ID NO: 248561 - DNA, 2691 bp, Artificial Sequence
  derived and/or modified sequence
gttcgtgcgtggagcagtcggggctggaggcgaggccgccgggcgggcaggggttgtggcgcggcaagcggcgggccagcgacggcgcgaatggcggactctcagctgttctgtgtggcggaggaacgcagcggccactgcgccgtggtggacggaaacttcctctacgtgtgggggggctacgtgtctattgaagacaatgaagtatatttgcctaatgatgaaatttggacctatgatattgatagtgggttgtggagaatgcacctcatggaaggagaactcccagcctccatgtcaggaagctgtggtgcttgcattaatggaaagctgtacatttttggaggatatgatgacaaaggatacagcaatcgactttattttgttaatttacgaacaagagatgaaacctacatttgggagaaaatcaccgactttgaagggcaaccacctacaccacgtgataaactttcctgctgggtatataaagacagactaatatattttggtggttatgggtgtaggagacacagtgaactccaagactgttttgatgttcatgatgcatcttgggaagagcagatattctggggatggcataatgatgtccacatatttgacacaaagacacagacttggtttcaaccagaaattaaaggtggagttccaccacagccacgagccgcgcatacatgtgcagttcttggaaataagggttatatctttggcggacgtgttctgcaaactaggatgaatgatttgcactatctaaacctagacacctggacttggtctggaaggattactattaatggagaaagcccaaaacatcggtcatggcatactttaacacctatagctgatgataaacttttcctatgtggtggactaagtgcagataatatcccattaagtgatggttggattcataatgtcacaacaaattgttggaaacaacttacacatttacctaaaacaagacctaggttatggcacacagcctgtttgggaaaagaaaatgaaataatggtatttggtgggagcaaagatgacttacttgccttggatacaggtcactgtaatgatttattgatctttcaaacacagccttattcactactcaggtcatgccttgactgcattggtaaaaattctatcatgttagaaagtcagatatctttattacctcctaaacttctgcaacaagtactcaaaaaaataacattttgggctgcagctaatcaccgagaagaacaaagagtccaaaaagaagaaacagaaaataaatatcagtggatcagtagcaattaaattgttatatactttacatatttagtatgttttaactttttaatcagactatacatttacactcccaaattgcaggctttatttaaaggataaaatttaaaggataaaaaaacagtcactctgttaagtgactatatgccatgggatatatggaaaaaagatattaatgcagattaatttatatttgtaaacaaatttccttacaaactgcagaacaaatattctttctgaaagtaagtacagttataacagattttaaatcaatgtgtattctttactggaaagattacatacatttgagaataagaaattactctcaagaacttcagaaatctgcaacataattttataaatatataaatacatgtatgtatgtcaaaacactacatatacactttcagaaagaataaactttctcaagtcattttaaagttacctaacgttcttcttgaataactaatacagtgggtcaaatattataaaataggcaaacaccaaaatggtattaaatattgaactcctgaccttttcgacacttacctagtaaagtattcttaggcatcatcataacttttcctcacctttattcgaatagaggaataaatgtcttcagttgtctctccattacccctaagttattagtttgtctagtttatatataaagaccatgttttaaagtacataaagtggaggtttatttatcatacaggctttgaaacattaagaagcagtatttttattaactttttgagacatattaaaatacattttgccttagaagactgcttctaaagtaatttttgtaagtaatgagatgggatggtaatctagtaatttgactttatagaaatccctcagtttggcccccaccattctacagagttgtactcaagacagatactgaaaaaatctaataccttcccttgtattttcagcattaccatctatacagaaatggaacactgtatctttatattcctaaaaatggtacttttggcataattaagaaatttttcttcatattatcacaatcatgcccttccattgaattattaattacaattaattactaaaaagcttggtatgtaaaattattctccacaatattaccatgcaagttatctctgaaatttaaaatgttaaagaaaaacatttctatattgaaatatatataatttataatgaaaattatagtagtttgtagtatttcattgaattttagagagatatttcatatatatgtactgtattttggatgtgtaaagcttctatgtattgaaatatttttttacgttttatttattgtacaaagtgtatataattactgttttcttttttgtcagtgtaaagcagtcattagaattgattatacaaaaaata

SEQ ID NO: 248562 - DNA, 1221 bp, Artificial Sequence
  derived and/or modified sequence
atggccgattcccagctgttctgtgtcgccgaagaacgctcagggcactgcgcagtggtagacgggaattttctctacgtgtggggcggatatgtaagtatcgaagacaacgaagtgtacctccccaacgacgaaatttggacttatgacattgattccgggctgtggaggatgcatctgatggaaggcgagctgccagctagtatgtctggcagctgcggcgcttgtattaacggaaaactatatatatttggtggttacgacgacaagggctactccaatcggctgtattttgtaaacttgaggacccgcgatgagacctacatttgggaaaaaattacagacttcgaaggccagccaccgaccccccgtgataagttaagctgctgggtgtataaagatcgattaatttattttgggggttatggatgccggagacacagcgagctgcaggattgttttgatgtgcacgatgcaagttgggaggagcaaatattctgggggtggcacaacgacgtccatatctttgacacaaagacccagacctggtttcagcctgagataaaggggggagtgcccccccagccgcgtgcagcacacacatgtgcggtgcttggaaacaagggctatatttttggcggtcgcgtcttacagacacgcatgaacgacctgcattatctgaatctcgacacctggacttggtccggtaggatcaccattaacggagagtccccaaagcataggtcctggcacacactaactccaattgcagatgataagctctttttatgcggggggctgtctgccgacaacatccccttgagtgatggctggattcataacgttactacaaactgctggaagcagttaactcatcttcctaaaactagaccccgcttgtggcacaccgcatgcttgggaaaagagaacgagattatggtttttggagggtctaaggacgatctgctagcactagataccggtcattgtaacgacctcctgatatttcaaacccagccctacagtttgctgcgcagctgtctggattgtattggcaaaaattccataatgttagaatcccagataagcctgctgcctcctaagctgttgcagcaggtgttgaagaagatcacattctgggccgccgccaatcatagagaggagcagcgggtgcagaaggaggaaaccgagaacaagtaccagtggatcagcagtaattag

SEQ ID NO: 248563 - DNA, 1221 bp, Artificial Sequence
  derived and/or modified sequence
atggctgacagccagctgttctgtgtggccgaggagaggagcggccactgtgctgtggtggatggcaacttcctgtatgtgtggggcggctacgtgtccattgaagataatgaggtgtacctgcccaatgatgagatctggacctatgacattgattctggcctgtggaggatgcacctgatggagggggagctgcctgcctccatgagcggcagctgtggggcctgcatcaacgggaagctgtacatctttggaggctatgatgacaagggctacagcaaccggctgtactttgtgaacctgcggaccagagatgagacctacatctgggagaagatcacagactttgagggccagccccccaccccccgggacaagctgagctgctgggtgtacaaggacaggctcatctactttggaggctacggctgcagaagacacagcgagctgcaggactgctttgatgtgcatgatgcctcctgggaggagcagatcttctggggctggcacaatgatgtgcacatctttgacaccaagacccagacctggttccagcctgagatcaagggcggcgtgcccccccagccccgggccgcccacacctgtgctgtgctgggcaacaagggctacatctttggaggccgggtgctgcagaccaggatgaatgacctgcactacctgaacctggacacctggacctggagcggccgcatcaccatcaatggagagagccccaagcaccgctcctggcacaccctgacccccatcgcagatgacaagctgttcctgtgtggcggcctgtctgctgacaacatccccctgagtgatggctggatccacaacgtgaccaccaactgctggaagcagctgacccacctgcccaagacccggccccggctgtggcacacagcctgcctgggcaaggaaaatgagatcatggtgtttggaggcagcaaggatgacctgctggccctggacaccggccactgcaatgacctgctgatcttccagacccagccctacagcctgctgcggagctgcctggactgcatcggcaagaacagcatcatgctggagagccagatcagcctgctgccccccaagctgctgcagcaggtgctgaagaagatcaccttctgggccgccgccaaccaccgggaggagcagagggtgcagaaggaggagacagagaacaagtaccagtggatcagcagcaactag

SEQ ID NO: 248564 - DNA, 1221 bp, Artificial Sequence
  derived and/or modified sequence
atggccgacagccagctgttctgcgtggccgaggagcggagcggccactgcgcagttgtcgatgggaatttcctttacgtgtggggggggtacgtttccatcgaggacaacgaggtatacctgcctaacgatgagatatggacttacgatattgactctggcctctggagaatgcatctcatggagggggagctgcctgcgtctatgtccggcagctgtggtgcgtgcataaacggcaagctgtatatattcgggggctatgacgataaaggctattcaaaccgtctgtattttgtcaacctccgaacaagagatgagacatatatctgggaaaaaatcacagacttcgaagggcagccgccaaccccacgtgacaagctctcgtgttgggtctacaaggacagactgatttacttcggaggttatgggtgtcggagacactcagagctgcaggactgcttcgacgtccatgatgcatcctgggaagaacagattttctggggttggcacaatgacgtccacatatttgacactaagacccagacctggttccagcccgaaatcaaggggggagtgcctcctcagcccagggctgcccatacatgcgcagtgctagggaataaaggttacatcttcgggggcagagtgctgcagacacgcatgaacgacctccattatctgaacctagatacctggacatggagcggccgcattaccattaacggcgaaagcccaaagcaccggagttggcataccctcacccccattgccgacgataaactgtttctgtgtggcggtttgtccgctgacaacatccctctgtccgatgggtggatacataacgttaccacaaactgttggaaacagttgacacatcttccaaagactagaccgagactctggcacactgcctgcctgggcaaggaaaacgagattatggtgtttggggggtcaaaagatgacctcctcgccctagacaccgggcactgtaatgacttgcttatatttcagacccagccctactctctgttgaggtcatgccttgactgcatcggcaagaactctattatgttggagagccagatctctcttctgcctcctaagctgcttcagcaggtgttgaagaagatcactttctgggctgccgccaatcacagagaggaacagcgggttcagaaggaggaaacagagaataagtatcaatggatcagcagtaactag

SEQ ID NO: 248565 - DNA, 1221 bp, Artificial Sequence
  derived and/or modified sequence
atggcagatagccagctgttctgcgtggcagaggaaagaagcggccactgcgccgtggtggacggcaactttctctacgtgtgggggggttacgtgagcatcgaggacaacgaagtttacctgcccaacgacgagatatggacttacgatatcgattccggcttgtggaggatgcatctgatggagggcgaactgcccgcatccatgagcggatcctgcggcgcttgtatcaacggaaaactctatatctttggtggatacgacgataaagggtactccaatcggctctatttcgtcaacctccggacccgggatgaaacctacatatgggagaaaatcacagacttcgagggccagccacctaccccccgtgacaaactgagttgttgggtgtataaagataggcttatttatttcggcggatatggctgtcgaagacactcggaacttcaggattgttttgatgttcacgatgcaagttgggaagagcagattttttggggttggcataacgatgttcatatctttgacacaaagacccaaacctggtttcagcccgagatcaagggtggcgtgccaccccagccgagagcagctcacacgtgcgcggttctcggcaacaagggctatatcttcggcggacgggtcctgcaaacccggatgaatgacctgcattaccttaacctcgatacctggacctggtcagggaggattaccatcaatggggagtcccccaaacaccgctcatggcacacactgaccccaatcgcggacgataaattatttctgtgcggaggcctatctgcggataatatcccactgtcagacggctggattcacaacgttaccaccaactgctggaagcaattgactcatctcccgaaaacccgccctaggctgtggcacaccgcatgtttaggcaaggagaacgaaataatggtttttggcggaagtaaggatgatctcctagctttagatacaggtcactgtaatgatctgctcatcttccagacacaaccatactcactgttaaggagctgcttggattgtataggcaagaatagcatcatgttagagtcgcagatctcactgctgcccccaaagctgttgcagcaggtgctgaaaaagattacattttgggcagccgcaaatcatcgggaagagcagagagtacaaaaggaagagacagagaataagtaccagtggatctcctccaactag

SEQ ID NO: 248566 - protein, 543 aa, Artificial Sequence
  derived and/or modified sequence
MPTQQPAAPSTRAPKPSRSLSGSLCALFSDADSGSGMKAELPPGPGAVGREMTKEEKLQLRKEKKQQKKKRKEEKGAEPETGSAVSAAQCQGPTRELPESGIQLGTPREKVPAGRSKAELRAERRAKQEAERALKQARKGEQGGPPPKASPSTAGETPSGVKRLPEYPQVDDLLLRRLVKKPERQQVPTRKDYGSKVSLFSHLPQYSRQNSLTQFMSIPSSVIHPAMVRLGLQYSQGLVSGSNARCIALLRALQQVIQDYTTPPNEELSRDLVNKLKPYMSFLTQCRPLSASMHNAIKFLNKEITSVGSSKREEEAKSELRAAIDRYVQEKIVLAAQAISRFAYQKISNGDVILVYGCSSLVSRILQEAWTEGRRFRVVVVDSRPWLEGRHTLRSLVHAGVPASYLLIPAASYVLPEVSKVLLGAHALLANGSVMSRVGTAQLALVARAHNVPVLVCCETYKFCERVQTDAFVSNELDDPDDLQCKRGEHVALANWQNHASLRLLNLVYDVTPPELVDLVITELGMIPCSSVPVVLRVKSSDQ

SEQ ID NO: 248567 - DNA, 1633 bp, Artificial Sequence
  derived and/or modified sequence
atgccaacccagcagccggctgcgccgagtactcgtgcccccaaaccctcccggagtctctctggctcactttgtgccctgttttctgatgcagactcgggatccgggatgaaggcggagcttccccctgggcctggggcagtggggagggaaatgaccaaagaagaaaagctgcagcttcggaaggaaaagaaacagcagaagaagaaacggaaggaagaaaagggggcagaaccagagactggctctgctgtatctgcagcccaatgtcaaggcccaaccagagaactgccagaatcgggcattcagttgggcactcctcgggagaaagttccagctggtcggagtaaggccgaacttcgggctgagcgtcgagccaagcaggaggccgagcgggccctgaaacaggcaagaaaaggggaacaaggaggaccacctcctaaggccagccccagcacagctggagaaaccccctcaggagtgaagcgtctccctgagtaccctcaggttgatgacctacttctgagaaggcttgttaaaaaaccagagcgtcaacaggttcctacacgaaaggattatggatccaaagtcagtctcttctctcacctaccccagtacagcagacaaaactctctgacccagtttatgagcatcccatcctctgtgatccacccagccatggtgcgactcggcctgcagtactcccagggcctggtcagtggctccaatgcccggtgtattgccctgcttcgtgccttgcagcaggtgattcaggattacacaacaccgcctaatgaagaactctccagggatctagtgaataaactaaaaccctacatgagcttcctgactcagtgccgtcccctgtcagcgagcatgcacaacgccatcaagttccttaacaaggaaatcaccagtgtgggcagttccaagcgggaagaggaggccaagtcagaacttcgagcagccattgatcggtatgtgcaagagaagattgtgctagcagctcaggcaatttcacgctttgcttaccagaagatcagtaatggagatgtgatcctggtatatggatgctcatctctggtatcacgaattcttcaggaggcttggacagagggccggcggtttcgggtggtagtggtggacagccggccatggctggaaggaaggcacacactacgttctctagtccatgctggtgtcccagcctcctacctgctgattcctgcagcctcctatgtgctcccagaggtttccaaggtgctattgggagctcatgcactcttggccaacgggtctgtgatgtcacgggtagggacagcacagttagccctggtggctcgagcccataatgtaccagtgctggtttgctgtgaaacatacaagttctgtgagcgtgtgcagactgatgcctttgtctctaatgagctagatgaccctgatgatctgcaatgtaagcggggagaacatgttgcgctggctaactggcagaaccacgcatccctacggttgttgaatctagtctatgatgtgactcccccagagcttgtggatctggtgatcacggagctggggatgatcccttgcagttctgtacctgttgttctacgagtcaagagcagtgaccagtgac

SEQ ID NO: 248568 - DNA, 1632 bp, Artificial Sequence
  derived and/or modified sequence
atgcctacccagcagcccgccgcgccaagtacccgcgctcccaaaccttccagatctctctccggatctctctgtgccctttttagcgatgccgattctggtagtggcatgaaagctgaactgccaccaggcccaggagcagtaggcagggagatgactaaagaggaaaagttgcagttgagaaaagagaagaagcagcagaagaaaaagcggaaggaggaaaagggcgctgagcccgagacgggcagcgctgttagtgccgcacagtgtcagggccccacacgggaactgccggaatcgggtatccagttaggtacacctcgggaaaaggtgcctgcaggccggagcaaagccgagttgagagccgaacgccgtgctaagcaggaagccgagagggccctcaagcaggcaagaaaaggagagcaagggggtcctccccctaaagcatcacctagtaccgcaggcgagaccccatcaggggtaaagaggctgcccgaataccctcaggtggatgacttattgttacgcagacttgtaaaaaaaccagaaaggcagcaggtaccaaccaggaaggattacggttccaaggttagtctgttctcccacctaccacagtacagtcgacagaattccctgacgcagttcatgtccatcccaagctccgtaatacatccggccatggtgcgacttggcctacagtattcccaaggccttgtgagtgggtcgaacgcccggtgcattgccctcctgagggcccttcaacaggttatacaggattatacaactccacctaatgaagaattgtcccgagacctggtcaacaaattgaaaccatatatgtcgttcttgacccagtgtagaccactatctgcttcaatgcataacgccattaagttcttgaataaagagatcacatcagtaggcagctcaaagagggaggaggaagcaaagtctgagctgcgagccgcaatcgatagatacgtgcaagagaagatcgtgcttgcggcccaggctatctcacggttcgcgtaccagaagatcagcaacggggacgtcatactggtgtacggctgctctagcctcgtatcccgcatacttcaggaggcctggactgaaggcaggcggttccgggtcgtggtcgtggactctcggccctggctggagggacgtcatacgctgagatcattggtgcacgccggagttcctgcatcatacctccttattcctgccgcctcatacgtgctacctgaggtttcgaaagtgctgctgggggcacacgccctgcttgcgaatgggtctgtcatgtcccgcgtaggcacagcacagttggctctggtggccagggcccacaacgtgcccgtgctagtgtgttgtgaaacatacaagttctgtgagcgggttcagacggatgcatttgtgtccaacgagcttgacgacccagacgatctgcagtgcaaaagaggcgagcacgtcgcccttgctaattggcagaatcacgcgagccttcgcctgctcaaccttgtttatgatgtcacaccacctgaactcgtagaccttgtcattactgaactgggcatgatcccttgtagctcggtacctgttgtattacgggtcaaatcctccgaccagtag

SEQ ID NO: 248569 - DNA, 1632 bp, Artificial Sequence
  derived and/or modified sequence
atgcccacccagcagcctgctgcccccagcacccgggcccccaagcccagccgcagcctgagcggcagcctgtgtgccctcttcagtgatgctgacagcggcagcggcatgaaggccgagctgcccccaggccctggagctgtgggccgggagatgaccaaggaggagaagctgcagctgaggaaggagaagaagcagcagaagaagaagaggaaggaggagaagggagctgagcctgagactggatctgctgtgtctgctgcccagtgccagggccccacccgggagctgcctgagagcggcatccagctgggcaccccccgggagaaggtgcctgctggccgcagcaaggccgagctgcgggcagagcggcgggccaagcaggaggccgagcgggccctgaagcaggccaggaaaggagagcagggcggccccccacccaaggccagccccagcacagctggggagaccccatctggagtgaagaggctgcctgagtacccccaggtggatgacctgctgctgcggcggctggtgaagaagccagagcggcagcaggtgcccaccaggaaggactatggcagcaaggtgtccctcttcagccacctgccccagtacagccggcagaacagcctgacccagttcatgagcatccccagcagcgtcatccacccagccatggtgcggctgggcctgcagtacagccagggcctggtgtctggcagcaatgcccgctgcatcgccctgctgcgggccctgcagcaggtgatccaggactacaccaccccaccaaatgaggagctgagccgggacctggtgaacaagctgaagccctacatgtccttcctgacccagtgccggcccctgagcgcctccatgcacaatgccatcaagttcctgaacaaggagatcacctctgtgggcagcagcaagcgggaggaggaggccaagtctgagctgcgggccgccatcgacagatatgtgcaggagaagatcgtgctggccgcccaggccatcagcagatttgcctaccagaagatcagcaatggagatgtgatcctggtgtatggctgcagcagcctggtgagccgcatcctgcaggaggcctggacagagggccgccgcttccgggtggtggtggtggacagccggccctggctggagggccgccacaccctgcggagcctggtgcatgctggggtgcctgccagctacctgctgatcccagctgccagctatgtgctgcctgaggtgtccaaggtgctgctgggcgcccacgccctgctggccaatggatctgtgatgagccgggtgggcacagcccagctggccctggtggcccgggcccacaacgtgcctgtgctggtgtgctgtgagacctacaagttctgtgagcgggtgcagacagatgcctttgtgtccaatgagctggatgatcctgatgacctgcagtgcaagagaggagagcacgtggccctggccaactggcagaaccacgccagcctgcggctgctgaacctggtgtatgatgtgaccccacctgagctggtggacctggtgatcacagagctgggcatgatcccctgcagctctgtgcctgtggtgctgcgggtgaagagcagtgaccagtag

SEQ ID NO: 248570 - DNA, 1632 bp, Artificial Sequence
  derived and/or modified sequence
atgcccacccagcagcccgccgcccccagcacccgggcccccaagccatctcgaagcctctcaggctctttgtgtgccctgttctccgatgccgactccggttccgggatgaaggcggaactgcctcctggcccaggagccgtgggtcgggaaatgaccaaggaggaaaagctgcagctgcgaaaggagaaaaaacaacagaagaaaaagagaaaggaggaaaaaggggctgaacccgaaacgggcagtgctgtatctgccgcccagtgccagggccccaccagggaacttccagagagtgggatccaactgggcacgcctcgagagaaggtgcccgcagggagatccaaggctgaactcagagctgaacgcagggcaaaacaggaggcagagagggccttaaaacaggccaggaaaggcgagcagggcggtccaccgcccaaggcttcaccatctaccgccggggaaactccaagcggcgtaaaaaggctccctgagtacccgcaggttgatgatttactcttacgccggttggtcaagaagccagaacgccagcaggtgcccactcggaaagactatggctctaaggtctcactttttagtcacttacctcaatactccagacagaactctctgacgcaatttatgagtattccatcgtctgtcattcatcctgcaatggtgaggctgggactgcagtacagtcagggcctggtcagcggctctaacgcgaggtgcattgcactacttcgggctttgcagcaggtgatccaagactacaccacgccacccaatgaggagttgtctcgcgacctggtgaacaagctgaaaccttacatgagctttctaactcagtgccgaccactgtccgcatccatgcacaacgctatcaagtttctgaacaaggagatcaccagtgtcggcagctctaaaagagaggaggaagccaagtcagaactacgtgctgccatcgacaggtacgtccaggaaaaaatcgtcctggccgcccaggctattagccggtttgcttaccagaaaatctccaatggcgacgtcattctcgtgtacggttgctcctcactggtgtctcgcattctgcaggaggcctggacggagggcaggcgtttcagggtggtagttgtggactccaggccgtggctggaaggtaggcacacccttcgctccctcgtgcacgcaggggttcccgctagctatctccttatccccgctgctagctatgtactgccagaggtcagtaaggtgctactgggtgctcacgcgctcctggcaaacggatctgtgatgagcagggtggggacagcacagttggccttggtggccagagcgcacaatgtaccggtgctcgtgtgctgcgagacctataagttttgtgaacgagtccagaccgacgccttcgtgtccaacgagctggacgatcctgacgatctgcagtgtaagaggggagagcatgtagcccttgctaattggcaaaaccatgcttcattaagactgctgaatcttgtgtatgatgttacaccacctgagctggtggatctcgtgatcacagaattggggatgatcccttgtagttccgtgccagttgtcctgcgcgtaaaatccagtgaccagtag

SEQ ID NO: 248571 - DNA, 1632 bp, Artificial Sequence
  derived and/or modified sequence
atgccgactcagcagccagccgcaccatccactcgtgcccctaagccatcgaggagtctgtctggctccctgtgtgctttgttttctgatgcagattctggctccggcatgaaggccgagctcccccctgggcctggagctgtcggtcgagaaatgactaaggaggaaaagctgcagctccgcaaggagaaaaaacagcaaaagaagaaaagaaaagaagagaaaggggctgaacccgagacgggttctgccgtttcagctgcacagtgccagggccctactcgagaactgcctgagtctggcattcaactggggacacccagagagaaagtgcccgctgggagaagtaaagccgaactgagagccgaacgcagggccaagcaagaagccgagagagcgctgaagcaggcgaggaaaggcgaacagggcggacccccaccaaaggcgagcccatccacagcaggggaaactccctccggagttaaacgcttgcccgaatatccgcaggttgacgatctgctcctccgacgactcgtcaaaaagcccgagcgccagcaggttccaacacggaaagattacgggagtaaggtgagtctcttttcccatctgccgcagtattctcggcagaactcactgactcagtttatgtccattccctcatctgtgattcacccagccatggttcggctgggcctgcagtatagtcagggactggtctcagggagcaacgccaggtgcattgccctgctgcgcgctctgcagcaggttatccaggactacacaacacccccaaatgaggagctaagcagagacctagtgaacaaactgaagccctatatgtctttcttgactcagtgccggccactgtcagcatctatgcacaatgccattaaattccttaacaaggaaataacgagtgtgggcagttctaagagggaagaggaagccaagagcgaactacgcgcagccattgaccgctatgtgcaggagaagatagttctggccgcacaggcaatctccaggtttgcttaccaaaaaatttcgaatggggatgtgattctggtgtatgggtgttctagcctggtgtccagaattcttcaggaagcctggactgaaggcaggcggttcagagtagtggtggttgatagcaggccctggctggaaggccgtcacacattaaggagcctggtgcacgcgggtgtaccagcaagctatctgctgatcccagccgcttcctatgtgctgccggaggtgagcaaggtcctgctgggtgcccacgcactgcttgcgaacgggagcgttatgtctcgggtcggtactgctcagctggccttggtggcacgggcacacaacgtgcctgtcctggtgtgttgcgaaacatacaaattctgcgaacgagttcagacagacgcattcgtgagcaacgagctggacgatcccgacgatctacagtgtaaacgcggagagcacgtcgcacttgccaattggcagaatcacgcctctcttaggctactgaacctcgtctacgatgtaactccgcctgaacttgtggaccttgttatcacagagttgggaatgattccctgttcaagtgttcctgtggttcttcgggtgaaaagcagcgatcagtag

SEQ ID NO: 248572 - DNA, 1632 bp, Artificial Sequence
  derived and/or modified sequence
atgcccacccagcagcccgccgcccccagcaccagagcccccaagcccagcagaagcctgagcggcagcctgtgcgccctgttcagcgacgccgacagcggcagcggcatgaaggccgagctgccccccggccccggcgccgtgggcagagagatgaccaaggaggagaagctgcagctgagaaaggagaagaagcagcagaagaagaagagaaaggaggagaagggcgccgagcccgagaccggcagcgccgtgagcgccgcccagtgccagggccccaccagagagctgcccgagagcggcatccagctgggcacccccagagagaaggtgcccgccggcagaagcaaggccgagctgagagccgagagaagagccaagcaggaggccgagagagccctgaagcaggccagaaagggcgagcagggcggccccccccccaaggccagccccagcaccgccggcgagacccccagcggcgtgaagagactgcccgagtacccccaggtggacgacctgctgctgagaagactggtgaagaagcccgagagacagcaggtgcccaccagaaaggactacggcagcaaggtgagcctgttcagccacctgccccagtacagcagacagaacagcctgacccagttcatgagcatccccagcagcgtgatccaccccgccatggtgagactgggcctgcagtacagccagggcctggtgagcggcagcaacgccagatgcatcgccctgctgagagccctgcagcaggtgatccaggactacaccaccccccccaacgaggagctgagcagagacctggtgaacaagctgaagccctacatgagcttcctgacccagtgcagacccctgagcgccagcatgcacaacgccatcaagttcctgaacaaggagatcaccagcgtgggcagcagcaagagagaggaggaggccaagagcgagctgagagccgccatcgacagatacgtgcaggagaagatcgtgctggccgcccaggccatcagcagattcgcctaccagaagatcagcaacggcgacgtgatcctggtgtacggctgcagcagcctggtgagcagaatcctgcaggaggcctggaccgagggcagaagattcagagtggtggtggtggacagcagaccctggctggagggcagacacaccctgagaagcctggtgcacgccggcgtgcccgccagctacctgctgatccccgccgccagctacgtgctgcccgaggtgagcaaggtgctgctgggcgcccacgccctgctggccaacggcagcgtgatgagcagagtgggcaccgcccagctggccctggtggccagagcccacaacgtgcccgtgctggtgtgctgcgagacctacaagttctgcgagagagtgcagaccgacgccttcgtgagcaacgagctggacgaccccgacgacctgcagtgcaagagaggcgagcacgtggccctggccaactggcagaaccacgccagcctgagactgctgaacctggtgtacgacgtgaccccccccgagctggtggacctggtgatcaccgagctgggcatgatcccctgcagcagcgtgcccgtggtgctgagagtgaagagcagcgaccagtag

SEQ ID NO: 248573 - protein, 342 aa, Artificial Sequence
  derived and/or modified sequence
MAAGTAVGAWVLVLSLWGAVVGAQNITARIGEPLVLKCKGAPKKPPQRLEWKLGGGPWDSVARVLPNSSLFLPAVGIQDEGIFRCQAMNRNGKETKSNYRVRVYQIPGKPEIVDSASELTAGVPNKVGTCVSEGSYPAGTLSWHLDGKPLVPNEKGVSVKEQTRRHPETGLFTLQSELMVTPARGGDPRPTFSCSFSPGLPRHRALRTAPIQPRVWEPVPLEEVQLVVEPEGGAVAPGGTVTLTCEVPAQPSPQIHWMKDVSDLERGAGRTRRGGANCRLCGRIRAGNSSPGPGDPGRPGDSRPAHWGHLVAKAATPRRGEEGPRKPGGRGGACRTESVGGT

SEQ ID NO: 248574 - protein, 342 aa, Artificial Sequence
  derived and/or modified sequence
MAAGTAVGAWVLVLSLWGAVVGAQNITARIGEPLVLKCKGAPKKPPQRLEWKLGGGPWDSVARVLPNGSLFLPAVGIQDEGIFRCQAMNRNGKETKSNYRVRVYQIPGKPEIVDSASELTAGVPNKVGTCVSEGSYPAGTLSWHLDGKPLVPNEKGVSVKEQTRRHPETGLFTLQSELMVTPARGGDPRPTFSCSFSPGLPRHRALRTAPIQPRVWEPVPLEEVQLVVEPEGGAVAPGGTVTLTCEVPAQPSPQIHWMKDVSDLERGAGRTRRGGANCRLCGRIRAGNSSPGPGDPGRPGDSRPAHWGHLVAKAATPRRGEEGPRKPGGRGGACRTESVGGT

SEQ ID NO: 248575 - DNA, 1029 bp, Artificial Sequence
  derived and/or modified sequence
atggctgcggggacagccgtgggggcctgggtgctggtattgtctctttggggcgccgttgtcggagcccagaacatcacggcgcgaataggggagcccctcgtgctgaagtgtaaaggcgcccccaagaagcctcctcagcgattggagtggaaactagggggtggcccttgggactctgtcgctcgagtgcttcccaattcatcccttttccttcctgctgttggcattcaggacgaaggaatctttaggtgtcaggccatgaaccgaaatgggaaagagacgaaatccaattacagggtgagggtctaccaaattcccgggaagccagagattgtagactccgccagtgagctgacggccggtgttcctaataaagtgggcacctgtgtgtccgagggctcttatcccgctggcacattgtcctggcatcttgatgggaaaccactggtccccaatgagaaaggcgtctccgtgaaggaacagacccgtaggcacccagaaacgggattattcaccctgcagagcgagctcatggtaacacccgcaaggggcggcgaccctcgtcccaccttttcatgctcattctctcccggattaccccggcatcgagccctgcggaccgcaccaatacagccacgcgtatgggagcctgtccctctggaggaggttcagcttgtggtcgaacctgagggcggagctgtggctccaggaggaacagttacccttacttgcgaggtgccagcccagccgagcccacagatccactggatgaaggacgtttccgacctggaaaggggagccgggcgaaccagacgcggcggagcaaactgtaggttgtgtggtcgaatccgggccggcaactcatcccccggtccaggcgatcctgggagacctggtgatagtcgaccagcccattggggccatctggtggcaaaagccgcaactccccgcagaggagaggagggcccacgcaaacctggcggaagaggtggggcgtgtcgaactgaatccgtgggcggcacgtag

SEQ ID NO: 248576 - DNA, 1029 bp, Artificial Sequence
  derived and/or modified sequence
atggctgctggaacagctgtgggcgcctgggtgctggtgctgagcctgtggggcgctgtggtgggcgcccagaacatcacagcccgcatcggggagcccctggtgctgaagtgcaagggggcccccaagaagccaccccagaggctggagtggaagctgggcggcggcccctgggacagcgtggcccgggtgctgcccaacagcagcctcttcctgcctgctgtgggcatccaggatgagggcatcttccgctgccaggccatgaacagaaatggcaaggagaccaagagcaactacagagtgcgggtgtaccagatccctgggaagccagagatcgtggacagcgccagcgagctgacagctggggtgcccaacaaggtgggcacctgtgtgtctgagggcagctacccagctggcaccctgtcctggcacctggatggcaagcccctggtgcccaatgaaaaaggagtgtctgtgaaggagcagacccggcggcaccctgagaccggcctcttcaccctgcagagcgagctgatggtgaccccagcccggggcggggacccccggcccaccttcagctgcagcttcagccctggcctgcccaggcaccgggccctgaggacagcccccatccagccccgggtgtgggagcctgtgcccctggaggaggtgcagctggtggtggagcctgagggcggcgctgtggcccctgggggcaccgtgaccctgacctgtgaggtgcctgcccagcccagcccccagatccactggatgaaggatgtgtctgacctggagcggggggccggccgcacccggcggggcggggccaactgccgcctgtgtggccgcatccgggccggcaacagcagccctggccctggggaccccggccggcctggggacagcaggcctgcccactggggccacctggtggccaaggccgccaccccccggcggggggaggagggccccaggaagccaggcggccggggcggggcctgcaggacagagagcgtgggcggcacctag

SEQ ID NO: 248577 - DNA, 1029 bp, Artificial Sequence
  derived and/or modified sequence
atggccgccggcaccgccgtgggcgcctgggtgctggtgctgagcctatggggagctgtggttggcgctcaaaacattactgcaagaattggcgaacccttagttttaaagtgtaaaggcgccccgaagaaaccaccccagaggctggaatggaaactcggaggaggtccatgggactcagtagcccgagtgctacctaacagttccctcttcctcccggccgtcggcattcaggacgagggaattttcaggtgtcaggctatgaatagaaatggcaaagaaactaagtcaaactatcgggtgagggtttaccagatccccgggaagcccgagattgtggattctgcatccgagctgacggcaggggtgcccaacaaagtgggcacatgtgtgtctgagggcagctaccctgctgggaccctgagctggcacctggacggaaaaccattggttcctaatgagaaaggtgtaagcgttaaggagcagacaaggcggcatcccgagaccggactgtttacccttcaaagcgaactgatggtgacccccgctcggggtggggacccccgtcccacctttagctgttccttcagccctggactaccacggcatcgcgcactccgcacagccccaattcaacctagggtgtgggaaccagtacctctggaagaggtgcagttagttgtggagcccgaagggggagcggtggcaccaggcggcaccgttacgctgacttgtgaagtgcccgcccagccctctcctcagatacattggatgaaggacgtgtcagacctggagcgaggagccggaaggaccagaagagggggcgccaactgcagattgtgcggtcgcatccgagcaggcaatagtagtccaggaccgggggaccccgggaggccaggggactcgaggcccgctcactggggccatttggtggcaaaggccgccactccacgtcggggcgaagagggaccaagaaaacccggaggtcgtggtggggcttgccggactgagtccgtgggcggaacatag

SEQ ID NO: 248578 - DNA, 1250 bp, Artificial Sequence
  derived and/or modified sequence
ctggaaggaagcaggatggcagccggaacagcagttggagcctgggtgctggtcctcagtctgtggggggcagtagtaggtgctcaaaacatcacagcccggattggcgagccactggtgctgaagtgtaagggggcccccaagaaaccaccccagcggctggaatggaaactgggaggaggcccctgggacagtgtggctcgtgtccttcccaacagctccctcttccttccggctgtcgggatccaggatgaggggattttccggtgccaggcaatgaacaggaatggaaaggagaccaagtccaactaccgagtccgtgtctaccagattcctgggaagccagaaattgtagattctgcctctgaactcacggctggtgttcccaataaggtggggacatgtgtgtcagagggaagctaccctgcagggactcttagctggcacttggatgggaagcccctggtgcctaatgagaagggagtatctgtgaaggaacagaccaggagacaccctgagacagggctcttcacactgcagtcggagctaatggtgaccccagcccggggaggagatccccgtcccaccttctcctgtagcttcagcccaggccttccccgacaccgggccttgcgcacagcccccatccagccccgtgtctgggagcctgtgcctctggaggaggtccaattggtggtggagccagaaggtggagcagtagctcctggtggaaccgtaaccctgacctgtgaagtccctgcccagccctctcctcaaatccactggatgaaggatgtgagtgacctggagagaggggctgggagaaccaggcgaggaggggccaactgcaggctctgtgggaggatcagggctgggaactctagccctggccctggggatcctgggaggcctggggacagccgccctgctcattggggtcatcttgtggcaaaggcggcaacgccgaggagaggagaggaaggccccagaaaaccaggaggaagaggaggagcgtgcagaactgaatcagtcggaggaacctgaggcaggcgagagtagtactggagggccttgaggggcccacagacagatcccatccatcagctcccttttctttttcccttgaactgttctggcctcagaccaactctctcctgtataatctctctcctgtataaccccaccttgccaagctttcttctacaaccagagccccccacaatgatgattaaacacctgacacatcttgc

SEQ ID NO: 248579 - DNA, 1029 bp, Artificial Sequence
  derived and/or modified sequence
atggcggctggcaccgccgtgggagcgtgggtcctggtactttccttgtggggggcagtggtcggcgcacagaatattacggcgaggattggcgaacccctcgtcttgaaatgcaaaggcgctcccaaaaaaccccctcagcggctggagtggaaactcggcggtggaccctgggacagcgtggcccgtgttctgcctaactcttccctgtttctgcctgccgtcgggattcaagacgaaggtatatttaggtgtcaagccatgaacagaaacggtaaagagaccaaaagcaattaccgagtccgagtgtaccagatacccggtaagccagaaatcgtcgacagcgcttcggagttgacggctggagtgccaaataaggtggggacctgcgtgagcgagggctcataccctgctggaactctgagctggcaccttgacggcaaacctctggttcccaatgagaaaggtgttagcgtcaaggagcagacaagaagacatcccgagaccggactgtttactttacagagcgaactcatggttacaccggcaagagggggtgatcccagacctacatttagttgctccttctcccccggattgccccgtcacagagccctccgtaccgccccaatccagccaagagtctgggaaccagtacctcttgaggaagtccagcttgtcgtggaacccgaggggggagccgtggcgcctggagggaccgtaactcttacctgcgaggtacccgctcagcccagcccacagatccattggatgaaagacgtctcggatctggagaggggcgcaggccgaacacgcaggggtggcgcaaattgccgtctctgtggccgtatcagggcaggaaactccagtcccggtcccggagatcctggtaggcccggtgatagtaggccagcacactggggacatttggtggcaaaggcggctactcctagacgaggggaagaaggccctagaaaacccggaggccgagggggtgcttgtaggacggaaagcgtgggtggtacctag

SEQ ID NO: 248580 - DNA, 1029 bp, Artificial Sequence
  derived and/or modified sequence
atggccgccggcaccgccgtgggcgcctgggtgctggtgctgagcctgtggggcgccgtggtgggcgcccagaacatcaccgccagaatcggcgagcccctggtgctgaagtgcaagggcgcccccaagaagcccccccagagactggagtggaagctgggcggcggcccctgggacagcgtggccagagtgctgcccaacagcagcctgttcctgcccgccgtgggcatccaggacgagggcatcttcagatgccaggccatgaacagaaacggcaaggagaccaagagcaactacagagtgagagtgtaccagatccccggcaagcccgagatcgtggacagcgccagcgagctgaccgccggcgtgcccaacaaggtgggcacctgcgtgagcgagggcagctaccccgccggcaccctgagctggcacctggacggcaagcccctggtgcccaacgagaagggcgtgagcgtgaaggagcagaccagaagacaccccgagaccggcctgttcaccctgcagagcgagctgatggtgacccccgccagaggcggcgaccccagacccaccttcagctgcagcttcagccccggcctgcccagacacagagccctgagaaccgcccccatccagcccagagtgtgggagcccgtgcccctggaggaggtgcagctggtggtggagcccgagggcggcgccgtggcccccggcggcaccgtgaccctgacctgcgaggtgcccgcccagcccagcccccagatccactggatgaaggacgtgagcgacctggagagaggcgccggcagaaccagaagaggcggcgccaactgcagactgtgcggcagaatcagagccggcaacagcagccccggccccggcgaccccggcagacccggcgacagcagacccgcccactggggccacctggtggccaaggccgccacccccagaagaggcgaggagggccccagaaagcccggcggcagaggcggcgcctgcagaaccgagagcgtgggcggcacctag

SEQ ID NO: 248581 - DNA, 1029 bp, Artificial Sequence
  derived and/or modified sequence
atggcagcgggtactgccgtgggcgcatgggtgcttgtcctttccttgtggggcgccgtggtgggggctcagaacataactgcaaggataggcgagccactggtgctgaaatgtaaaggcgccccgaagaagccaccccaacgattagagtggaagctgggagggggaccttgggatagcgtggcgagggtgttgccaaatgggtccctgtttctgccagctgttggcattcaggacgagggaatctttcgatgtcaagccatgaaccggaacggtaaagaaactaaatcaaactatcgcgtgcgagtttaccagatcccagggaagcccgaaatagttgacagcgctagcgagctgaccgccggagtgcctaataaggttgggacttgtgtgtctgagggcagttatccagccgggaccctgagctggcacttggacggcaagcctctggtaccaaatgagaaaggagtatccgtaaaggaacagacccgccgacaccctgagacaggtttgtttaccttacagtccgaactgatggtaaccccagctaggggcggagaccctagacccaccttcagttgctccttttcaccagggttgcctagacatagggctctccgaacagccccgatccagcctcgcgtctgggaaccagtgccccttgaggaggtacaattggttgtcgagcccgagggcggagcagtggccccagggggcaccgtgaccctgacttgtgaggtacccgctcagccctcaccccagatacactggatgaaggatgtttcggatttagaacgcggggctggccgcactagacgcgggggtgctaactgccggctctgcgggaggataagagcaggcaactcgagcccggggcctggagatcccggtagacccggcgatagccgacccgcccactgggggcacttggtagcaaaggccgcaactccaaggaggggcgaagagggcccccggaaacccggcggccgggggggcgcatgccgtactgaaagtgtggggggcacttag

SEQ ID NO: 248582 - DNA, 1029 bp, Artificial Sequence
  derived and/or modified sequence
atggctgcagggaccgccgttggagcctgggtgcttgtcttgtcactctggggagcagtcgtgggggcacagaatatcaccgcccgaatcggggaaccactcgtcctgaaatgtaagggggcacccaaaaaacccccacaacgactcgaatggaaactgggtggcggaccatgggactcagtggccagagtcctgcctaatggatcactcttcctgccagccgtcggcatccaggatgaaggcatcttccgatgccaagccatgaacaggaacggaaaggagaccaagtccaactatcgcgttcgcgtctaccagattcccgggaaaccagaaatcgtagactcagcttccgagcttacagcaggagtccccaacaaagttgggacgtgcgttagtgaaggctcttacccagcagggaccctgagttggcatctggacggcaagccactggtaccgaacgaaaaaggggtgtctgtgaaggagcagactcggcgccacccggagaccgggctctttactcttcagtccgagctcatggtgacgcctgccagaggaggcgatccacggcctaccttcagctgcagtttttcccctggactccctcgacatcgtgcactgcggacagcgcccattcaaccacgagtatgggagccggttcctctggaagaagttcaactcgtcgtagagcccgagggaggagctgttgcccctggcggcactgtgacactaacgtgtgaagtgcccgcacagccaagtccacagattcattggatgaaggatgtcagcgatctggaacgaggcgctggccgcaccaggcggggcggcgccaactgcagattgtgcggacgaatacgggccggcaacagcagtcctggacctggcgatcccgggaggcctggtgattcccgcccggcgcattggggtcacctggttgcaaaggcggccacccctagacgcggcgaggaggggcctaggaagcccggtggtcgcggcggtgcatgtaggacagagtccgtgggtggcacctag

SEQ ID NO: 248583 - DNA, 1029 bp, Artificial Sequence
  derived and/or modified sequence
atggccgctgggactgccgtgggggcctgggtgttggtactgagcctctggggtgccgtggttggagcccagaacataacagcgaggataggtgaaccattggtactaaaatgcaaaggagcccccaaaaaaccacctcaacggctggaatggaagcttggtgggggaccctgggattccgtagccagagttctgccgaatgggtccctgttcttacccgccgtcggtattcaggacgagggtatattccgctgtcaggcaatgaatcgcaatgggaaagagacaaaatccaattaccgagtgcgggtgtatcaaatcccaggcaaaccggagattgtcgactccgccagcgagcttacagccggcgtgcctaacaaggtgggaacatgtgtttcagagggctcttatcccgccgggactctgtcctggcacctggacggaaagccccttgttcccaatgaaaagggagtgagcgtcaaagagcaaacccgtcggcacccagagaccggcttatttacacttcagagcgaactaatggttactcctgctcggggtggggaccctcgccccaccttcagttgtagctttagtccaggattgccgcgacaccgagctctgcggactgcccctattcagccgcgggtctgggaaccagtgcccctcgaagaggtccagcttgttgtagagcccgagggcggggccgtcgctccgggcggaacggttacgctaacatgcgaagtgcccgctcagccctctccacagatccactggatgaaggatgtgtctgacctcgagcgcggtgctggcagaacaaggcgaggcggcgcaaattgccggctttgtgggaggatcagggccggtaattccagtcctggaccaggcgatcctggtcgacccggagactcaagaccagcccactggggccatttagtggccaaagccgccacacctcgtcgtggcgaagagggtcccagaaagcccgggggaagggggggagcatgtcgcacagaaagcgtgggaggcacatag

SEQ ID NO: 248584 - DNA, 1029 bp, Artificial Sequence
  derived and/or modified sequence
atggccgccgggaccgcagtgggcgcatgggttctagtactgagcctgtggggagccgtagttggcgcacaaaacattacagcacgcatcggtgagccgttagttctcaagtgtaaaggcgccccaaagaaaccacctcagaggttagagtggaagctgggtggcgggccttgggactcagtggctagagtcttgcctaacggtagcctgtttctgcccgccgtaggcattcaggatgagggcattttccgttgccaggctatgaaccgtaatggaaaggagaccaaaagcaactatagggtgagggtctaccaaattcctggaaagccagaaattgtcgatagcgcatctgaactgaccgccggggtgcctaacaaggtcggcacgtgcgtttcggaaggtagttaccccgcaggcaccctctcttggcatctagatggcaagccactggtgccaaacgagaagggggtatcggtcaaagaacaaacaagacgccatcctgaaacagggctcttcacgctgcagagcgagctcatggtgacccccgccagaggtggagatcctcgccctaccttcagttgttctttttctcctggccttccaagacaccgtgctctcaggaccgccccaattcagccgcgcgtttgggagccagtgccgctggaggaggtccagctcgtggtggagcccgaggggggcgctgtggcccccgggggaacagtcactctgacttgcgaagttccagctcagccaagccctcagatccattggatgaaagacgtgagcgatctagaaagaggcgccggacggacacgtcgcgggggggctaattgtagactctgcggtcgcatcagggctggcaattccagtcccgggcctggagaccctggaagaccaggtgacagccgccctgcacattgggggcacctcgtcgccaaggcagctactcctcgaaggggggaagagggcccccgtaaacctggcggccgaggcggggcatgccgcacagagtccgtcggtggcacttag

SEQ ID NO: 248585 - DNA, 1029 bp, Artificial Sequence
  derived and/or modified sequence
atggctgcaggcacagctgtaggagcatgggtgttggtcttgtccctgtggggagcagtcgtgggtgcccaaaatatcaccgctagaatcggcgagcctctggttctaaagtgcaagggagcgcctaagaagccgcctcagcgtttggagtggaaactgggaggtggcccctgggactccgtcgcacgggtgttacctaacggaagcctctttctcccggccgtcggcatccaggacgaagggattttcagatgccaggcgatgaaccgtaatgggaaggaaacaaaatctaactacagggttagggtctaccagatacccggcaagcctgaaattgttgattccgcatccgagctgaccgccggcgtgccaaacaaagtggggacgtgtgtctcagagggaagctatcctgctgggaccctgtcctggcatctggacggaaagcccctcgtccccaacgagaagggtgtgtctgtaaaggaacagacccggcggcacccagagaccggcctttttacactccaatccgaattgatggtcactccagcaagaggtggcgacccaaggcccactttcagctgttctttctccccaggcctgcctaggcatcgcgcactgcgcacagcacccatccaacctagagtttgggaacccgtgcctttagaagaagttcaactggtggtagaacctgagggcggtgctgttgcccccggcggcaccgttacattgacatgcgaggtgccagcccagccgtctccccagatccattggatgaaagacgtgtccgatttggaacggggggcgggcagaactaggcgcggtggagcaaattgccgcctctgcggccgtatccgtgccggaaactcctctcctggccctggagatcccggacggcctggggattccaggcctgctcattggggtcatttggtggctaaggctgccaccccgcggcgcggagaagagggcccccgcaaacccggcggccgcgggggcgcctgtcgaacagaaagcgtcggtggaacctag

SEQ ID NO: 248586 - DNA, 1029 bp, Artificial Sequence
  derived and/or modified sequence
atggccgctggaacagccgttggagcttgggtcctggttctgtccctttggggagccgtggttggagctcagaacattacagcaagaataggagaaccactggtgctgaaatgcaagggagcccccaagaagcctccacagcggcttgagtggaaacttggcggcggtccctgggatagtgttgctagggttctcccaaatagcagcctgtttcttcccgctgtggggatacaggatgaggggatctttcgttgccaagccatgaataggaatggcaaggaaacaaagtcaaactaccgggttcgggtgtatcagatccccggcaagccagaaatcgtggattccgcatcagaactcacagcgggagtccccaataaggtaggaacttgtgtttcggaaggttcatatccagccggtacattaagttggcacctagatgggaagccattagtgcctaatgagaagggtgtgagcgtcaaggaacagacgaggcggcaccctgaaactggactattcaccctacagtcagaactgatggtgacaccggccaggggtggagaccccaggcctacattttcttgctctttttcgcccgggctccctagacatagggcattgcgcactgctccaatccagcctcgagtttgggagccggtcccacttgaggaagtgcagctagtggtagagcccgaggggggagctgttgcgccgggcggtacggtgactctcacgtgtgaggttcctgctcagcctagcccacagatccattggatgaaggacgtctcggacttggagcgaggcgcaggtagaacgcgccggggcggagccaactgtcgcttgtgtggacggattagggccggaaattcatctcccggacccggcgaccccggtcgccctggggatagccgtcccgcgcattggggacatctagtggcaaaggctgcgactccccgccggggagaagaaggacctcggaaacccggaggcagaggaggagcatgcaggacagaatccgtgggcggcacctag

SEQ ID NO: 248587 - DNA, 1250 bp, Artificial Sequence
  derived and/or modified sequence
ctggaaggaagcaggatggctgccggaacagcagttggagcctgggtgctggtcctcagtctgtggggggcagtagtaggtgctcaaaacatcacagcccggattggcgagccactggtgctgaagtgtaagggggcccccaagaaaccaccccagcggctggaatggaaactgggaggaggcccctgggacagtgtggctcgtgtccttcccaacggctccctcttccttccggctgtcgggatccaggatgaggggattttccggtgccaggcaatgaacaggaatggaaaggagaccaagtccaactaccgagtccgtgtctaccagattcctgggaagccagaaattgtagattctgcctctgaactcacggctggtgttcccaataaggtggggacatgtgtgtcagagggaagctaccctgcagggactcttagctggcacttggatgggaagcccctggtgcctaatgagaagggagtatctgtgaaggaacagaccaggagacaccctgagacagggctcttcacactgcagtcggagctaatggtgaccccagcccggggaggagatccccgtcccaccttctcctgtagcttcagcccaggccttccccgacaccgggccttgcgcacagcccccatccagccccgtgtctgggagcctgtgcctctggaggaggtccaattggtggtggagccagaaggtggagcagtagctcctggtggaaccgtaaccctgacctgtgaagtccctgcccagccctctcctcaaatccactggatgaaggatgtgagtgacctggagagaggggctgggagaaccaggcgaggaggggccaactgcaggctctgtgggaggatcagggctgggaactctagccctggccctggggatcctgggaggcctggggacagccgccctgctcattggggtcatcttgtggcaaaggcggcaacgccgaggagaggagaggaaggccccagaaaaccaggaggaagaggaggagcgtgcagaactgaatcagtcggaggaacctgaggcaggcgagagtagtactggagggccttgaggggcccacagacagatcccatccatcagctcccttttctttttcccttgaactgttctggcctcagaccaactctctcctgtataatctctctcctgtataaccccaccttgccaagctttcttctacaaccagagccccccacaatgatgattaaacacctgacacatcttgc

SEQ ID NO: 248588 - DNA, 1250 bp, Artificial Sequence
  derived and/or modified sequence
ctggaaggaagcaggatggcagccggaacagcagttggagcctgggtgctggtcctcagtctgtggggggcagtagtaggtgctcaaaacatcacagcccggattggcgagccactggtgctgaagtgtaagggggcccccaagaaaccaccccagcggctggaatggaaactgggaggaggcccctgggacagtgtggctcgtgtccttcccaacggctccctcttccttccggctgtcgggatccaggatgaggggattttccggtgccaggcaatgaacaggaatggaaaggagaccaagtccaactaccgagtccgtgtctaccagattcctgggaagccagaaattgtagattctgcctctgaactcacggctggtgttcccaataaggtggggacatgtgtgtcagagggaagctaccctgcagggactcttagctggcacttggatgggaagcccctggtgcctaatgagaagggagtatctgtgaaggaacagaccaggagacaccctgagacagggctcttcacactgcagtcggagctaatggtgaccccagcccggggaggagatccccgtcccaccttctcctgtagcttcagcccaggccttccccgacaccgggccttgcgcacagcccccatccagccccgtgtctgggagcctgtgcctctggaggaggtccaattggtggtggagccagaaggtggagcagtagctcctggtggaaccgtaaccctgacctgtgaagtccctgcccagccctctcctcaaatccactggatgaaggatgtgagtgacctggagagaggggctgggagaaccaggcgaggaggggccaactgcaggctctgtgggaggatcagggctgggaactctagccctggccctggggatcctgggaggcctggggacagccgccctgctcattggggtcatcttgtggcaaaggcggcaacgccgaggagaggagaggaaggccccagaaaaccaggaggaagaggaggagcgtgcagaactgaatcagtcggaggaacctgaggcaggcgagagtagtactggagggccttgaggggcccacagacagatcccatccatcagctcccttttctttttcccttgaactgttctggcctcagaccaactctctcctgtataatctctctcctgtataaccccaccttgccaagctttcttctacaaccagagccccccacaatgatgattaaacacctgacacatcttgc

SEQ ID NO: 248589 - DNA, 1029 bp, Artificial Sequence
  derived and/or modified sequence
atggctgctggaacagctgtgggcgcctgggtgctggtgctgagcctgtggggcgctgtggtgggcgcccagaacatcacagcccgcatcggggagcccctggtgctgaagtgcaagggggcccccaagaagccaccccagaggctggagtggaagctgggcggcggcccctgggacagcgtggcccgggtgctgcccaacggcagcctcttcctgcctgctgtgggcatccaggatgagggcatcttccgctgccaggccatgaacagaaatggcaaggagaccaagagcaactacagagtgcgggtgtaccagatccctgggaagccagagatcgtggacagcgccagcgagctgacagctggggtgcccaacaaggtgggcacctgtgtgtctgagggcagctacccagctggcaccctgtcctggcacctggatggcaagcccctggtgcccaatgaaaaaggagtgtctgtgaaggagcagacccggcggcaccctgagaccggcctcttcaccctgcagagcgagctgatggtgaccccagcccggggcggggacccccggcccaccttcagctgcagcttcagccctggcctgcccaggcaccgggccctgaggacagcccccatccagccccgggtgtgggagcctgtgcccctggaggaggtgcagctggtggtggagcctgagggcggcgctgtggcccctgggggcaccgtgaccctgacctgtgaggtgcctgcccagcccagcccccagatccactggatgaaggatgtgtctgacctggagcggggggccggccgcacccggcggggcggggccaactgccgcctgtgtggccgcatccgggccggcaacagcagccctggccctggggaccccggccggcctggggacagcaggcctgcccactggggccacctggtggccaaggccgccaccccccggcggggggaggagggccccaggaagccaggcggccggggcggggcctgcaggacagagagcgtgggcggcacctag

SEQ ID NO: 248590 - DNA, 1029 bp, Artificial Sequence
  derived and/or modified sequence
atggccgccggcaccgccgtgggcgcctgggtgctggtgctgagcctctggggcgcggtggtgggagcacagaacatcactgccagaattggtgaacccttggtgcttaagtgtaaaggcgcccccaaaaagcctcctcaacgcctcgagtggaagctgggagggggcccatgggactctgtggctcgggtattgcctaatggaagcctgttcctgcctgctgtgggcatccaggatgaaggaatctttagatgtcaggccatgaacagaaatggtaaggaaaccaagtctaactatcgggtgcgggtgtatcagattcctggcaaacctgagatcgtggattctgcctctgagctgacagccggagtccctaacaaagtcgggacctgcgtcagcgagggcagctatcccgccggcactctcagctggcatctcgacggcaaacctctggtgccaaacgagaaaggggtgagcgtgaaggagcagactcgccggcaccccgaaaccggcctgtttactctgcagtctgagttgatggtgacgcccgcacgcggcggtgatcctagaccaacattttcatgttctttctcccccggtctgccccgacaccgcgcactgagaaccgcccctatccagccccgagtgtgggagccagtgccactggaagaggttcagctcgtggtggaacctgagggaggcgcagtagcccctggaggcaccgtaacattgacttgtgaggttccagcccagccttcaccacaaattcattggatgaaagacgtcagcgatctcgaacgcggagccggaagaaccagacgaggtggagcaaattgtcgtctgtgtggacggattcgtgcaggtaactccagtcccggacccggcgatcccgggagacccggggatagcagacctgcacattggggccatttggtagcaaaagctgctacgccacgaagaggagaagagggtcccaggaagccaggcggccgaggtggggcatgcaggacagagtcagtcggagggacctag

SEQ ID NO: 248591 - DNA, 1029 bp, Artificial Sequence
  derived and/or modified sequence
atggccgccggcaccgccgtgggcgcctgggtgctggtgctgagcttgtggggtgcagttgtgggcgcccagaacattactgccaggatcggcgaaccactggttctgaagtgcaaaggagctccaaagaagcctccccagagactcgagtggaagctgggggggggtccctgggatagcgttgcacgggtgttgccaaacggcagcctcttccttcccgctgtgggcatccaggatgagggtatattcaggtgtcaggccatgaacagaaatggcaaggaaaccaaaagcaattatcgagtgagggtttaccagatacccggaaagcccgagattgttgactctgccagtgaacttactgctggcgtccctaataaagtgggcacctgcgtcagcgagggaagctacccagcggggacactgtcatggcacctggatggtaagcccctggtccccaacgagaagggagtgtctgttaaagagcagaccagacggcatcctgaaaccggattgtttaccctgcagagtgaactgatggtgacaccagctaggggtggtgacccacgccctactttctcctgttctttctcacctggcctgccacgtcacagagccctgaggactgctcccatccagccgagagtatgggaacctgtgcccctcgaagaggtacagctggtggtcgagcccgaagggggcgcagtggcgcctggaggaacggtaactctcacctgcgaggtcccggcccagcccagtcctcaaattcactggatgaaggatgtgtctgacctagagcggggggcagggcgaactagacgggggggagctaactgtcgcctctgtggtcgtatccgagccggcaactcttccccaggtcctggggaccccggccgccctggagattcacgtcccgcgcactggggccatctggtggccaaggccgcaactccaaggaggggtgaagaaggaccccgcaaacccgggggcaggggtggagcttgtcggacggagtcagtgggagggacctag

SEQ ID NO: 248592 - DNA, 1029 bp, Artificial Sequence
  derived and/or modified sequence
atggccgccggcaccgccgtgggcgcctgggtgctggtgctgagcctgtggggggccgtcgtgggggcacagaacattacagcaaggattggcgaacccctggtgctgaagtgcaaaggcgctcccaagaagcctccacagaggctggaatggaagctgggaggcgggccctgggacagcgtcgctcgggttttacctaatgggagtctattcctacctgcagtggggattcaggacgagggaatctttcgctgtcaggccatgaataggaacggaaaggagaccaagagtaattaccgagtccgcgtctatcaaattcctggaaaaccagagatcgtcgatagcgcaagcgagctcacagcaggagtgcctaacaaggtgggcacctgtgtcagcgaaggcagttacccggccggcaccctgagttggcatctcgatgggaagccactagtgccaaacgaaaagggggtctctgtcaaggaacagactcgtaggcatcctgagacgggtctctttacactgcaatccgagcttatggtgacgccggcacgtggtggagatccccggcctaccttttcctgttctttcagtccaggcctgcctcgccaccgggcactacgcacagccccaattcaaccccgagtgtgggaacccgtgccccttgaagaggtccagctggtcgtggagccagaaggcggagcagtcgccccggggggcacagtgacattgacctgcgaagtgcccgcacaaccgtctcctcagatccactggatgaaggacgtcagcgacctggaacgtggagctggccggaccagacgtggaggagcaaattgtaggctctgcggcagaatccgcgcgggcaacagctcacccgggccgggcgatcctggcaggcctggtgacagtcgccccgctcactgggggcacctcgttgcgaaggctgccacaccgcggcgcggagaggagggcccgcgcaagccggggggtcgcggcggggcttgtaggactgagtcagtaggcgggacgtag

SEQ ID NO: 248593 - DNA, 1029 bp, Artificial Sequence
  derived and/or modified sequence
atggccgccggcaccgccgtgggcgcctgggtgctggtgctgagcctgtggggtgcagtggtcggcgctcaaaacataaccgcccgtatcggagagcccctcgtgctgaagtgtaagggtgccccgaaaaaaccaccacagagactggagtggaaactgggcggcggcccgtgggattccgtggcacgcgtgctgcctaatggctccttgttcctgcccgccgtcggtatccaggacgagggaatcttccggtgtcaggcaatgaatcggaatggaaaggaaacaaaatccaactaccgggtgcgggtataccaaattcctggcaaacccgagattgtcgatagtgcttccgaactgactgcaggcgtgcccaacaaggtcgggacatgcgttagcgaaggctcgtaccccgctggaacactcagctggcatctcgatggcaaacccctggtaccgaacgaaaaaggcgtgtccgttaaggaacaaacccgacggcacccagagactggcctctttacactccagtctgaattaatggtgactccggcccgaggtggcgaccccagaccgaccttctcctgtagcttctccccaggactgcccagacaccgagccctgcgaaccgctcctatacaacctagagtatgggaacccgtaccccttgaggaggtgcagttagttgtcgagccagaggggggcgcggtagctcccggcgggactgtgacactgacttgtgaggtcccagcccagcccagtccccagattcactggatgaaagatgtctctgatttggaacgtggcgctggccggactcgtagaggaggcgcgaactgtcgtttgtgtgggagaattagggcagggaactcaagcccgggacctggcgacccaggacgccctggcgattccaggcccgcccactggggccatcttgtggctaaagccgccacccctagacggggtgaggagggacccaggaagcccggaggccgcgggggtgcttgtaggactgagtctgtgggagggacctag

SEQ ID NO: 248594 - DNA, 1029 bp, Artificial Sequence
  derived and/or modified sequence
atggccgccggcaccgccgtgggcgcctgggtgctggtgctgagcctatggggtgcggttgtcggcgctcagaatataactgctaggattggggaaccattggtgttaaagtgtaaaggagctccaaagaaacctcctcagaggctcgagtggaagttaggcggcgggccatgggatagcgtcgcacgggttctccccaatggttctctgtttttgccagccgttgggattcaggatgaagggatcttccggtgccaagcaatgaatcggaacggaaaggagacaaaaagcaactatcgggttagggtgtaccagatccctgggaagcccgagatcgtggacagtgccagtgagctgactgcaggcgtacccaacaaagtaggaacttgcgtgtctgagggctcctaccctgccggcacattatcttggcacctcgacggcaagcctcttgtgccaaatgagaagggggtttcagtcaaagaacagacacggagacatccagagacggggctgttcacccttcagtctgaacttatggtgacacccgcaagagggggcgatcccagacccactttctcttgttcattttcgcccggattaccacgccaccgggcactgagaacggcccctatacagccaagagtgtgggaacctgttccattggaggaggtgcagctggtggtggagcctgaaggcggcgctgtagcacctggcggtactgtgaccctcacctgtgaagtgcctgcccagccctcccctcaaattcactggatgaaggatgtgtcagatctagaaaggggggccggacggactagacgggggggcgccaattgccgcttgtgcggccgaatcagggctggcaacagtagtccagggcctggagaccctggaagacccggggattcaagaccagcgcactggggtcatctggtggctaaggctgcgacaccaagaaggggcgaggagggcccaagaaaaccgggcggccgggggggcgcttgccgcacagaatccgtcggaggcacatag

SEQ ID NO: 248595 - DNA, 1029 bp, Artificial Sequence
  derived and/or modified sequence
atggccgccggcaccgccgtgggcgcctgggtgctggtgctgagcctgtggggagcagtggtgggggcacagaatataacagcccgcataggcgagcctttggtcttaaagtgcaaaggtgcaccaaagaagccaccacagaggcttgagtggaagcttggcggtggtccctgggactccgttgccagagtccttccaaactcgtcgttgtttctccctgccgtgggcattcaagatgagggaatctttcgctgccaggccatgaatcggaatggcaaggaaaccaagtccaactatcgtgtaagggtgtaccaaatccccggaaaacctgagattgtcgactccgcatctgagctgactgccggcgtgcctaacaaggtggggacatgtgtatcagagggatcttatccggccgggaccctctcttggcacctcgatggcaagcccctcgtgccaaatgagaaaggagtctccgtgaaagagcagaccaggagacatccggagacgggcttgttcaccctccagagcgaattaatggttacacccgcccgcggcggagacccccggccaaccttctcctgttcgttctccccgggcctgccgcgacatcgagctctgcggacagctccaattcagccaagagtatgggaacctgtcccattggaggaggtacagcttgtagtcgagcctgagggaggagcagtagccccagggggaaccgtgaccctcacctgtgaggtccctgcacaaccttcgccacagattcactggatgaaggacgtcagcgacctcgagagaggcgcaggtcgcactcgccggggcggagccaattgccggctctgtggcaggatccgtgcgggcaacagcagtcctggacccggtgatcctggaagacctggggatagcaggccagcccattggggtcatctcgttgcgaaagctgcgactccgcggcgcggcgaggagggcccaagaaagccggggggacgcggtggcgcatgtcgtaccgagtcagttggcgggacatag

SEQ ID NO: 248596 - DNA, 1029 bp, Artificial Sequence
  derived and/or modified sequence
atggcagccggaacagctgtcggcgcatgggtcctggtactgagtctgtggggagccgtagtcggcgctcagaacattacagccagaatcggggaaccgcttgtgcttaagtgcaagggtgctcccaaaaagcctcctcagaggctagagtggaaacttggcggaggaccatgggatagcgtggctcgtgttctccccaatggatctctctttcttcccgcagtgggaatccaggacgaaggcatcttccggtgccaggcaatgaacagaaacggcaaagaaaccaaaagcaattatagggtgagggtataccagattcccggtaagccggagattgtagatagcgcatcagaacttaccgcaggtgtgccaaacaaagtggggacatgcgtgtcagaaggtagctatcctgctggaaccctgagctggcacctcgacgggaagccactggtgccgaatgaaaagggcgtatctgtgaaagagcagacccgcagacacccggagaccgggctattcacactccaatctgaattgatggtgactccagctcgagggggtgacccacggccaacgttcagctgttctttcagcccaggactgcctaggcacagggcactgcgcacggccccaatccagcccagggtttgggaaccagttcctctggaagaggttcagttggtggtggagccagaaggaggagcagtagccccagggggtacagttaccttaacctgtgaagtgcctgctcagccctcacctcagatccattggatgaaggatgttagcgacctggagagaggagccggtcgtacccgcaggggaggcgcaaattgcaggctgtgtgggcgtatcagagccggaaatagtagccccggtccaggagacccaggccgacctggagattcacgccctgctcattggggccatctcgttgcaaaggccgctacgccacgccgtggagaggaggggcctaggaaaccagggggacggggaggagcctgtcggacagagtccgtggggggaacctag

SEQ ID NO: 248597 - DNA, 1029 bp, Artificial Sequence
  derived and/or modified sequence
atggcagccggaacagcagtgggggcatgggtgctggtactgtctttatggggggcagtcgtgggggctcagaacatcaccgcacgcatcggagaacctctggtactgaaatgcaaaggtgctcctaagaaacccccacagcgactcgaatggaagcttggtggcggaccgtgggattccgtggccagagtgctaccaaatggcagcctgttcctgcccgcagtgggcatccaggacgaggggatcttcaggtgtcaagcgatgaatcggaacggcaaagaaaccaaaagtaattatagagtgcgtgtttaccagatccccggaaagcctgagattgtcgatagcgcaagcgagctgactgctggcgtcccaaacaaagtgggtacctgcgtctcagaaggttcttaccctgcaggcaccctcagctggcacctcgacgggaagccgctcgtgccgaacgaaaaaggcgtgagcgttaaagaacagaccaggcgccaccctgagactggcctatttactctgcagtctgagctcatggtcacgcccgctcggggaggagatcccaggccaacattcagttgcagtttttcccccggacttccgaggcatcgggctctccgaacggcacccatccagccacgagtatgggagccggtgcctctggaagaagtgcaactggtagtggagcctgaggggggagcagtcgccccaggtggaacagtgactctgacttgcgaggtaccagcccagccatctccacagatccattggatgaaggacgtgtccgacctggaaagaggagctggccgaactcggaggggcggagccaattgccgcctgtgtgggcgtatcagagcgggaaactccagcccaggccctggcgatcctggcagaccaggagactcacgaccagctcattgggggcacctggtggctaaggctgcaacaccacgacgaggcgaggaggggcctagaaaacccggaggaagaggaggcgcttgcagaactgagtctgttgggggaacatag

SEQ ID NO: 248598 - DNA, 1029 bp, Artificial Sequence
  derived and/or modified sequence
atggccgcagggacggccgttggggcttgggtgttagtactcagcctgtggggagctgtcgtgggcgcacagaatataacagcccgaatcggcgaaccacttgtgctgaagtgtaagggtgcacccaagaagccccctcaacgactcgagtggaaactgggcggaggaccctgggattccgtagcgagagtgctgccaaacggatccttgtttttgccagccgtgggaattcaggacgaaggaattttcaggtgccaggccatgaaccggaatgggaaagaaacaaagtcaaactacagggtgagagtataccagatccctggcaaacctgagatcgtcgactccgctagcgaactgaccgcaggagtccctaataaagtgggaacgtgtgtaagcgaaggatcctacccagccggtacactgtcttggcatttggacggtaaaccgctcgtgcccaacgaaaaaggagtgtccgttaaagagcagactaggaggcaccctgagaccggactgttcacgctgcagtctgagttgatggtcaccccggcacggggaggcgatccgcgacctaccttcagctgcagcttttcacctggcctgccaagacatagagccctccgtaccgcccctattcagcctcgggtctgggaaccagttccgctggaagaagtgcaattggtagttgaacctgaggggggagccgtggcgcctggcggaactgtcacactgacttgcgaagttccagcacagccctctccccagatccactggatgaaggacgtaagcgacctggagcgaggcgcaggtcgaactagacgaggaggcgctaactgccggctctgcggacgcatccgggcagggaatagttccccaggccctggagatccaggacgtccgggagatagcaggcctgcacactgggggcacttggtggcaaaagcagcaacaccaagacggggtgaagaagggcctcggaagcctggaggtaggggaggcgcatgtagaaccgaaagtgtgggagggacatag

SEQ ID NO: 248599 - DNA, 1029 bp, Artificial Sequence
  derived and/or modified sequence
atggctgctggcaccgccgtgggcgcatgggtcctggtcctgtccctgtggggcgctgtggtcggcgctcagaatatcactgcccgaataggggaaccattggtgcttaagtgcaaaggggctccgaagaagccccctcagaggctagaatggaagttgggaggcggaccttgggattcagttgcccgagtgctgccgaatggatctttgtttctgcccgcagtgggaattcaggacgagggcatctttcgctgtcaggcgatgaatcgaaacggcaaggagactaaaagtaattaccgcgtgagagtctaccagattcctggcaaaccggagatcgtggactccgcatcggagcttactgcaggcgtgccaaataaagttggcacttgtgtctccgagggatcctacccagcaggcactttgtcctggcacctggacggaaaacccttagtgcccaatgaaaagggggtttcggttaaggaacagacgcggcgacaccctgaaaccggactgttcactctccagagcgagcttatggttacacccgctagaggcggagatcccagaccgacttttagctgttcttttagccccggactgcctcggcatcgggctctacgaacagcaccgattcaacccagggtgtgggagcccgtacctctcgaagaagtgcaactcgtcgtggaaccggaggggggtgccgttgccccaggtgggacggtcaccctcacctgcgaggtccccgctcaaccctcaccacagatccactggatgaaggatgtttctgatttggagaggggtgcagggagaacaaggagaggcggtgccaactgcagattgtgcgggaggatacgggctggaaattcgtctccaggaccaggtgatcctggaaggccaggcgactccaggcccgcacactggggccatttggtcgccaaggcagcgaccccacggagaggcgaggaagggccacggaaaccaggcggacgcggaggtgcatgccgcaccgagtccgtcggagggacatag

SEQ ID NO: 248600 - DNA, 1029 bp, Artificial Sequence
  derived and/or modified sequence
atggctgcgggaacagccgtgggcgcatgggtactcgtgctcagcctgtggggcgcagttgtgggcgcacagaatatcaccgcgaggatcggcgaaccacttgtcctcaagtgcaagggcgctccaaaaaagccccctcagcgtctcgaatggaaactgggaggaggcccttgggacagtgttgctcgagtactgcccaacggaagtttatttttgccagccgtcgggattcaggatgagggtatcttccggtgccaagcgatgaaccggaacggcaaggaaactaaatcaaactatagggtgagagtgtatcagatccctggcaagccagaaattgtggactctgcttccgaattaacagctggtgtgccaaacaaagtggggacgtgtgtttcagagggctcataccccgctggtacattgagttggcatttggacggcaagccgctggtgccgaacgagaaaggcgtaagcgtcaaggaacaaaccagacggcatccggaaacagggcttttcaccttgcaatcagagcttatggtcaccccagccaggggtggagaccccagacctacctttagttgctcattctcccctggattgcccaggcatcgagccctgaggaccgccccaattcagccaagggtgtgggagccagtgcctctggaggaagtgcagcttgtcgttgagccagaaggaggcgctgtggccccaggcggtacagtgaccctcacatgcgaagtcccagcccagccttccccccagattcattggatgaaggacgtctctgaccttgaacgcggagccggaagaacacggagaggcggtgctaactgcagactttgcggaaggattcgagcaggcaacagctcacctggtccaggagatcccggtcgcccaggtgactcccgtcccgcacactggggccacctcgttgcaaaggctgctacccctcggaggggcgaggagggcccacgaaagccagggggacgcggaggggcatgtcggaccgaaagtgtgggaggcacttag

SEQ ID NO: 248601 - DNA, 1029 bp, Artificial Sequence
  derived and/or modified sequence
atggcggctgggacagcagtcggggcatgggtgttagtactgtcactatggggggctgttgtgggcgctcagaacataacggcacgcattggggaacccttggtgttgaagtgtaagggtgcgcctaaaaaacctccccagagactcgaatggaagctcggaggcggtccgtgggattctgtcgcccgagtgttgcccaacagctcacttttcctgcccgcagtgggaatccaagacgaaggcatattcagatgccaggccatgaatcgtaacggaaaagagaccaaaagtaactatcgggttcgggtgtatcagattcccggtaagcccgagatagtcgatagcgcttctgagctgacagcgggtgtaccaaataaagtggggacttgtgtgtctgaaggttcatacccagccggaactctgagctggcaccttgacggaaaacccctcgtgccaaatgaaaagggggtaagcgtaaaagaacagactaggagacatcctgagaccggtctttttactctacagtccgagcttatggtcaccccagccagggggggagacccacggccaaccttctcctgctcctttagtcccggactacctagacacagggctcttcggacagcacccatccagccacgagtttgggagcccgtccctctggaggaagttcagcttgtggtagagcccgaggggggagcagtagctcccggaggcaccgtgacactgacttgcgaagtccccgctcagccgtcaccccaaatacactggatgaaagatgtctccgacctggaacgtggcgctgggagaacccgcaggggcggagccaattgccgtctgtgcgggcgtattcgagccggaaattctagcccagggcctggggatccaggaaggccaggcgactcccgccctgcccactgggggcacctagtagccaaagctgctacaccaaggcgaggtgaagaggggcctcggaagcctgggggacgcggtggcgcttgccggaccgaatcagtgggaggcacatag

SEQ ID NO: 248602 - DNA, 1029 bp, Artificial Sequence
  derived and/or modified sequence
atggccgccggcaccgccgtgggcgcctgggtgctggtgctgagcctgtggggcgccgtggtgggcgcccagaacatcaccgccagaatcggcgagcccctggtgctgaagtgcaagggcgcccccaagaagcccccccagagactggagtggaagctgggcggcggcccctgggacagcgtggccagagtgctgcccaacggcagcctgttcctgcccgccgtgggcatccaggacgagggcatcttcagatgccaggccatgaacagaaacggcaaggagaccaagagcaactacagagtgagagtgtaccagatccccggcaagcccgagatcgtggacagcgccagcgagctgaccgccggcgtgcccaacaaggtgggcacctgcgtgagcgagggcagctaccccgccggcaccctgagctggcacctggacggcaagcccctggtgcccaacgagaagggcgtgagcgtgaaggagcagaccagaagacaccccgagaccggcctgttcaccctgcagagcgagctgatggtgacccccgccagaggcggcgaccccagacccaccttcagctgcagcttcagccccggcctgcccagacacagagccctgagaaccgcccccatccagcccagagtgtgggagcccgtgcccctggaggaggtgcagctggtggtggagcccgagggcggcgccgtggcccccggcggcaccgtgaccctgacctgcgaggtgcccgcccagcccagcccccagatccactggatgaaggacgtgagcgacctggagagaggcgccggcagaaccagaagaggcggcgccaactgcagactgtgcggcagaatcagagccggcaacagcagccccggccccggcgaccccggcagacccggcgacagcagacccgcccactggggccacctggtggccaaggccgccacccccagaagaggcgaggagggccccagaaagcccggcggcagaggcggcgcctgcagaaccgagagcgtgggcggcacctag

SEQ ID NO: 248603 - protein, 234 aa, Artificial Sequence
  derived and/or modified sequence
MAPRRARGCRTLGLPALLLLLLLRPPATRGITCPPPMSVEHADIWVKSYSLYSRERYICNSGFKRKAGTSSLTECVLNKATNVAHWTTPSLKCIKPAASSPSSNNTAATTAAIVPGSQLMPSKSPSTGTTEISSHESSHGTPSQTTAKNWELTASASHQPPGVYPQGHSDTTVAISTSTVLLCGLSAVSLLACYLKSRQTPPLASVEMEAMEALPVTWGTSSRDEDLENCSHHL

SEQ ID NO: 248604 - protein, 219 aa, Artificial Sequence
  derived and/or modified sequence
MAPRRARGCRTLGLPALLLLLLLRPPATRGITCPPPMSVEHADIWVKSYSLYSRERYICNSGFKRKAGTSSLTECVLNKATNVAHWTTPSLKCIKPAASSPSSNNTAATTAAIVPGSQLMPSKSPSTGTTEISSHESSHGTPSQTTAKNWELTASASHQPPGVYPQGHSDTTVAISTSTVLLCGLSAVSLLACYLKSRASVCSCHPRSAGHTCSVGSVC

SEQ ID NO: 248605 - DNA, 705 bp, Artificial Sequence
  derived and/or modified sequence
atggcccctcggcgggccaggggatgtaggacccttggcctgcccgccctgctgctgctgctgctgctgaggcctccagcaaccaggggcattacctgtccccctccaatgtccgtggagcacgctgacatctgggtcaagagctatagcttatatagccgtgagaggtacatctgcaattcaggatttaaacggaaagctggcaccagctccctgaccgaatgtgtcttaaataaggctactaacgtggctcattggacaaccccttctctcaagtgtatcaagcccgctgcctccagtccgagtagtaacaacaccgccgcaactaccgctgccatcgtgcctggaagtcaattgatgcctagtaaaagtccatccacaggcaccacagagatatcctctcacgaatcttcacacggtacccctagccagacaactgctaaaaactgggagcttacagcctcagcttctcaccagcctccgggggtgtacccacagggccacagcgacaccacagtcgctatcagcacgtctaccgtgctgctgtgcggcctttcagccgttagcctcctagcttgctacctaaaaagcaggcagacccctccgctggcatccgtcgagatggaggctatggaagctcttcccgtgacctggggcacgagcagcagggacgaggacctggagaattgtagccaccacttatag

SEQ ID NO: 248606 - DNA, 1037 bp, Artificial Sequence
  derived and/or modified sequence
agtccagcggtgtcctgtggagctgccgccatggccccgcggcgggcgcgcggctgccggaccctcggtctcccggcgctgctactgctgctgctgctccggccgccggcgacgcggggcatcacgtgccctccccccatgtccgtggaacacgcagacatctgggtcaagagctacagcttgtactccagggagcggtacatttgtaactctggtttcaagcgtaaagccggcacgtccagcctgacggagtgcgtgttgaacaaggccacgaatgtcgcccactggacaacccccagtctcaaatgcattaagcccgcagcttcatctcccagctcaaacaacacagcggccacaacagcagctattgtcccgggctcccagctgatgccttcaaaatcaccttccacaggaaccacagagataagcagtcatgagtcctcccacggcaccccctctcagacaacagccaagaactgggaactcacagcatccgcctcccaccagccgccaggtgtgtatccacagggccacagcgacaccactgtggctatctccacgtccactgtcctgctgtgtgggctgagcgctgtgtctctcctggcatgctacctcaagtcaaggcaaactcccccgctggccagcgttgaaatggaagccatggaggctctgccggtgacttgggggaccagcagcagagatgaagacttggaaaactgctctcaccacctatgaaactcggggaaaccagcccagctaagtccggagtgaaggagcctctctgctttagctaaagacgactgagaagaggtgcaaggaagcgggctccaggagcaagctcaccaggcctctcagaagtcccagcaggatctcacggactgccgggtcggcgcctcctgcgcgagggagcaggttctccgcattcccatgggcaccacctgcctgcctgtcgtgccttggacccagggcccagcttcccaggagagaccaaaggcttctgagcaggatttttatttcattacagtgtgagctgcctg

SEQ ID NO: 248607 - DNA, 705 bp, Artificial Sequence
  derived and/or modified sequence
atggccccccggcgggcccggggctgcaggaccctgggcctgcctgccctgctgctgctgctgctgctgcggcccccagccacccggggcatcacctgccccccacccatgtctgtggagcacgccgacatctgggtgaagagctacagcctgtacagccgggagcgctacatctgcaacagcggcttcaagaggaaggccggcaccagcagcctgacagaatgtgtgctgaacaaggccaccaacgtggcccactggaccacccccagcctgaagtgcatcaagccagctgccagcagccccagcagcaacaacacagctgccaccacagctgccatcgtgcccggcagccagctgatgcccagcaagagccccagcacaggcaccacagagatcagcagccatgagagcagccacggcacccccagccagaccacagccaagaactgggagctgacagccagcgccagccaccagcccccaggagtgtacccccagggccacagcgacaccaccgtggccatcagcaccagcacagtgctgctgtgtggcctgtctgctgtgtccctgctggcctgctacctgaagagccggcagaccccacccctggcctctgtggagatggaggccatggaggccctgcctgtgacctggggcaccagcagcagagatgaggacctggagaactgcagccaccacctgtag

SEQ ID NO: 248608 - DNA, 705 bp, Artificial Sequence
  derived and/or modified sequence
atggccccccggcgggcccggggctgccggaccctgggcctgcccgccctgctattgttgttattactaagaccacctgccactcgggggattacttgcccaccacccatgtccgtggaacacgccgatatctgggtcaagtcttactctctatactctcgggagcggtatatatgcaattctggctttaagcgtaaggctgggacctcgtccctaacagagtgcgtcttgaacaaagctaccaatgtggcacattggacaaccccgtccctcaaatgtatcaagcctgcagcgagtagcccaagctccaataatactgcagcaaccaccgcagccatagtgcccgggagccagctgatgcctagtaagtcccccagcaccggaactactgagattagttcacacgagtcgtcacatggcacgccctcccagacaacagctaagaattgggagttgactgcgagcgcctcacatcagcctccaggagtttacccacagggtcacagtgacacaaccgtggccataagtacaagcaccgttctgttatgtggattgtccgccgttagcctcctcgcatgttatctgaagagccgacagaccccgccgctcgcctctgtggagatggaagccatggaggcactaccagttacatggggcacgagttctcgcgatgaagacctggagaactgtagccatcacctgtag

SEQ ID NO: 248609 - DNA, 705 bp, Artificial Sequence
  derived and/or modified sequence
atggccccacggagagccaggggatgcagaaccctaggcctgcctgcattgttgttgttactactccttcggccacccgctactcggggaatcacttgcccacctccaatgtctgtggaacacgccgacatctgggtcaaaagctattccctgtattcccgcgagaggtacatctgcaactccggattcaagcgaaaggccggtacgtctagcctaaccgaatgtgtgctgaacaaggcaacaaacgttgctcactggaccacccccagcctgaagtgcattaaacctgccgcatcttcaccaagcagcaacaacaccgcagccaccaccgcagccattgtgccaggaagccagctcatgccgtcaaagagtcctagcaccggcaccaccgaaatcagctcacacgagtccagtcatggaacacctagtcagaccactgccaaaaattgggaactcacagcttctgctagtcatcaacctccgggagtttaccctcaggggcactctgacaccaccgtggccatctcgacttcgacggtgctcctgtgtggactttctgcagtatctctcctcgcatgctatttaaagagtagacagactccacccttagctagcgtggagatggaggccatggaagccctaccagttacttggggcacaagctctcgggacgaggatttggaaaactgcagtcaccacttatag

SEQ ID NO: 248610 - DNA, 705 bp, Artificial Sequence
  derived and/or modified sequence
atggcccccagaagagccagaggctgcagaaccctgggcctgcccgccctgctgctgctgctgctgctgagaccccccgccaccagaggcatcacctgccccccccccatgagcgtggagcacgccgacatctgggtgaagagctacagcctgtacagcagagagagatacatctgcaacagcggcttcaagagaaaggccggcaccagcagcctgaccgagtgcgtgctgaacaaggccaccaacgtggcccactggaccacccccagcctgaagtgcatcaagcccgccgccagcagccccagcagcaacaacaccgccgccaccaccgccgccatcgtgcccggcagccagctgatgcccagcaagagccccagcaccggcaccaccgagatcagcagccacgagagcagccacggcacccccagccagaccaccgccaagaactgggagctgaccgccagcgccagccaccagccccccggcgtgtacccccagggccacagcgacaccaccgtggccatcagcaccagcaccgtgctgctgtgcggcctgagcgccgtgagcctgctggcctgctacctgaagagcagacagaccccccccctggccagcgtggagatggaggccatggaggccctgcccgtgacctggggcaccagcagcagagacgaggacctggagaactgcagccaccacctgtag

SEQ ID NO: 248611 - protein, 123 aa, Artificial Sequence
  derived and/or modified sequence
MSTLSNFTQTLEDVFRRIFITYMDNWRQNTTAEQEALQAKVDAENFYYVILYLMVMIGMFSFIIVAILVSTVKSKRREHSNDPYHQYIVEDWQEKYKSQILNLEESKATIHENIGAAGFKMSP

SEQ ID NO: 248612 - DNA, 809 bp, Artificial Sequence
  derived and/or modified sequence
gtaaggtgaaggtgcccagcaggctgaggcttgtgtgcaacccagaagagagctcgctaacgccagcaagaaggttcagaacagcctggctttggaaaggaatttcatcctgcccacacactgcatagcaggagggaagcatgtctactttatccaatttcacacagacgctggaagacgtcttccgaaggatttttattacttatatggacaattggcgccagaacacaacagctgagcaagaggccctccaagccaaagttgatgctgagaacttctactatgtcatcctgtacctcatggtgatgattggaatgttctctttcatcatcgtggccatcctggtgagcactgtgaaatccaagagacgggaacactccaatgacccctaccaccagtacattgtagaggactggcaggaaaagtacaagagccaaatcttgaatctagaagaatcgaaggccaccatccatgagaacattggtgcggctgggttcaaaatgtccccctgataagggagaaaggcaccaagctaacatctgacgtccagacatgaagagatgccagtgccacgaggcaaatccaaattgtctttgcttagaagaaagtgagttccttgctctctgttgagaattttcatggagattatgtggttggccaataaagatagatgacatttcaatctcagtgatttatgcttgcttgttggagcaatattttgtgctgaagacctcttttactttccgggcaagtgaatgtcattttaatcaatatcaatgatgaaaataaagccaaatttgaagaaaaaa

SEQ ID NO: 248613 - DNA, 372 bp, Artificial Sequence
  derived and/or modified sequence
atgtccactttgtccaatttcacgcagacactggaagatgtctttagaaggatctttataacatatatggataactggagacagaacactacagccgagcaagaggccctccaggcaaaggtggatgctgagaacttttactacgtgatattgtatctcatggtcatgatcggcatgttttcattcatcatcgtggccattttggtctctactgtaaagagtaaacgccgggagcatagcaacgatccttatcaccagtacatagtggaagattggcaagagaagtataaatcccaaattctgaatctggaggagtccaaagccaccattcatgagaacatcggtgctgccgggttcaagatgagtccttag

SEQ ID NO: 248614 - DNA, 372 bp, Artificial Sequence
  derived and/or modified sequence
atgagcaccctgagcaacttcacccagaccctggaggatgtgttccgccgcatcttcatcacctacatggacaactggaggcagaacaccacagctgagcaggaggccctgcaggccaaggtggatgctgagaacttctactacgtgatcctgtacctgatggtgatgattggcatgttctccttcatcatcgtggccatcctggtgtccacagtgaagagcaagaggcgggagcacagcaatgacccctaccaccagtacatcgtggaggactggcaggagaagtacaagagccagatcctgaacctggaggagagcaaggccaccatccacgagaacatcggggctgctggcttcaagatgagcccctag

SEQ ID NO: 248615 - DNA, 372 bp, Artificial Sequence
  derived and/or modified sequence
atgagcaccctgagcaacttcacccagaccctggaggacgtgttccgtaggatcttcatcacttacatggataactggcgacagaacactacagccgaacaggaggcactccaggccaaggtagacgctgagaacttttactatgtcatcttataccttatggttatgattgggatgttttcttttattatcgtggctattctggtgagcaccgtcaaaagcaagcgtcgagaacatagcaatgatccctatcaccagtacatcgtggaggactggcaggagaagtacaagagtcaaatcctgaacctggaggagtctaaggcaacgatccacgagaacataggcgccgccggctttaaaatgtctccttag

SEQ ID NO: 248616 - DNA, 803 bp, Artificial Sequence
  derived and/or modified sequence
gtaaggtgaaggtgcccagcaggctgaggcttgtgtgcaacccagaagagagctcgctaacgccagcaagaaggttcagaacagcctggctttggaaaggaatttcatcctgcccacacactgcatagcaggagggaagcatgtctactttatccaatttcacacagacgctggaagacgtcttccgaaggatttttattacttatatggacaattggcgccagaacacaacagctgagcaagaggccctccaagccaaagttgatgctgagaacttctactatgtcatcctgtacctcatggtgatgattggaatgttctctttcatcatcgtggccatcctggtgagcactgtgaaatccaagagacgggaacactccaatgacccctaccaccagtacattgtagaggactggcaggaaaagtacaagagccaaatcttgaatctagaagaatcgaaggccaccatccatgagaacattggtgcggctgggttcaaaatgtccccctgataagggagaaaggcaccaagctaacatctgacgtccagacatgaagagatgccagtgccacgaggcaaatccaaattgtctttgcttagaagaaagtgagttccttgctctctgttgagaattttcatggagattatgtggttggccaataaagatagatgacatttcaatctcagtgatttatgcttgcttgttggagcaatattttgtgctgaagacctcttttactttccgggcaagtgaatgtcattttaatcaatatcaatgatgaaaataaagccaaatttgaag

SEQ ID NO: 248617 - DNA, 372 bp, Artificial Sequence
  derived and/or modified sequence
atgtccacactgtccaacttcacgcagaccctggaggacgtgttccggaggatcttcatcacttatatggataactggagacagaacaccaccgccgaacaggaagctctgcaggcgaaggtggatgcagagaatttttactacgtaatcttgtacctaatggttatgatcggcatgttttcatttatcatagtggcaatcctagtgagtacggtaaagtcgaaacgtagagagcatagcaatgacccctatcatcaatacattgtggaagactggcaagagaagtacaaatcccagatattgaatttggaagaaagcaaggccacgattcacgagaacataggcgctgcaggatttaagatgtcaccctag

SEQ ID NO: 248618 - DNA, 372 bp, Artificial Sequence
  derived and/or modified sequence
atgagcaccctgagcaacttcacccagaccctggaggacgtgttcagaagaatcttcatcacctacatggacaactggagacagaacaccaccgccgagcaggaggccctgcaggccaaggtggacgccgagaacttctactacgtgatcctgtacctgatggtgatgatcggcatgttcagcttcatcatcgtggccatcctggtgagcaccgtgaagagcaagagaagagagcacagcaacgacccctaccaccagtacatcgtggaggactggcaggagaagtacaagagccagatcctgaacctggaggagagcaaggccaccatccacgagaacatcggcgccgccggcttcaagatgagcccctag

SEQ ID NO: 248619 - protein, 505 aa, Artificial Sequence
  derived and/or modified sequence
MEGGPAVCCQDPRAELVERVAAIDVTHLEEADGGPEPTRNGVDPPPRARAASVIPGSTSRLLPARPSLSARKLSLQERPAGSYLEAQAGPYATGPASHISPRAWRRPTIESHHVAISDAEDCVQLNQYKLQSEIGKGAYGVVRLAYNESEDRHYAMKVLSKKKLLKQYGFPRRPPPRGSQAAQGGPAKQLLPLERVYQEIAILKKLDHVNVVKLIEVLDDPAEDNLYLVFDLLRKGPVMEVPCDKPFSEEQARLYLRDVILGLEYLHCQKIVHRDIKPSNLLLGDDGHVKIADFGVSNQFEGNDAQLSSTAGTPAFMAPEAISDSGQSFSGKALDVWATGVTLYCFVYGKCPFIDDFILALHRKIKNEPVVFPEEPEISEELKDLILKMLDKNPETRIGVPDIKLHPWVTKNGEEPLPSEEEHCSVVEVTEEEVKNSVRLIPSWTTVILVKSMLRKRSFGNPFEPQARREERSMSAPGNLLVKEGFGEGGKSPELPGVQEDEAAS

SEQ ID NO: 248620 - protein, 532 aa, Artificial Sequence
  derived and/or modified sequence
MQFGKLWCGCSGEFPTRLRRRTPLTEAMEGGPAVCCQDPRAELVERVAAIDVTHLEEADGGPEPTRNGVDPPPRARAASVIPGSTSRLLPARPSLSARKLSLQERPAGSYLEAQAGPYATGPASHISPRAWRRPTIESHHVAISDAEDCVQLNQYKLQSEIGKGAYGVVRLAYNESEDRHYAMKVLSKKKLLKQYGFPRRPPPRGSQAAQGGPAKQLLPLERVYQEIAILKKLDHVNVVKLIEVLDDPAEDNLYLVFDLLRKGPVMEVPCDKPFSEEQARLYLRDVILGLEYLHCQKIVHRDIKPSNLLLGDDGHVKIADFGVSNQFEGNDAQLSSTAGTPAFMAPEAISDSGQSFSGKALDVWATGVTLYCFVYGKCPFIDDFILALHRKIKNEPVVFPEEPEISEELKDLILKMLDKNPETRIGVPDIKLHPWVTKNGEEPLPSEEEHCSVVEVTEEEVKNSVRLIPSWTTVILVKSMLRKRSFGNPFEPQARREERSMSAPGNLLVKEGFGEGGKSPELPGVQEDEAAS

SEQ ID NO: 248621 - DNA, 1518 bp, Artificial Sequence
  derived and/or modified sequence
atggaggggggccctgcggtgtgctgccaggaccctcgggccgagctggtagaaagggttgccgccatcgacgtaacccacctggaggaggcagatggaggtcccgaacccactaggaatggggtcgatcctccgccacgggccagggcagcaagcgttatcccaggatcgacctccagactgctgccagcccggccttctctgagtgcccggaaattaagcttgcaggagagacccgcaggaagctaccttgaagctcaggcaggcccctatgccactggtcctgcaagtcatattagtccccgggcctggagaagaccaacaatagagtcccatcacgtcgcgatctccgacgcggaagactgtgtccagctgaatcagtacaaattgcagtcagagatcggcaaaggcgcctacggcgtcgtgagactggcatacaatgaaagcgaggacagacattatgccatgaaggtgctgagtaagaaaaagctccttaagcagtacggcttccctagacgccctccacctagaggcagtcaggccgcccaagggggcccggccaaacagctgctgccgcttgagcgggtgtaccaggaaatcgccatcttgaagaaactcgatcatgtgaacgtggttaagctaattgaagttcttgatgaccccgctgaagacaacctttatctcgttttcgatctactgcggaaggggcctgttatggaggtgccctgcgacaaaccattctcagaagaacaagccaggctgtacctaagagacgtcattctggggctagaatacctgcactgtcagaagatcgtacatcgggatattaagccttcaaacctgctgctgggtgatgatggacatgtgaaaatagctgatttcggcgtatcaaaccagtttgaaggaaatgatgctcaactgagttccacagcaggcaccccagcattcatggctcccgaagccatttccgattccggccagtcattcagcggcaaggctcttgacgtctgggctactggggtgacactttactgcttcgtatacggcaagtgtcctttcatcgacgatttcatcttggctctgcaccgcaagattaaaaacgaacctgttgtgttccctgaagagccagaaatttccgaagagctgaaggatctcattttgaagatgctggacaaaaatccggagactcggataggagtgcctgatataaagctacatccttgggtgactaaaaacggagaagaaccgctcccatccgaagaagaacactgctcagtagtggaagtaacggaggaagaagtaaagaatagcgtgcgtttgatcccttcctggacaaccgtcatcctggtgaaaagtatgttaagaaaacgctcctttgggaacccctttgagccacaagccagaagggaagagcgttccatgtccgcaccaggcaacctcctggttaaagagggttttggggagggggggaaatctcctgagctgcccggcgtgcaggaagacgaggccgctagttag

SEQ ID NO: 248622 - DNA, 1599 bp, Artificial Sequence
  derived and/or modified sequence
atgcagtttggaaaactctggtgtggctgttctggcgaattccctactcgtctgcgtcgtcgcacgcctttaacggaagccatggagggcgggcccgccgtgtgctgtcaagacccccgcgcggagctggtggagcgggtggctgccatagatgtcacccacctcgaagaggccgacgggggccccgaacccacccgcaacggcgtcgatcctccccctcgggcgagagctgcctcagtgattccaggaagcaccagccggttgctccctgcgcggcctagcttgagtgcccgtaagctgagcttacaggaacggcctgcaggatcatatctggaggctcaagcaggcccatatgctactggaccagcaagccacatcagccctcgagcctggagacgccccaccatcgagtcccatcacgtggccatatcggacgcagaggactgtgttcagttgaaccagtataagctccagtcagaaatcggaaagggagcttacggcgtggtgagattggcatacaatgagtcagaggatagacactacgcaatgaaggtgctgtccaagaagaaacttcttaaacaatatgggtttcctcgccggccccctccccggggcagtcaggccgcccagggcggcccggctaagcagctgctgcccctggaacgggtgtaccaggagatcgcaatcctgaagaaactggaccatgtgaacgtcgttaagcttattgaggtcctagatgatccagccgaagataatttgtacctggttttcgatctgctgagaaagggcccagtgatggaggtaccttgcgacaagcccttctccgaggagcaagccaggctttacctcagagatgttattttaggtctcgagtatctgcactgccagaaaattgtgcatcgggatattaagccgtcaaatctgctgctaggcgatgatggccacgtgaagatcgcggatttcggcgtttctaatcagtttgagggaaacgacgctcagctgagttccactgctggcactcccgcctttatggcaccagaagcaattagtgacagcgggcagagtttctctgggaaagctctagacgtgtgggccaccggcgtgacactgtactgctttgtctacggaaagtgcccgttcatagacgatttcattctggctttgcatagaaaaatcaagaacgaaccagtggtttttccagaagagccggagatcagcgaagaactgaaggacctgattctcaagatgctggacaaaaatccggagactcgcataggtgtccccgatataaaactccacccatgggtgaccaagaatggagaggagccactgccttccgaagaagaacactgttcagtcgtggaggttaccgaagaagaagtcaagaactcagtgcggctcattcctagctggaccaccgttatcctagtaaaatccatgctcaggaagcgctcattcgggaacccctttgagccacaggcccggagagaggaaaggtccatgagcgcgccaggcaatctactcgtgaaggagggctttggtgagggtggaaaatcccccgagctgcccggagtgcaagaggatgaagctgccagttag

SEQ ID NO: 248623 - DNA, 1518 bp, Artificial Sequence
  derived and/or modified sequence
atggagggcggccctgctgtgtgctgccaggaccccagggctgagctggtggagcgggtggccgccattgatgtgacccacctggaggaggctgatggcggccctgagcccaccagaaatggagtggaccccccaccccgggcccgggccgccagcgtcatccctggcagcaccagccggctgctgcctgcccggcccagcctgagcgccaggaagctgagcctgcaggagaggcctgctggcagctacctggaggcccaggccggcccctatgccactggacctgccagccacatcagcccccgggcctggaggcggcccaccatcgagagccaccacgtggccatcagtgatgctgaggactgtgtgcagctgaaccagtacaagctgcagagcgagatcggcaagggggcctatggagtggtgcggctggcctacaatgaaagtgaggacagacactacgccatgaaggtgctgagcaagaagaagctgctgaagcagtatggcttcccccggcggcccccaccccggggcagccaggccgcccagggcggccctgccaagcagctgctgcccctggagcgggtgtaccaggagatcgccatcctgaagaagctggaccacgtgaatgtggtgaagctgattgaggtgctggatgatcctgctgaggacaacctgtacctggtgtttgacctgctgaggaaaggacctgtgatggaggtgccctgtgacaagcccttcagcgaggagcaggcccggctgtacctgagagatgtgatcctgggcctggagtacctgcactgccagaagatcgtgcaccgggacatcaagcccagcaacctgctgctgggagatgatggccacgtgaagattgctgactttggagtgagcaaccagtttgagggcaatgatgcccagctgagcagcacagctggcaccccagccttcatggcccctgaggccatcagtgacagcggccagagcttcagcggcaaggccctggatgtgtgggccactggagtgaccctgtactgctttgtgtatggcaagtgccccttcattgatgacttcatcctggccctgcacaggaagatcaagaatgaacctgtggtgtttcctgaggagcctgagatcagcgaggagctgaaggacctgatcctgaagatgctggacaagaaccctgagacccgcatcggcgtgcctgacatcaagctgcacccctgggtgaccaagaatggagaggagcccctgcccagcgaggaggagcactgcagcgtggtggaggtgacagaggaggaggtgaagaacagcgtgcggctcatccccagctggaccaccgtcatcctggtgaagtccatgctgaggaagaggagctttggaaacccctttgagccccaggcccggcgggaggagaggtccatgtctgcccctggcaacctgctggtgaaggagggctttggagagggcggcaagagccctgagctgcccggggtgcaggaggatgaagctgccagctag

SEQ ID NO: 248624 - DNA, 1599 bp, Artificial Sequence
  derived and/or modified sequence
atgcagtttgggaagctgtggtgtggctgcagcggggagttccccacccggctgcggcggaggacccccctgacagaggccatggagggcggccctgctgtgtgctgccaggaccccagggctgagctggtggagcgggtggccgccattgatgtgacccacctggaggaggctgatggcggccctgagcccaccagaaatggagtggaccccccaccccgggcccgggccgccagcgtcatccctggcagcaccagccggctgctgcctgcccggcccagcctgagcgccaggaagctgagcctgcaggagaggcctgctggcagctacctggaggcccaggccggcccctatgccaccggccctgccagccacatcagcccccgggcctggaggcggcccaccatcgagagccaccacgtggccatcagtgatgctgaggactgtgtgcagctgaaccagtacaagctgcagagcgagattggaaaaggagcctacggcgtggtgcggctggcctacaatgaaagtgaagatagacactacgccatgaaggtgctgagcaagaagaagctgctgaagcagtatggcttcccccggcggcccccaccccggggcagccaggccgcccagggcggccctgccaagcagctgctgcccctggagcgggtgtaccaggagatcgccatcctgaagaagctggaccacgtgaatgtggtgaagctgattgaggtgctggatgatcctgctgaggacaacctgtacctggtgtttgacctgctgaggaagggccctgtgatggaggtgccctgtgacaagcccttcagcgaggagcaggcccggctgtacctgagagatgtgatcctgggcctggagtacctgcactgccagaagatcgtgcaccgggacatcaagcccagcaacctgctgctgggagatgatggccacgtgaagattgctgactttggagtgagcaaccagtttgagggcaatgatgcccagctgagcagcacagctggcaccccagccttcatggcccctgaggccatcagtgacagcggccagagcttcagcggcaaggccctggatgtgtgggccaccggggtgaccctgtactgctttgtgtatggaaaatgtcccttcattgatgacttcatcctggccctgcacaggaagatcaagaatgaacctgtggtgtttcctgaggagcctgagatcagcgaggagctgaaggacctgatcctgaagatgctggacaagaaccctgagaccagaattggagtgcctgacatcaagctgcacccctgggtgaccaagaatggagaggagcccctgcccagcgaggaggagcactgcagcgtggtggaggtgacagaggaggaggtgaagaacagcgtgcggctcatccccagctggaccaccgtcatcctggtgaagtccatgctgaggaagaggagctttggaaacccctttgagccccaggcccggcgggaggagaggtccatgtctgcccctggcaacctgctggtgaaggagggctttggagagggcggcaagagccctgagctgcccggggtgcaggaggatgaggccgccagctag

SEQ ID NO: 248625 - DNA, 1518 bp, Artificial Sequence
  derived and/or modified sequence
atggagggcggccccgccgtgtgctgccaggacccccgggccgagctggttgaacgggtggccgcgatcgacgttactcacctggaagaagcggatggcggccccgagcctacccggaacggggtcgacccaccgccgagagcgcgagctgcatccgttatcccagggagtacaagccgtctgctcccggctaggccttcgttgagcgctagaaagctgtccctgcaggagcggcccgccggatcttatctcgaggcccaggcaggaccatacgctacgggcccggcctcacacatatcaccgcgagcatggcgcagaccaacaatcgagtcacatcacgtggcgatcagcgacgccgaggactgcgtccagctgaatcagtataaacttcagagcgagatcggtaagggcgcttatggggtggtgcgcttagcctataacgagtctgaggatcggcattatgcaatgaaagtgctatccaagaagaagctgcttaagcagtacggcttccctcgcagacctcctcccaggggctctcaggccgcccaggggggccctgccaagcaactgttgccactggaaagagtgtatcaagaaattgccatcttgaaaaagttggaccatgtgaacgtggtcaaactgatcgaagtactggatgatccagctgaggataatctgtatctggtgtttgacttgctgaggaaaggtcctgtcatggaagtcccttgtgataagccattctcggaggagcaagctcgcctgtacctaagggacgtaatactcggtctggagtacctccactgtcagaaaatagtacatagggacatcaagccctccaaccttttacttggcgatgatggacacgtaaagattgccgattttggcgtctccaaccagttcgaggggaatgatgcgcaactctccagcacagcgggaaccccagcttttatggccccggaagcaatttctgattcaggccaaagtttctccgggaaagcactggatgtctgggccactggcgttacactgtactgctttgtctatgggaagtgtccgttcatagatgacttcatcttggcactccatcggaaaatcaaaaacgagccggtcgtgtttcctgaagagccggagatctccgaggagctgaaagacctcatacttaagatgctggataaaaatcccgagacacgtataggagtcccagatattaagctgcacccttgggtgacaaagaacggtgaagagccgttaccatcagaggaagagcactgttcagtggttgaggtgacagaggaagaagtgaagaattctgttcgcctgatcccaagttggaccactgtgattttagttaaatccatgttgagaaaaaggtcctttgggaacccctttgagcctcaggctcggagggaggagagatccatgagcgcaccaggaaacctgctggtgaaggaaggcttcggtgaagggggtaagagcccagagcttccaggagtacaggaggacgaggcagcctcttag

SEQ ID NO: 248626 - DNA, 1599 bp, Artificial Sequence
  derived and/or modified sequence
atgcagttcggcaagctgtggtgcggctgcagcggcgagttccccactcgcctacggcgaaggaccccactgacagaggcgatggaaggcggcccagcagtgtgttgccaagatccaagagcagagctggtggagagagtcgccgcaatcgacgtgacccatttagaagaagcagatggcggccctgagccaacccgcaacggggtcgaccccccacccagagcccgggcagcctccgtgattccaggctccacctctcggctcctgcccgcgagaccaagtcttagcgcgcggaaactttcgctgcaggaacgcccagccggttcatacttggaggcgcaggccggaccatacgcaacaggacccgcaagtcacataagtccgagagcctggcggaggcctaccattgagagccatcacgtggccatctccgacgccgaagattgcgtccagctcaatcagtacaaactgcagtcagagataggaaaaggcgcctatggagtcgtccgcctggcatacaacgagtccgaggatcgacattatgccatgaaggtcctctctaaaaagaagttactgaaacaatatggttttccccgccggccccctccgagggggagtcaggccgcacagggaggaccagcaaagcagctgctaccccttgaaagggtatatcaggaaatcgcaatccttaagaaactggaccatgtgaatgtggtgaaactaattgaggttctagatgaccccgccgaggacaatctctacctcgtttttgatctgcttaggaaagggcccgttatggaggtgccctgcgataaacccttctcggaagagcaggcccgtttgtacttgcgcgacgtgatactgggactggaatacctccactgccaaaagatcgtgcacagagatatcaaaccgtccaacctgctgcttggtgacgacgggcatgtcaaaatagccgacttcggcgtaagcaaccaatttgaaggcaacgacgctcagctaagttcaacagctggcacacccgcattcatggcccccgaggcaatcagcgattctggccagtctttttccgggaaggcactggatgtatgggccacgggcgttactttgtactgttttgtttacggcaaatgtccattcattgacgattttatcctggctctgcatcgcaagattaaaaatgagcccgtggtgtttcccgaggagcctgaaatttccgaggagctgaaggacctcatcctgaagatgttggataaaaatccagagacacgcatcggagtgcccgatattaaactgcacccatgggtcaccaaaaatggcgaagaaccactgcctagcgaagaagaacactgcagcgttgtcgaggtgaccgaggaggaggttaaaaacagtgtgaggctgattccctcctggactacggttatactcgttaagtccatgctacgaaaaaggtccttcggcaacccctttgagcctcaagcccgccgcgaagagagatcaatgtcggcacctgggaacctgctggtgaaggagggttttggggaaggcgggaaaagtccagagttgccgggggtgcaagaggacgaagccgcaagttag

SEQ ID NO: 248627 - DNA, 1518 bp, Artificial Sequence
  derived and/or modified sequence
atggagggcggacccgcagtttgttgccaggacccacgagcggagttagtggagcgcgtcgccgctattgatgtgacgcacttggaagaagctgacggaggccctgaacccactcgcaacggcgtggacccccctccccgagctcgcgctgctagcgtaataccaggtagcacatctagactgcttcccgcacgccctagcctgagcgcccgaaagctgagcctgcaggaaaggcctgccggatcctacttagaggcgcaggccggtccctatgcaacaggccctgcttcacacatctcacctagggcctggagacgacctacaatcgaaagccatcacgtcgctattagcgacgctgaggactgtgttcagctgaaccagtacaagttacagtcagaaatcggaaaaggcgcatatggggttgtaaggctggcatataacgagagcgaagatcgtcattacgccatgaaagtgctgtccaagaagaagctcctgaaacaatacggctttcctcggcgaccaccccctcgaggcagccaagcagcacaggggggacctgccaagcagttactcccactcgagagagtctatcaggaaatcgccatccttaagaagttggatcatgtgaatgttgttaagctaattgaggtgctggacgatcctgctgaggacaacctgtatctggtgtttgacctgctgcgaaagggccctgtgatggaggttccatgcgacaaacctttcagcgaggaacaggccaggctctatctcagggacgtgattttgggacttgaatacctgcattgccaaaagatcgtgcatagggacattaaaccgtcaaatttactcctgggagatgatggacacgtaaaaatcgctgattttggcgtgtcaaaccagttcgagggaaacgacgcccaactgagctccacagccggaacccccgcttttatggcgccagaggccatatccgatagcgggcaatcttttagcggcaaagcactggatgtctgggctactggcgtgacattatactgcttcgtttacggtaagtgcccctttatcgatgacttcatcctcgccctacacaggaagatcaagaacgaacctgtggtctttcctgaggagccagagatttcagaagagctgaaagacctcattttgaagatgctcgataagaatcctgagaccagaatcggcgtgccagacatcaaactgcacccgtgggttacgaagaatggtgaagagcctctcccaagcgaggaagaacactgcagcgtggtagaagtcacagaggaggaggtgaagaattcggttcgcttgataccctcctggaccactgtgatactggttaagtctatgctgaggaagagatcatttggaaacccatttgaaccccaggcgaggcgggaggagaggtccatgagcgcccctggcaatctgctggtcaaagaaggatttggggaagggggtaaatcccccgagctgcctggagtccaagaagatgaggctgcgagctag

SEQ ID NO: 248628 - DNA, 1599 bp, Artificial Sequence
  derived and/or modified sequence
atgcagtttggtaagctatggtgcggctgcagtggcgaatttccaacacgtctgcgtcggagaactccactgacagaggccatggaaggtggacctgctgtttgttgccaggatcctagagccgagctggtagaacgagtcgcagccattgatgtgacccacctggaggaggccgacgggggaccagagccaacaaggaacggagtggatccaccccctagggcccgagccgcttccgttataccgggaagcacatcgaggctgttgcccgcacggccatcgttgagtgctaggaaactgtctctgcaagaacgaccggcaggttcatatctcgaagctcaggccggaccttatgccaccggcccagccagtcacatttcccctcgtgcctggagaaggccaacaatagaaagtcatcatgtggcaatatccgatgccgaggattgcgtccaactcaatcagtacaagcttcagtccgagatcgggaaaggtgcatatggcgtggttcgcctggcctacaacgagtccgaagaccgacattatgcaatgaaagtgctgtcgaaaaaaaagctcttaaagcaatacggctttccacgtagaccaccacccagaggctcccaggcagcgcagggtgggccagcaaagcagctgttacctttagagcgagtctatcaggagatcgccattctcaaaaagctagatcacgtgaatgtcgttaaactgatcgaagtccttgatgacccggcagaggacaatctgtacctcgtgtttgaccttctgcggaagggaccagtgatggaggtgccatgcgacaagccattcagtgaggagcaggccagactctacctgagagatgtgatattgggactggaatatctgcactgtcagaaaatcgtccatcgagacatcaagccctcaaatttgttactgggcgacgacggccacgtaaagatcgcagattttggagtctcaaatcagtttgaaggaaatgacgcccagctgtcgagcactgctggtaccccagcattcatggctcccgaagccatttccgattctggacagtcattctccggcaaggcgctcgatgtttgggccactggcgtgaccttgtattgcttcgtatacggcaaatgcccattcatcgatgacttcatactcgcactgcacaggaaaataaaaaatgaaccggtggtcttccctgaagagcccgagatcagcgaggagctgaaagatctgatactgaagatgctcgacaagaaccccgagactaggattggcgtgcctgatattaagttacacccatgggttaccaagaacggtgaagaacctttacctagtgaagaagaacattgttctgtggttgaggttaccgaggaagaggtaaaaaattccgttcgtttgattccttcttggacaacagtgattctagtgaaatctatgctgagaaagcgttcattcgggaatcctttcgaacctcaagccaggcgcgaagagagatcaatgtcagctcccggtaatctcctggtcaaggaggggttcggggaggggggtaaatccccggaactccccggagtgcaggaggacgaggcggctagctag

SEQ ID NO: 248629 - DNA, 3563 bp, Artificial Sequence
  derived and/or modified sequence
tctgggccccagcgaggcggtggggcggggcggggcggggcggggcgcgcagcaggagcgagtggggccgcccgccgggccgcggacactgtcgcccggcgcccaggttcccaacaaggctacgcagaagaacccccttgactgaagcaatggaggggggtccagctgtctgctgccaggatcctcgggcagagctggtagaacgggtggcagccatcgatgtgactcacttggaggaggcagatggtggcccagagcctactagaaacggtgtggaccccccaccacgggccagagctgcctctgtgatccctggcagtacttcaagactgctcccagcccggcctagcctctcagccaggaagctttccctacaggagcggccagcaggaagctatctggaggcgcaggctgggccttatgccacggggcctgccagccacatctccccccgggcctggcggaggcccaccatcgagtcccaccacgtggccatctcagatgcagaggactgcgtgcagctgaaccagtacaagctgcagagtgagattggcaagggtgcctacggtgtggtgaggctggcctacaacgaaagtgaagacagacactatgcaatgaaagtcctttccaaaaagaagttactgaagcagtatggctttccacgtcgccctcccccgagagggtcccaggctgcccagggaggaccagccaagcagctgctgcccctggagcgggtgtaccaggagattgccatcctgaagaagctggaccacgtgaatgtggtcaaactgatcgaggtcctggatgacccagctgaggacaacctctatttggtgtttgacctcctgagaaaggggcccgtcatggaagtgccctgtgacaagcccttctcggaggagcaagctcgcctctacctgcgggacgtcatcctgggcctcgagtacttgcactgccagaagatcgtccacagggacatcaagccatccaacctgctcctgggggatgatgggcacgtgaagatcgccgactttggcgtcagcaaccagtttgaggggaacgacgctcagctgtccagcacggcgggaaccccagcattcatggcccccgaggccatttctgattccggccagagcttcagtgggaaggccttggatgtatgggccactggcgtcacgttgtactgctttgtctatgggaagtgcccattcatcgacgatttcatcctggccctccacaggaagatcaagaatgagcccgtggtgtttcctgaggagccagaaatcagcgaggagctcaaggacctgatcctgaagatgttagacaagaatcccgagacgagaattggggtgccagacatcaagttgcacccttgggtgaccaagaacggggaggagccccttccttcggaggaggagcactgcagcgtggtggaggtgacagaggaggaggttaagaactcagtcaggctcatccccagctggaccacggtgatcctggtgaagtccatgctgaggaagcgttcctttgggaacccgtttgagccccaagcacggagggaagagcgatccatgtctgctccaggaaacctactggtgaaagaagggtttggtgaagggggcaagagcccagagctccccggcgtccaggaagacgaggctgcatcctgagcccctgcatgcacccagggccacccggcagcacactcatcccgcgcctccagaggcccacccctcatgcaacagccgcccccgcaggcagggggctggggactgcagccccactcccgcccctcccccatcgtgctgcatgacctccacgcacgcacgtccagggacagactggaatgtatgtcatttggggtcttgggggcagggctcccacgaggccatcctcctcttcttggacctccttggcctgacccattctgtggggaaaccgggtgcccatggagcctcagaaatgccacccggctggttggcatggcctggggcaggaggcagaggcaggagaccaagatggcaggtggaggccaggcttaccacaacggaagagacctcccgctggggccgggcaggcctggctcagctgccacaggcatatggtggagaggggggtaccctgcccaccttggggtggtggcaccagagctcttgtctattcagacgctggtatgggggctcggacccctcactggggacagggccagtgttggagaattctgattccttttttgttgtcttttacttttgtttttaacctgggggttcggggagaggccctgcttgggaacatctcacgagctttcctacatcttccgtggttcccagcacagcccaagattatttggcagccaagtggatggaactaactttcctggactgtgtttcgcattcggcgttatctggaaagtggactgaacggaatcaagctctgagcagaggcctgaagcggaagcaccacatcgtccctgcccatctcactctctcccttgatgatgcccctagagctgaggctggagaagacaccagggctgactttgaccgagggccatggacgcgacaggcctgtggccctgcgcatgctgaaataactggaacccagcctctcctcctacaccggcctacccatctgggcccaagagctgcactcacactcctacaacgaaggacaaactgtccaggtcggagggatcacgagacacagaacctggaggggtgtgcacgctggcaggtggcctctgcggcaattgcctcaccctgaggacatcagcagtcagcctgctcagagcgggggtgctggagcgcgtgcagacacagctcttccggagcagccttcaccttctctctgggatcagtgtccggctggccgacgtggcatttgctgaccgaatgctcatagaggttgacccccacagggtcacgcaggactcggacactgccctggaaacatggatggacaagggcttttggccacaggtgtgggtgtcctgttggaggagggcttgtttggagaagggaggctggctgggggagaaacccggatcccgctgcatctccgcgcctgtgggtgcatgtcgcgtgctcatctgttgcacacagctcactcgtatgtcctgcactggtacatgcatctgtaatacagtttctacgtctatttaaggctaggagccgaatgtgccccattgtcagtgggtccacgtttctccccggctcctctgggctaaggcagtgtggcccgaagcttaaaaagttactcggtactgtttttaagaacacttttatagagttagtggaaggcaagttaagagccaatcactgatccccaagtgtttcttgagcatctggtctggggggaccactttgatcggacccacccttggaaagctcaggggtaggcccaggtgggatgctcaccctgtcactgagggttttggttggcatcgttgtttttgaatgtagcacaagcgatgagcaaactctataagagtgttttaaaaattaacttcccaggaagtgagttaaaaacaataaaagccctttcttgagttaaaaagaaaaaaaaaa

SEQ ID NO: 248630 - DNA, 3509 bp, Artificial Sequence
  derived and/or modified sequence
cagcagaacagagtatgcaatttgggaagctgtggtgtggctgcagtggagagttcccaacaaggctacgcagaagaacccccttgactgaagcaatggaggggggtccagctgtctgctgccaggatcctcgggcagagctggtagaacgggtggcagccatcgatgtgactcacttggaggaggcagatggtggcccagagcctactagaaacggtgtggaccccccaccacgggccagagctgcctctgtgatccctggcagtacttcaagactgctcccagcccggcctagcctctcagccaggaagctttccctacaggagcggccagcaggaagctatctggaggcgcaggctgggccttatgccacggggcctgccagccacatctccccccgggcctggcggaggcccaccatcgagtcccaccacgtggccatctcagatgcagaggactgcgtgcagctgaaccagtacaagctgcagagtgagattggcaagggtgcctacggtgtggtgaggctggcctacaacgaaagtgaagacagacactatgcaatgaaagtcctttccaaaaagaagttactgaagcagtatggctttccacgtcgccctcccccgagagggtcccaggctgcccagggaggaccagccaagcagctgctgcccctggagcgggtgtaccaggagattgccatcctgaagaagctggaccacgtgaatgtggtcaaactgatcgaggtcctggatgacccagctgaggacaacctctatttggtgtttgacctcctgagaaaggggcccgtcatggaagtgccctgtgacaagcccttctcggaggagcaagctcgcctctacctgcgggacgtcatcctgggcctcgagtacttgcactgccagaagatcgtccacagggacatcaagccatccaacctgctcctgggggatgatgggcacgtgaagatcgccgactttggcgtcagcaaccagtttgaggggaacgacgctcagctgtccagcacggcgggaaccccagcattcatggcccccgaggccatttctgattccggccagagcttcagtgggaaggccttggatgtatgggccactggcgtcacgttgtactgctttgtctatgggaagtgcccattcatcgacgatttcatcctggccctccacaggaagatcaagaatgagcccgtggtgtttcctgaggagccagaaatcagcgaggagctcaaggacctgatcctgaagatgttagacaagaatcccgagacgagaattggggtgccagacatcaagttgcacccttgggtgaccaagaacggggaggagccccttccttcggaggaggagcactgcagcgtggtggaggtgacagaggaggaggttaagaactcagtcaggctcatccccagctggaccacggtgatcctggtgaagtccatgctgaggaagcgttcctttgggaacccgtttgagccccaagcacggagggaagagcgatccatgtctgctccaggaaacctactggtgaaagaagggtttggtgaagggggcaagagcccagagctccccggcgtccaggaagacgaggctgcatcctgagcccctgcatgcacccagggccacccggcagcacactcatcccgcgcctccagaggcccacccctcatgcaacagccgcccccgcaggcagggggctggggactgcagccccactcccgcccctcccccatcgtgctgcatgacctccacgcacgcacgtccagggacagactggaatgtatgtcatttggggtcttgggggcagggctcccacgaggccatcctcctcttcttggacctccttggcctgacccattctgtggggaaaccgggtgcccatggagcctcagaaatgccacccggctggttggcatggcctggggcaggaggcagaggcaggagaccaagatggcaggtggaggccaggcttaccacaacggaagagacctcccgctggggccgggcaggcctggctcagctgccacaggcatatggtggagaggggggtaccctgcccaccttggggtggtggcaccagagctcttgtctattcagacgctggtatgggggctcggacccctcactggggacagggccagtgttggagaattctgattccttttttgttgtcttttacttttgtttttaacctgggggttcggggagaggccctgcttgggaacatctcacgagctttcctacatcttccgtggttcccagcacagcccaagattatttggcagccaagtggatggaactaactttcctggactgtgtttcgcattcggcgttatctggaaagtggactgaacggaatcaagctctgagcagaggcctgaagcggaagcaccacatcgtccctgcccatctcactctctcccttgatgatgcccctagagctgaggctggagaagacaccagggctgactttgaccgagggccatggacgcgacaggcctgtggccctgcgcatgctgaaataactggaacccagcctctcctcctacaccggcctacccatctgggcccaagagctgcactcacactcctacaacgaaggacaaactgtccaggtcggagggatcacgagacacagaacctggaggggtgtgcacgctggcaggtggcctctgcggcaattgcctcaccctgaggacatcagcagtcagcctgctcagagcgggggtgctggagcgcgtgcagacacagctcttccggagcagccttcaccttctctctgggatcagtgtccggctggccgacgtggcatttgctgaccgaatgctcatagaggttgacccccacagggtcacgcaggactcggacactgccctggaaacatggatggacaagggcttttggccacaggtgtgggtgtcctgttggaggagggcttgtttggagaagggaggctggctgggggagaaacccggatcccgctgcatctccgcgcctgtgggtgcatgtcgcgtgctcatctgttgcacacagctcactcgtatgtcctgcactggtacatgcatctgtaatacagtttctacgtctatttaaggctaggagccgaatgtgccccattgtcagtgggtccacgtttctccccggctcctctgggctaaggcagtgtggcccgaagcttaaaaagttactcggtactgtttttaagaacacttttatagagttagtggaaggcaagttaagagccaatcactgatccccaagtgtttcttgagcatctggtctggggggaccactttgatcggacccacccttggaaagctcaggggtaggcccaggtgggatgctcaccctgtcactgagggttttggttggcatcgttgtttttgaatgtagcacaagcgatgagcaaactctataagagtgttttaaaaattaacttcccaggaagtgagttaaaaacaataaaagccctttcttgagttaaaaagaaaaaaaaaa

SEQ ID NO: 248631 - DNA, 1518 bp, Artificial Sequence
  derived and/or modified sequence
atggagggcggccccgccgtgtgctgccaggaccccagagccgagctggtggagagagtggccgccatcgacgtgacccacctggaggaggccgacggcggccccgagcccaccagaaacggcgtggaccccccccccagagccagagccgccagcgtgatccccggcagcaccagcagactgctgcccgccagacccagcctgagcgccagaaagctgagcctgcaggagagacccgccggcagctacctggaggcccaggccggcccctacgccaccggccccgccagccacatcagccccagagcctggagaagacccaccatcgagagccaccacgtggccatcagcgacgccgaggactgcgtgcagctgaaccagtacaagctgcagagcgagatcggcaagggcgcctacggcgtggtgagactggcctacaacgagagcgaggacagacactacgccatgaaggtgctgagcaagaagaagctgctgaagcagtacggcttccccagaagacccccccccagaggcagccaggccgcccagggcggccccgccaagcagctgctgcccctggagagagtgtaccaggagatcgccatcctgaagaagctggaccacgtgaacgtggtgaagctgatcgaggtgctggacgaccccgccgaggacaacctgtacctggtgttcgacctgctgagaaagggccccgtgatggaggtgccctgcgacaagcccttcagcgaggagcaggccagactgtacctgagagacgtgatcctgggcctggagtacctgcactgccagaagatcgtgcacagagacatcaagcccagcaacctgctgctgggcgacgacggccacgtgaagatcgccgacttcggcgtgagcaaccagttcgagggcaacgacgcccagctgagcagcaccgccggcacccccgccttcatggcccccgaggccatcagcgacagcggccagagcttcagcggcaaggccctggacgtgtgggccaccggcgtgaccctgtactgcttcgtgtacggcaagtgccccttcatcgacgacttcatcctggccctgcacagaaagatcaagaacgagcccgtggtgttccccgaggagcccgagatcagcgaggagctgaaggacctgatcctgaagatgctggacaagaaccccgagaccagaatcggcgtgcccgacatcaagctgcacccctgggtgaccaagaacggcgaggagcccctgcccagcgaggaggagcactgcagcgtggtggaggtgaccgaggaggaggtgaagaacagcgtgagactgatccccagctggaccaccgtgatcctggtgaagagcatgctgagaaagagaagcttcggcaaccccttcgagccccaggccagaagagaggagagaagcatgagcgcccccggcaacctgctggtgaaggagggcttcggcgagggcggcaagagccccgagctgcccggcgtgcaggaggacgaggccgccagctag

SEQ ID NO: 248632 - DNA, 1599 bp, Artificial Sequence
  derived and/or modified sequence
atgcagttcggcaagctgtggtgcggctgcagcggcgagttccccaccagactgagaagaagaacccccctgaccgaggccatggagggcggccccgccgtgtgctgccaggaccccagagccgagctggtggagagagtggccgccatcgacgtgacccacctggaggaggccgacggcggccccgagcccaccagaaacggcgtggaccccccccccagagccagagccgccagcgtgatccccggcagcaccagcagactgctgcccgccagacccagcctgagcgccagaaagctgagcctgcaggagagacccgccggcagctacctggaggcccaggccggcccctacgccaccggccccgccagccacatcagccccagagcctggagaagacccaccatcgagagccaccacgtggccatcagcgacgccgaggactgcgtgcagctgaaccagtacaagctgcagagcgagatcggcaagggcgcctacggcgtggtgagactggcctacaacgagagcgaggacagacactacgccatgaaggtgctgagcaagaagaagctgctgaagcagtacggcttccccagaagacccccccccagaggcagccaggccgcccagggcggccccgccaagcagctgctgcccctggagagagtgtaccaggagatcgccatcctgaagaagctggaccacgtgaacgtggtgaagctgatcgaggtgctggacgaccccgccgaggacaacctgtacctggtgttcgacctgctgagaaagggccccgtgatggaggtgccctgcgacaagcccttcagcgaggagcaggccagactgtacctgagagacgtgatcctgggcctggagtacctgcactgccagaagatcgtgcacagagacatcaagcccagcaacctgctgctgggcgacgacggccacgtgaagatcgccgacttcggcgtgagcaaccagttcgagggcaacgacgcccagctgagcagcaccgccggcacccccgccttcatggcccccgaggccatcagcgacagcggccagagcttcagcggcaaggccctggacgtgtgggccaccggcgtgaccctgtactgcttcgtgtacggcaagtgccccttcatcgacgacttcatcctggccctgcacagaaagatcaagaacgagcccgtggtgttccccgaggagcccgagatcagcgaggagctgaaggacctgatcctgaagatgctggacaagaaccccgagaccagaatcggcgtgcccgacatcaagctgcacccctgggtgaccaagaacggcgaggagcccctgcccagcgaggaggagcactgcagcgtggtggaggtgaccgaggaggaggtgaagaacagcgtgagactgatccccagctggaccaccgtgatcctggtgaagagcatgctgagaaagagaagcttcggcaaccccttcgagccccaggccagaagagaggagagaagcatgagcgcccccggcaacctgctggtgaaggagggcttcggcgagggcggcaagagccccgagctgcccggcgtgcaggaggacgaggccgccagctag

SEQ ID NO: 248633 - protein, 504 aa, Artificial Sequence
  derived and/or modified sequence
MKSLSLLLAVALGLATAVSAGPAVIECWFVEDASGKGLAKRPGALLLRQGPGEPPPRPDLDPELYLSVHDPAGALQAAFRRYPRGAPAPHCEMSRFVPLPASAKWASGLTPAQNCPRALDGAWLMVSISSPVLSLSSLLRPQPEPQQEPVLITMATVVLTVLTHTPAPRVRLGQDALLDLSFAYMPPTSEAASSLAPGPPPFGLEWRRQHLGKGHLLLAATPGLNGQMPAAQEGAVAFAAWDDDEPWGPWTGNGTFWLPTVQPFQEGTYLATIHLPYLQGQVTLELAVYKPPKVSLMPATLARAAPGEAPPELLCLVSHFYPSGGLEVEWELRGGPGGRSQKAEGQRWLSALRHHSDGSVSLSGHLQPPPVTTEQHGARYACRIHHPSLPASGRSAEVTLEVAGLSGPSLEDSVGLFLSAFLLLGLFKALGWAAVYLSTCKDSKKVQCSTSLYLSLVTLSPHPISKPMEGGCWCGRQNLGLEFTLIWVKTWHYILTVGLFEHAT

SEQ ID NO: 248634 - protein, 504 aa, Artificial Sequence [sequence omitted]

SEQ ID NO: 248635 - DNA, 1515 bp, Artificial Sequence
  derived and/or modified sequence
atgaagagcctgagcctgctgctggccgtggccctgggcctggccaccgccgtgagcgccggccccgccgtgatcgagtgctggttcgtggaggacgccagcggcaagggcctggccaagagacccggcgccctgctgctgagacagggccccggcgagcccccccccagacccgacctggaccccgagctgtacctgagcgtgcacgaccccgccggcgccctgcaggccgccttcagaagataccccagaggcgcccccgccccccactgcgagatgagcagattcgtgcccctgcccgccagcgccaagtgggccagcggcctgacccccgcccagaactgccccagagccctggacggcgcctggctgatggtgagcatcagcagccccgtgctgagcctgagcagcctgctgagaccccagcccgagccccagcaggagcccgtgctgatcaccatggccaccgtggtgctgaccgtgctgacccacacccccgcccccagagtgagactgggccaggacgccctgctggacctgagcttcgcctacatgccccccaccagcgaggccgccagcagcctggcccccggccccccccccttcggcctggagtggagaagacagcacctgggcaagggccacctgctgctggccgccacccccggcctgaacggccagatgcccgccgcccaggagggcgccgtggccttcgccgcctgggacgacgacgagccctggggcccctggaccggcaacggcaccttctggctgcccaccgtgcagcccttccaggagggcacctacctggccaccatccacctgccctacctgcagggccaggtgaccctggagctggccgtgtacaagccccccaaggtgagcctgatgcccgccaccctggccagagccgcccccggcgaggccccccccgagctgctgtgcctggtgagccacttctaccccagcggcggcctggaggtggagtgggagctgagaggcggccccggcggcagaagccagaaggccgagggccagagatggctgagcgccctgagacaccacagcgacggcagcgtgagcctgagcggccacctgcagcccccccccgtgaccaccgagcagcacggcgccagatacgcctgcagaatccaccaccccagcctgcccgccagcggcagaagcgccgaggtgaccctggaggtggccggcctgagcggccccagcctggaggacagcgtgggcctgttcctgagcgccttcctgctgctgggcctgttcaaggccctgggctgggccgccgtgtacctgagcacctgcaaggacagcaagaaggtgcagtgcagcaccagcctgtacctgagcctggtgaccctgagcccccaccccatcagcaagcccatggagggcggctgctggtgcggcagacagaacctgggcctggagttcaccctgatctgggtgaagacctggcactacatcctgaccgtgggcctgttcgagcacgccacctag

SEQ ID NO: 248636 - DNA, 1515 bp, Artificial Sequence
  derived and/or modified sequence
atgaagagcctgagcctgctgctggccgtggccctgggcctggccaccgccgtgagcgccggccccgccgtgatcgagtgctggttcgtggaggacgccagcggcaagggcctggccaagagacccggcgccctgctgctgagacagggccccggcgagcccccccccagacccgacctggaccccgagctgtacctgagcgtgcacgaccccgccggcgccctgcaggccgccttcagaagataccccagaggcgcccccgccccccactgcgagatgagcagattcgtgcccctgcccgccagcgccaagtgggccagcggcctgacccccgcccagaactgccccagagccctggacggcgcctggctgatggtgagcatcagcagccccgtgctgagcctgagcagcctgctgagaccccagcccgagccccagcaggagcccgtgctgatcaccatggccaccgtggtgctgaccgtgctgacccacacccccgcccccagagtgagactgggccaggacgccctgctggacctgagcttcgcctacatgccccccaccagcgaggccgccagcagcctggcccccggccccccccccttcggcctggagtggagaagacagcacctgggcaagggccacctgctgctggccgccacccccggcctgaacggccagatgcccgccgcccaggagggcgccgtggccttcgccgcctgggacgacgacgagccctggggcccctggaccggcaacggcaccttctggctgcccagagtgcagcccttccaggagggcacctacctggccaccatccacctgccctacctgcagggccaggtgaccctggagctggccgtgtacaagccccccaaggtgagcctgatgcccgccaccctggccagagccgcccccggcgaggccccccccgagctgctgtgcctggtgagccacttctaccccagcggcggcctggaggtggagtgggagctgagaggcggccccggcggcagaagccagaaggccgagggccagagatggctgagcgccctgagacaccacagcgacggcagcgtgagcctgagcggccacctgcagcccccccccgtgaccaccgagcagcacggcgccagatacgcctgcagaatccaccaccccagcctgcccgccagcggcagaagcgccgaggtgaccctggaggtggccggcctgagcggccccagcctggaggacagcgtgggcctgttcctgagcgccttcctgctgctgggcctgttcaaggccctgggctgggccgccgtgtacctgagcacctgcaaggacagcaagaaggtgcagtgcagcaccagcctgtacctgagcctggtgaccctgagcccccaccccatcagcaagcccatggagggcggctgctggtgcggcagacagaacctgggcctggagttcaccctgatctgggtgaagacctggcactacatcctgaccgtgggcctgttcgagcacgccacctag

SEQ ID NO: 248637 - DNA, 1515 bp, Artificial Sequence
  derived and/or modified sequence
atgaagtcactgtccctcctgctcgctgtggcactgggtctggcaacggccgtctcggctggcccagccgtcatcgagtgctggtttgttgaggacgcctcaggtaaaggattggctaaacgaccaggagccctgctgctgcgacagggccctggcgagcctccccctagacccgacctggaccccgaactctacctgagtgtgcatgaccctgccggtgccttgcaggcagccttcaggcgctaccctcggggagcaccagccccccactgcgagatgtctcggttcgtgccacttcccgcatcagccaagtgggcctccggccttacaccagcacagaattgtcccagggctctcgacggggcgtggctgatggttagtatttcttccccggttctgtcactgtcctctctgctccgaccccagcccgaaccccagcaagaacctgtgctcattaccatggcaacagtggtattgaccgttctgacacatacgcccgccccaagagtgagactgggccaggatgccctgcttgatttatctttcgcctatatgccccccacttcggaagctgcctcgagcctcgccccaggacctcctccttttggcctggaatggagacgccagcatttggggaagggccacttactcctggccgccaccccaggactgaacgggcagatgccagcagcccaggagggagcagtagcatttgctgcctgggacgatgacgagccttggggaccttggacaggaaacggcacattctggttacccacagtacagccctttcaggaaggtacgtacctcgccactatacacctgccttaccttcaggggcaggtgaccttggagttagccgtgtacaagcccccgaaagtgtcgctcatgcctgccaccctcgctagagctgctcctggagaggctcccccggaactgctatgtcttgtgtcgcacttttatcccagtggtggacttgaggtcgagtgggagctgcgcggcgggcccggcggacggtctcaaaaggcagaagggcagcgctggcttagcgccctgcgccatcatagtgacggctctgtcagtcttagcggccacctgcagcccccgcccgttactaccgaacagcacggcgcccggtatgcctgccgcatccatcatccgagcctacccgcctccggaagaagcgccgaagtaaccctggaggtggccggcctgagcggaccctccctggaggattccgtcgggttgttcctcagcgcctttctgcttcttggcttgttcaaagcactgggctgggcagcagtgtatctctctacctgcaaggattccaagaaggtgcagtgttctaccagtctgtatctgtcgctggtcactttgtccccacatccgatctcaaagccaatggagggcgggtgctggtgcggaagacagaatctgggcctagagtttacactgatctgggtgaaaacatggcactatattttgactgtgggtctgtttgaacacgcgacttag

SEQ ID NO: 248638 - DNA, 1515 bp, Artificial Sequence
  derived and/or modified sequence
atgaagtcactgtctctgctactggccgtggctttgggcctggccacggcagtgtccgctggtcctgcggtgattgaatgttggttcgtggaggatgcttcaggcaaggggctcgcgaaaaggccaggagctctcctacttaggcagggcccaggcgagccaccgcctagacctgatttggacccagagttatatctgtccgttcatgaccctgccggcgctcttcaagccgccttccggagatatcccaggggagcccccgccccccactgtgaaatgtctaggttcgtccctctaccagccagcgcgaagtgggcctctggattgacgcctgcacaaaactgtccacgcgcgcttgacggcgcgtggctgatggtatcaatcagttccccagtgctgtccctgtccagtctgctgcgcccacagcccgaaccgcaacaggagcctgtgctgatcacaatggccactgtggtgctgactgtgctgacacatacgcccgctcccagagtcagactggggcaggacgctttattggatctctcgttcgcatacatgcctcctacttccgaagctgctagcagtctggcaccaggccctccgccatttggtttggaatggaggcggcagcacctaggcaaagggcatctactccttgccgctacacccgggctgaacgggcagatgccggctgcgcaagaaggagccgtcgcctttgccgcctgggacgatgacgaaccctggggcccatggacagggaacgggacattctggctgccgcgggtacagcctttccaggagggaacgtacctggctaccattcatctcccctacctgcaaggacaagtgaccttggagctggctgtctacaagcctcctaaagtgtccctcatgcccgctacactggcccgcgccgccccaggtgaggcaccaccagaattgctctgtctcgtctcccacttttacccaagcggagggctcgaggtcgagtgggagctgcggggaggtccaggaggccgcagccagaaagctgagggtcagagatggctgtccgccctgcggcatcacagtgatgggtcagtgagcctgagcggccacctacagcctccaccagttacaaccgagcagcacggggctcggtatgcatgcagaatccaccatccctcgcttcctgcctctggccggagcgccgaggtgacactcgaggtggcaggcctgtccgggccgtctctcgaagacagcgtcggcctctttctatccgccttcctactcctgggcttatttaaggccctgggttgggcggccgtttatctgagcacttgcaaagatagcaaaaaggtacaatgctcaacgagcctgtatctctctcttgtgaccctatctccccacccaatcagcaagcccatggaaggcggttgttggtgcggcagacagaatctgggactggaatttaccctcatttgggttaagacctggcattacattctaacggtagggctgtttgaacacgctacatag

SEQ ID NO: 248639 - DNA, 1515 bp, Artificial Sequence
  derived and/or modified sequence
atgaagagcctgagcttattgttggcagtggcccttggacttgcgaccgcggtgagtgcaggacctgccgtaattgagtgctggtttgtcgaggacgcctcagggaagggacttgctaaacggcccggcgccctgctgctcagacaaggcccaggcgagcccccacccagacccgatttagaccctgagctctacttgtctgtccacgatccggctggtgctcttcaggccgctttcagaagatatccccggggagcgcctgccccccattgcgaaatgtcgagattcgtgcccttacccgcgagcgccaaatgggcaagtggactcacacccgcccagaactgccctcgtgcccttgatggagcatggctaatggtgagcatttctagcccagtcctcagtctctcctctctgcttcgcccacagccggaaccccagcaggagccggtccttatcacaatggcgactgtagtgctgacggtgctcactcatacccccgcgccacgggtgcggctgggccaagacgccctcttggatctcagctttgcgtatatgcctccaacctccgaagccgccagcagtctcgcgccaggcccacccccgtttggcctggagtggaggcgccagcacttagggaagggacacctgctgctcgccgccaccccaggcctgaatgggcagatgcctgccgctcaggagggcgcagtggcttttgcagcctgggatgacgacgagccttggggcccctggaccgggaatgggaccttctggctgccaagggtgcagccgtttcaggagggaacatacctggccactattcatctaccctatctgcaaggccaagtaaccttggaactggctgtgtataagccacccaaggtgtccctgatgccggctacattggcgagagcagccccaggagaggctccacccgaactgctttgtctcgtgtctcatttttatccctctgggggattggaagttgagtgggagctgaggggggggcccggtggcagaagccaaaaagccgaaggtcagagatggctgagcgctcttagacaccactccgacggctctgtgtccctgtccggccatctgcaacccccgcctgtgactactgagcagcatggagccaggtatgcgtgcagaattcatcacccgagtctgcccgcgtcagggcgttcggcagaggtcaccctagaggtcgctgggctgagtggaccaagcctggaagattccgtgggattgtttctgagcgctttcctcctgttgggcctcttcaaggccctcggatgggccgcagtgtatctgtctacatgcaaagacagcaaaaaagttcagtgcagcacctcgctgtacttgagtttagtaaccctctcgccgcatcccattagtaaacctatggagggaggctgctggtgtgggaggcagaacctgggactggagtttacccttatatgggtcaaaacgtggcactacatactgaccgtcggcctgttcgagcacgccacctag

SEQ ID NO: 248640 - DNA, 1515 bp, Artificial Sequence
  derived and/or modified sequence
atgaagtcgctctcactgttattagccgtggccctggggctggcaactgctgtgtccgcgggacccgccgttatcgagtgctggttcgtcgaagatgcttccggcaaaggccttgcaaaacgaccaggggcgctactcctcagacagggtcccggggaaccccccccacggcctgacctggatcccgaactgtacttgtccgttcatgatccagctggggccctccaggccgccttccgccggtacccaagaggggctcccgctccacactgtgagatgagcaggtttgtcccccttccggcgagcgctaagtgggcatctggtttgaccccggcccagaactgccccagggctttggatggggcgtggctgatggtgtccattagttccccagtactttcgctctcgtccctgcttaggccgcagcccgaaccacagcaagagccggtactgattaccatggcaactgtcgttctgaccgtgctgacacatacccctgccccgcgggtccggttggggcaagatgccctgcttgacctgtctttcgcctacatgccgcctacctccgaggctgcctctagtctcgcacccgggcctccacctttcggattggagtggcgaaggcaacatctcgggaagggtcatttgctgttggccgctacccctggccttaacggtcagatgcccgctgctcaggaaggcgctgtcgctttcgccgcttgggatgatgacgagccatggggcccctggaccggtaatgggactttttggttgcctactgtgcagccattccaggagggcacctacttagctacaatccatctaccctatttacaaggccaggttactctggagctggccgtgtataaaccccccaaagtgtccttgatgccagccacactggctagagctgctccaggggaggccccacccgagctgctgtgtctagtgtcacacttctaccctagtggaggactggaagtggaatgggaactgagggggggcccaggtggccgcagccagaaagcggaaggacagcgctggctcagcgcactccgacatcacagcgatgggagcgtgtcattaagtggccatctgcagccacctcctgtcacgactgagcagcacggggccaggtacgcttgccggatccaccacccgagtctgccggcttcaggcagaagcgctgaggtaacactggaagtggctggtctttctggaccctcactggaagattccgttggcttgttcttgagcgctttcttacttttaggcctgtttaaagctcttggctgggcagcagtttacttgtctacatgtaaggatagcaagaaggtccagtgttcgacaagtctgtatttgagccttgttacgctgtccccccaccctatttccaagccgatggaagggggttgttggtgcgggcggcagaacctggggttggagttcactctcatttgggtgaaaacatggcactacattttaactgtgggcttatttgagcacgccacctag

SEQ ID NO: 248641 - DNA, 1515 bp, Artificial Sequence
  derived and/or modified sequence
atgaaaagccttagcctcctgctggcggtagctctaggactggcgaccgcagtgtcagctgggcctgccgtgatcgaatgttggttcgtagaggacgcatctggaaagggactggctaaacgccccggagcactgttgttgcggcagggacccggcgagccaccccctagaccggacttggatcctgaactctatctttctgtccacgatcccgccggagcgctccaggccgctttccgcagatatcccaggggggcccccgcgccccactgtgagatgtctcgttttgtgccactgcctgcgagcgccaaatgggctagcggtctcactccggcccagaactgtcctagggctctggacggggcatggctgatggtgagtatatcttcaccagtactgagcttatcatctttgctccgtcctcaacccgagccacagcaggaaccggtgttaattacaatggctacggtggtgttgacagtactgacacataccccggcacctagagtgcggctgggccaggacgcactcctggatctaagctttgcttacatgccacccacaagtgaagccgcctctagccttgctcccggcccgccacctttcggccttgaatggcgacggcagcacctgggaaaaggacaccttctactggccgcgactccaggactgaatggtcagatgcccgctgcccaggaaggtgcggttgcttttgccgcctgggacgatgacgagccatggggcccatggacagggaacggcactttttggctacctagagtgcagccctttcaggagggaacgtacctcgccacaatacacctcccttacctgcagggccaggtgactctagagctggcagtgtacaaaccgcccaaggtgtcccttatgccggctaccctggcacgggccgcacctggggaagccccccctgagctcctttgccttgtctcccatttctatccatccggtggtctcgaggttgaatgggagctgcggggaggccccggtgggcggagtcagaaagctgaagggcaaaggtggctgtcagcactgcgccatcatagcgatggcagtgtgagtctgtctgggcaccttcagccccctcctgtcacgactgagcagcacggggctcggtacgcttgccgcatacatcacccctccctgcctgcttcggggagatccgcggaagtcacgctcgaggtagcgggcttatctgggccctctctggaagactccgtggggctgtttctgtctgccttcctcttacttggtctgtttaaggcattggggtgggctgccgtgtaccttagcacatgtaaagatagtaagaaagtgcagtgctctacttcattgtatctgagccttgtgaccctgtctccccaccctatctccaaacccatggagggggggtgttggtgcggccggcagaacctggggttggagtttacactaatttgggtcaagacatggcattatatccttacagtcggtctattcgaacatgccacctag

SEQ ID NO: 248642 - DNA, 1515 bp, Artificial Sequence
  derived and/or modified sequence
atgaagagcctgagcctgctgctggccgtggccctgggcctggccacagctgtgtctgctggccctgctgtgattgagtgctggtttgtggaggatgccagcggcaagggcctggccaagaggcctggggccctgctgctgcggcagggccctggagagcccccacccaggccagacctggaccctgagctgtacctgtctgtgcatgaccctgctggggccctgcaggccgccttccgccgctaccccaggggggccccagccccccactgtgagatgagcagatttgtgcccctgcctgccagcgccaagtgggccagcggcctgaccccagcccagaactgcccccgggccctggatggagcctggctgatggtgtccatcagcagccctgtgctgagcctgagcagcctgctgcggccccagcctgagccccagcaggagcctgtgctgatcaccatggccaccgtggtgctgactgtgctgacccacaccccagccccccgggtgcggctgggccaggatgccctgctggacctgagctttgcctacatgccacccaccagcgaggccgccagcagcctggcccctggccccccacccttcggcctggagtggaggcggcagcacctgggcaagggccacctgctgctggccgccaccccaggcctgaatggccagatgcctgctgcccaggagggcgctgtggcctttgctgcctgggatgatgatgagccctggggcccctggacaggaaatggcaccttctggctgcccaccgtgcagcccttccaggagggcacctacctggccaccatccacctgccctacctgcagggccaggtgaccctggagctggccgtgtacaagccacccaaggtgtccctgatgcctgccaccctggcccgggccgcccctggagaggcccctcctgagctgctgtgcctggtgagccacttctaccccagcggcggcctggaggtggagtgggagctgcggggcggccctgggggccgcagccagaaggccgagggccagcgctggctgagcgccctgcggcaccacagtgatggctctgtgtccctgagcggccacctgcagcccccacctgtgaccacagagcagcacggggcccgctatgcctgccgcatccaccaccccagcctgcctgccagcggccgctctgctgaggtgaccctggaggtggccggcctgagcggccccagcctggaggacagcgtgggcctcttcctgagcgccttcctgctgctgggcctcttcaaggccctgggctgggccgctgtgtacctgagcacctgcaaggacagcaagaaggtgcagtgcagcaccagcctgtacctgagcctggtgaccctgagcccccaccccatcagcaagcccatggagggcggctgctggtgtggccggcagaacctgggcctggagttcaccctcatctgggtgaagacctggcactacatcctgactgtgggcctgtttgagcacgccacctag

SEQ ID NO: 248643 - DNA, 1515 bp, Artificial Sequence
  derived and/or modified sequence
atgaagagcctgagcctgctgctggccgtggccctgggcctggccacagctgtgtctgctggccctgctgtgattgagtgctggtttgtggaggatgccagcggcaagggcctggccaagaggcctggggccctgctgctgcggcagggccctggagagcccccacccaggccagacctggaccctgagctgtacctgtctgtgcatgaccctgctggggccctgcaggccgccttccgccgctaccccaggggggccccagccccccactgtgagatgagcagatttgtgcccctgcctgccagcgccaagtgggccagcggcctgaccccagcccagaactgcccccgggccctggatggagcctggctgatggtgtccatcagcagccctgtgctgagcctgagcagcctgctgcggccccagcctgagccccagcaggagcctgtgctgatcaccatggccaccgtggtgctgactgtgctgacccacaccccagccccccgggtgcggctgggccaggatgccctgctggacctgagctttgcctacatgccacccaccagcgaggccgccagcagcctggcccctggccccccacccttcggcctggagtggaggcggcagcacctgggcaagggccacctgctgctggccgccaccccaggcctgaatggccagatgcctgctgcccaggagggcgctgtggcctttgctgcctgggatgatgatgagccctggggcccctggacaggaaatggcaccttctggctgccccgggtgcagcccttccaggagggcacctacctggccaccatccacctgccctacctgcagggccaggtgaccctggagctggccgtgtacaagccacccaaggtgtccctgatgcctgccaccctggcccgggccgcccctggagaggcccctcctgagctgctgtgcctggtgagccacttctaccccagcggcggcctggaggtggagtgggagctgcggggcggccctgggggccgcagccagaaggccgagggccagcgctggctgagcgccctgcggcaccacagtgatggctctgtgtccctgagcggccacctgcagcccccacctgtgaccacagagcagcacggggcccgctatgcctgccgcatccaccaccccagcctgcctgccagcggccgctctgctgaggtgaccctggaggtggccggcctgagcggccccagcctggaggacagcgtgggcctcttcctgagcgccttcctgctgctgggcctcttcaaggccctgggctgggccgctgtgtacctgagcacctgcaaggacagcaagaaggtgcagtgcagcaccagcctgtacctgagcctggtgaccctgagcccccaccccatcagcaagcccatggagggcggctgctggtgtggccggcagaacctgggcctggagttcaccctcatctgggtgaagacctggcactacatcctgactgtgggcctgtttgagcacgccacctag

SEQ ID NO: 248644 - DNA, 1515 bp, Artificial Sequence
  derived and/or modified sequence
atgaagagcctgagcctgctgctggccgtggccctgggcctggccacagctgtgtcagcggggccggcggtgattgagtgctggtttgtcgaggacgcaagtggtaagggattggctaagcggcccggagccctcttgctgcgacaagggcccggggagcccccacctcgcccagatctggatcccgagctgtacctgtcagtccacgaccccgccggagctttacaggcagccttcagaagatatcctaggggcgcccccgcaccgcactgcgaaatgtccaggtttgtcccattacctgcctccgccaagtgggcaagtggactgacccccgcccaaaactgtccccgcgcactggacggggcttggctgatggtgagcattagttcccctgtgctgtcactaagtagcctgctgagaccacagccagaaccgcagcaggagcctgtcctgattaccatggcgactgttgttctgaccgtcctgacgcatacacccgccccccgagtgcgccttggacaagatgccctgttagatctaagttttgcgtatatgccaccaaccagcgaagccgctagctctttagccccaggcccccccccgtttggccttgagtggcgcaggcagcacctcgggaaggggcatctattactcgccgccacgccgggcctgaatggtcaaatgccagctgctcaagagggtgcagtggcctttgcagcctgggacgacgacgaaccatggggaccttggaccggtaacggaaccttctggctcccgactgtacaaccattccaagaggggacatacctcgccactatccacttgccatatctccagggacaagtcaccctggaactcgcagtgtataaaccacccaaagtgtctctaatgcccgctacactcgcacgggctgcaccaggagaggccccccctgaattgctgtgcctcgttagtcacttctacccttcagggggcctggaagtggaatgggaactgaggggcggtccaggggggcgctcccaaaaagccgagggacagcggtggctgtcggctctgaggcaccactcagacggttccgtgagcctgtccggacacctacaaccgccccctgtgaccaccgaacagcatggagctcggtatgcctgtaggatacatcacccatccctccctgccagtggtcgatccgcggaggtgacactcgaggtggcgggtctctctggccccagcctcgaggatagtgtgggattgtttctaagcgcattcctgctactcggcctattcaaagcgctgggatgggccgcggtctatctctcaacttgcaaggactccaaaaaggtgcagtgctccacaagcctctacctgagcctggtgaccttgtccccacatcccatctccaaaccgatggaaggtggctgctggtgcgggagacagaatctgggcctggaattcaccctaatctgggtaaagacttggcactatatactgacagtgggactgttcgaacacgctacttag

SEQ ID NO: 248645 - DNA, 1515 bp, Artificial Sequence
  derived and/or modified sequence
atgaagagcctgagcctgctgctggccgtggccctgggcctggccaccgcagtctctgcaggtcctgcggtcatcgaatgttggtttgtggaggacgccagcggcaagggactggcgaagcgacccggagctttgcttctgaggcaaggtccgggggagccccccccccgccctgacctcgatcctgagctttatttgtccgtccacgatcccgccggcgctctccaggcagcttttcgaagatatcctcggggcgcacccgcacctcattgcgagatgagccgatttgtacccttgccagcttccgccaaatgggctagtggcctgacccccgcgcagaattgtcctcgcgcactggatggcgcatggctgatggtatccatcagctcacccgtactgtctctcagctccctccttcgaccacagcccgaaccccaacaagaacccgtgctgatcacaatggccacggtagtattaactgttctcacgcatacacctgcccccagagtcaggctgggccaggacgcgttgctggacctgagctttgcttatatgccaccaaccagcgaggcagcatctagtctggcaccaggacccccaccctttggactggaatggcggaggcagcacctaggaaaaggtcacttattgttggcggccacacctggcctgaatggacagatgccagcagctcaggagggcgctgtggcttttgcggcctgggacgatgatgagccctgggggccctggaccgggaacggcaccttctggctgccacgtgttcagccctttcaggaaggtacttatctggccaccatacacctcccatatttgcaaggtcaggtcaccctcgaacttgccgtgtacaagccccccaaggtctctttaatgccagccaccctcgctcgggccgctccaggggaagctccccccgaactgctgtgtttggtgtctcatttctatccctccggcggcctggaagttgaatgggaactgaggggaggccctggcggacggtctcaaaaggccgaaggacagaggtggctctctgcgctgcgtcaccattctgacggctcagtgagccttagcgggcacctgcagccccctccagtgactacagaacagcatggtgcgcggtacgcgtgtcgcatccaccacccaagccttcctgcgagcggtcgctcagctgaagttaccctcgaggtggcaggtctgagtggaccatccctcgaagactctgtgggcctgtttctctctgcgtttctgctgctggggctattcaaagctttaggatgggctgccgtgtatctctcgacatgcaaagacagcaagaaggtgcagtgctcaactagtctgtacttgtccctggtgacgctgagtccccaccccatctctaagcccatggaggggggctgctggtgtggccgtcagaatttgggtctggaattcactttgatttgggtcaaaacttggcactatatcttgaccgtgggcttatttgaacacgcaacttag

SEQ ID NO: 248646 - DNA, 1515 bp, Artificial Sequence
  derived and/or modified sequence
atgaagagcctgagcctgctgctggccgtggccctgggcctggccaccgcagtctccgccggtccggcagtgatcgagtgttggttcgtcgaagacgcgtcgggaaaaggattagcgaagagacccggtgcattgttgctccgccaaggacccggcgagccacctccccggcccgacttggacccggagctgtacctgtccgtgcacgacccagcaggagccctgcaggctgccttccggcgctacccaaggggtgcacccgctccacactgtgagatgtcacggttcgtgcctttgccagcctctgctaagtgggctagcggcctgacccccgcccaaaactgccccagggccctcgatggtgcatggcttatggttagtatctcaagcccagtactgagtctgtcgagtctgcttaggccccaacccgaacctcagcaggaacctgtcctgattactatggctacagtggtgctcactgtgctgacccacactcctgctcctcgcgtgagattggggcaggacgccttattagacttgagtttcgcatacatgcctccaacatctgaggcagcctcttctcttgctccaggacctcctccttttggcctagagtggagacggcagcacctgggcaaggggcacctgctcctggccgccactccaggcctgaatggacagatgcccgcagcccaagagggagcagtggcattcgccgcatgggacgacgacgagccttggggaccatggaccggaaatggtactttctggcttccacgggtacagcccttccaagaaggcacatatctagctactatccacctgccttacctacaagggcaggtcacactggaactggccgtttacaaacccccaaaggttagtctcatgcccgctacacttgcccgcgcagcaccaggagaagccccccccgagttgctgtgcctcgtgtcacatttctacccctcaggggggctggaggttgagtgggagctccgcgggggcccaggaggcagatctcagaaagccgagggccagcgatggctgtccgccctgcgccaccactctgacggctctgtctctttgagcggacatcttcagccaccgccagtcacgacggaacaacacggggcccgctacgcctgtaggatacatcatccctcactgcccgccagtgggagatctgcagaagtcactctggaagtcgctggactgtccggacccagcctggaggattcagtaggtctgtttttgagcgcctttctgctgctgggtttgttcaaagcattaggctgggccgcggtgtacctatccacctgcaaagactccaaaaaggttcaatgctccacaagtctgtacctgtcgttggtaacactgtcgccacaccctatctccaagcctatggaaggtggctgttggtgtggccggcagaatctcggtctggagttcacactcatttgggtgaagacatggcactatattcttaccgtgggattgtttgaacatgctacctag

SEQ ID NO: 248647 - DNA, 1515 bp, Artificial Sequence
  derived and/or modified sequence
atgaagagcctgagcctgctgctggccgtggccctgggcctggccaccgcagtgtctgctggtccggccgtgatcgaatgttggtttgtcgaggacgcgagtggcaaaggcctggccaaacgacctggggctctcttgcttcgccaaggtcccggagagcctcccccacggcctgatctggacccagaactctacctttcagttcacgatccagccggtgccctacaggccgcgttccgcaggtatccacgtggcgctcccgccccccactgcgaaatgagtcgttttgtgcccctacctgcgagtgccaaatgggccagtggtctcactcccgctcagaactgtccacgcgccctcgacggcgcctggttgatggtgtccataagttcccctgtcctgtcgctgtcatcactgttgagacctcagcctgagccccagcaggagcctgttctcattacaatggccacagtcgtgttaactgttctgacccacacccccgccccacgagtgaggctgggccaggacgcactcctggatcttagcttcgcttacatgccacccacctcagaggccgcgtcctccctggccccgggtcccccaccctttggcctggagtggcgccgacagcacctgggcaaaggacacctgctgctggctgcaacgcctggccttaatgggcagatgcctgccgcccaagaaggcgcagtggctttcgccgcttgggatgatgacgaaccttggggaccttggacgggcaatgggaccttttggctgcctactgtgcagccgttccaggaagggacctacttagccactatccatctgccctacctgcagggtcaggtaactctggaactcgctgtgtataaacccccaaaggtgtctctgatgccagcaaccctggccagggctgccccaggggaggccccccccgagctgctttgtttagtgtcccacttttaccccagtgggggactagaagtcgaatgggagctgaggggaggaccaggaggcaggtcacagaaggccgagggccaacgctggttgtccgccttacgccaccattctgatggtagtgtgtctttgtctggccatctgcagcctccacccgtgacaactgaacaacatggcgcaaggtacgcttgcaggattcatcatcccagcctccctgcctcggggagaagcgccgaagtaacccttgaggtggctggattgtccggccctagcttagaagatagcgtgggcttatttctgagcgcttttcttctgttaggattattcaaggctctgggctgggccgcagtgtatctgtctacctgtaaagactccaaaaaggtgcagtgcagcactagcctctacttgagcttggttaccctgtctcctcacccaatttccaaacctatggagggcggatgttggtgtgggaggcagaacctcggcttggaattcacactgatttgggtgaaaacatggcattacattctgactgtcggcctatttgagcacgcgacatag

SEQ ID NO: 248648 - DNA, 1515 bp, Artificial Sequence
  derived and/or modified sequence
atgaagagcctgagcctgctgctggccgtggccctgggcctggccactgctgtgagtgctggtcccgccgtgattgagtgctggtttgtggaagacgcatccggaaagggtctcgccaagcggccgggcgccctgctgctgaggcagggccctggtgaacctcctccaagacctgatttggaccccgaactctacttgtcagtccacgaccctgctggggctctacaggctgcttttcggaggtatccgcggggcgcaccagcgcctcattgcgagatgtccagatttgtacctctgccggcgagtgcgaagtgggctagcgggttaactcctgcacagaattgtccccgggccctcgatggagcttggctcatggtctcaatctcctctccagttctcagtcttagtagtctgctgcgaccgcagcctgaaccacaacaagaaccagtcttgattaccatggcaaccgtcgtcctgacagttctcacccatactcccgcccctcgcgtgaggttagggcaggatgcgttgttggacctgtccttcgcctacatgccacccacctccgaggcagcatcatccctagcccccggccccccgccttttggcctcgagtggcgcaggcagcatttgggcaaagggcatcttctgctcgcagctacaccaggactcaacggccaaatgcctgctgcacaggagggcgctgtggcttttgcagcatgggatgacgatgagccatggggaccatggaccgggaacggcactttttggctgccccgggtccaaccatttcaagagggcacatatcttgctacgattcatctgccgtacttacagggacaggtgacccttgaactcgctgtttacaagccacctaaggtatccctcatgcctgctacccttgcaagagcagcgcccggggaggcccccccggaactcctgtgcctcgtgtcacacttttacccctcagggggactcgaggtggagtgggagctccgcggcgggccggggggacgctctcaaaaggcagagggacaaagatggctctcggcgctgcggcatcattccgacggatcagtgtctttatccggacatttacagcctccaccagtgacgacggagcagcacggcgcccgctatgcctgcagaattcaccatcctagcttacctgcttcaggacggtctgccgaagtcacgctagaagtcgcgggactcagtgggcccagcctcgaggattcagtaggcctgtttctgtcagcgttcttgttgctggggctgttcaaggcactagggtgggctgccgtttatctgagtacttgtaaagattcaaagaaggtccaatgcagcacttcactgtacctcagcttagttactctgtcaccacacccaatctccaagcccatggaaggcggttgttggtgtggccgacagaacttaggtctggagttcaccctaatttgggtcaagacgtggcactacatcttaaccgtcggactgtttgaacatgccacctag

SEQ ID NO: 248649 - DNA, 1515 bp, Artificial Sequence
  derived and/or modified sequence
atgaaaagtttaagtttgctgctggcagtcgccttaggactggccaccgcagtgagcgccggaccagcagtgattgagtgttggttcgtggaggatgcgtctggaaaaggtttggcaaagaggccaggtgcgcttctcctgaggcagggccctggagagccccctcctaggcccgacctagacccggaactgtacctcagcgtccatgatcccgcaggggctttgcaggcagctttccgccgataccctcgcggagcgccagctcctcattgtgagatgagccgctttgtgcctcttcctgcatcggccaaatgggcctcaggcctgacccccgcacaaaattgtccacgagccctggacggtgcctggttgatggtttcaatttcctcacctgtcctgagtctctctagcctgttacgtccccagcccgaaccccaacaggaaccagttttgatcacaatggctacagttgtcttgactgtgctaacacatacgcccgctccacgtgtgcgcttgggacaagatgccctcctcgacttgagcttcgcctacatgcctcctacatcagaagccgctagtagtctcgctcccggaccaccgccatttgggttagagtggcgacgccagcaccttgggaagggacacttactgctcgccgctacccctggtctcaatggtcaaatgcctgccgcacaggagggggcagtggcatttgcagcctgggatgacgacgaaccatggggcccatggacaggaaacggaactttttggctgcctaccgtgcagcctttccaggagggaacttatctggctaccatccacttgccatacctacaaggtcaggtgacattagagttggcagtgtataagccgccaaaggtcagtctcatgcccgctacgctggcacgggcagcccctggggaagcccctccagaactgttgtgcctcgttagccacttctatcctagcggcggtctcgaagtcgagtgggagctaaggggcggacccggaggcaggagccagaaggcagaagggcagcggtggctgagtgccctccggcatcacagcgacggatcagttagcctcagcgggcatctccagcctcccccagtgacgacagagcagcacggggctcggtacgcctgcagaattcatcacccatccctgcctgccagtggcaggagcgccgaagtcactctcgaggttgctgggctctccggaccatcactcgaagactctgtaggcctgtttctctccgcattcctgctgctgggcttattcaaagcacttgggtgggcggctgtctatttgtccacttgcaaagacagtaaaaaggtgcaatgctccacatcactgtacctgtccctcgttacactcagcccccaccctatctcaaaaccaatggaaggcggatgctggtgtgggagacagaacctgggcctggagttcacactgatatgggttaagacttggcactatatcctcactgtcggcctattcgagcacgccacttag

SEQ ID NO: 248650 - DNA, 1515 bp, Artificial Sequence
  derived and/or modified sequence
atgaagtcattatctttgctcctagccgtcgcactggggctggcaaccgccgtttccgcaggtccagcggtgatcgagtgctggttcgtcgaggatgcaagcggcaaaggcctcgctaaacgacccggtgcccttctgttgagacagggacccggagaaccacctccacggccagatcttgaccctgaactgtatctatccgtccacgatcccgcaggcgcactacaggccgctttcaggagatatcctcgtggggctccagctccccactgcgaaatgtcccgcttcgtccccctgcctgctagcgctaaatgggccagtggactgaccccagcccagaactgtccgagggcactggacggtgcctggttgatggttagcattagttctcccgttctcagcctttcctccttattgcgccctcagcccgagccacagcaggagcctgtgctgatcaccatggctacggtagtactcaccgttttgactcatacccctgctccccgtgtgagactgggtcaggacgcacttttggacctgtctttcgcgtatatgccaccgacttccgaggcagcttctagcctagccccaggccctcccccattcggcctggagtggcgcaggcaacacctgggaaagggccatctgctattggcggctacacccggattgaacggtcagatgccagcagctcaggagggcgcagtggcttttgccgcttgggacgatgacgaaccttggggaccttggactgggaacggtactttctggttgccaagagtgcaacctttccaggagggcacttacctggcaactatccacctcccatatctgcagggccaggtgacactagagctggctgtctataaacccccaaaagtcagtcttatgcctgctactctggctcgggcagccccaggtgaagcccctcccgagcttctctgtctggtctcgcacttttacccttccggcggactggaggtcgaatgggagctcaggggcggacccggtggtagatctcagaaggccgagggacagagatggctatcagcactgcggcaccactcagatgggtccgtgtccctctccggtcatcttcagccgccaccggttaccaccgagcagcatggagctagatacgcatgtcgaattcaccatcctagcctaccagctagcgggaggtctgccgaagtcacgttagaggtcgctggattgagcgggccttcactggaagatagcgtggggctgttcttgtcagctttcctgttgctgggcctcttcaaggccctggggtgggcagccgtctatctcagtacatgtaaggattcaaagaaggtgcagtgcagcacttccctgtatttatcacttgttactctgagtcctcaccctattagcaagcctatggagggcggttgttggtgcggcagacaaaacttggggctggagttcaccttgatttgggtcaaaacgtggcattatatcctgactgtcgggctctttgagcatgctacctag

SEQ ID NO: 248651 - DNA, 1515 bp, Artificial Sequence
  derived and/or modified sequence
atgaagtctttatcattgttgttggcggttgccctgggccttgcgactgcagtcagcgccggacctgctgtgatcgagtgctggttcgtggaagacgcgagcggaaaaggcctggccaagagaccgggagctctccttctgcggcaaggtcctggtgaaccccctccgcgtccggaccttgatcctgagctgtatttaagtgtgcacgaccccgctggcgctctgcaggcggcttttaggcgctatcctaggggagcccctgcccctcattgcgaaatgtcccgtttcgttcccctccccgcttccgctaaatgggcttccggactgactccagcccagaattgtcccagggctctggacggagcatggctaatggtgagcatctcatctcccgtcctgtccctttcatccttgctgagaccccaacctgaaccccagcaggagccagtgctgatcaccatggcaacagtggtgttgacggttctgacccacacgcccgctccacgcgtgagactgggacaagatgctctgctggacctaagttttgcttacatgccgccaaccagcgaggctgcctcttcattggcacccggtcccccaccatttgggctggaatggcgcagacagcacctgggcaaagggcacctgctgctcgccgcaacccccggactgaatggacaaatgcccgctgcacaggaaggagctgtcgcttttgctgcttgggacgacgacgagccctggggaccctggaccggcaacggaacattctggctccccagggtgcaaccatttcaggaggggacatatctggccacaattcacctcccatatctccagggacaggtgacactggagctcgctgtatacaagccccctaaggttagtctgatgccagccacactcgcgagagccgcacctggggaggcccctcctgagctactctgtctggtgtcccatttttacccctcgggaggtctggaggtcgagtgggaactgcgcggtgggcctggaggcaggagccaaaaggctgaaggacagaggtggctcagtgcactgcgacaccactccgacggctccgtttccctcagcgggcacctccaacctccccctgtgacgaccgagcagcacggtgctcgttatgcttgccggatccaccacccctccctgccagccagtggcagatcagccgaagtgacgctggaagtcgccggtctgagtgggccttccctggaggatagcgtggggcttttcctgagtgcttttcttttgcttggtctgttcaaggctttgggttgggccgcagtgtacctgtccacttgtaaggattctaagaaagtccagtgcagcacctcactgtacctgtctttagttacactttcaccccacccaatctccaaaccaatggagggtggatgttggtgcgggagacagaacctgggcctggaatttaccctgatctgggtgaagacctggcattatattcttaccgtcggactcttcgaacacgctacttag

SEQ ID NO: 248652 - DNA, 1515 bp, Artificial Sequence
  derived and/or modified sequence
atgaagtctctctctctcttgcttgctgtcgccttagggctggccactgccgtgagtgcagggccagcagtgatcgagtgctggtttgttgaggatgcttcaggaaaaggcctggctaaaaggcccggagccctcctgttgaggcagggtccaggtgaaccacccccacgtccagatctggacccggagctgtatcttagcgttcacgatcctgccggagcacttcaggccgctttccgcaggtaccctaggggagcgcctgcaccacattgtgagatgagtcgatttgtgccactgccggctagcgcgaaatgggcttccggcctgacacctgcccaaaactgtccacgggcactggatggcgcttggcttatggtgagcatatcttcccctgtacttagcttaagctctttgctgagaccacaacctgaaccccagcaggaaccggtccttatcaccatggccacggtggttctaaccgtcctaacacacaccccagcaccaagagtccgccttggtcaagacgccctgctcgacctaagcttcgcatatatgccacccacatcggaggccgctagctctcttgcacccggaccacctcctttcggtctagaatggcggaggcagcatctcgggaaggggcaccttctgttggctgccacaccaggcctgaacggccagatgccagccgctcaggaaggcgcagtcgcattcgctgcctgggatgatgacgaaccctgggggccttggaccggaaacgggactttctggctgcccactgtgcagccgtttcaagagggcacttatctggctactatccatcttccatacctgcagggacaggtgaccctggaactggccgtgtataaacccccaaaggtgtctctcatgccagccactttagcgagggccgctcccggtgaggcaccaccagagctgctgtgcttagtgtcccacttctatcccagtggaggcctcgaagtggaatgggagctccggggaggccctggcggacgttcacagaaggccgaggggcagcgatggctctccgccctccgacaccacagcgatgggtcagtttccttatccggtcacctccaaccccctcccgtcacaactgaacaacatggggcaaggtatgcttgccgcatccaccatccttctttacctgcctccgggcgttctgctgaggtgactctagaagtggcaggcttgtccggcccttccttggaggatagcgtcggcctatttctcagtgcattcctgctgctgggcctgttcaaagctctgggatgggcagctgtgtatctgtcaacctgcaaggactcaaaaaaggtccaatgctccacaagcctgtatctcagcctggtgaccctttccccgcaccctattagtaaacccatggaaggaggttgctggtgtgggcgacagaacctgggactggagtttacactcatctgggttaaaacttggcattacatcctgactgtggggcttttcgaacatgcaacctag

SEQ ID NO: 248653 - DNA, 1515 bp, Artificial Sequence
  derived and/or modified sequence
atgaagtccctctctctcctcctcgccgtagctttggggcttgcaacagccgtgtctgccggtccagccgtgatcgagtgttggttcgtggaagacgcctctgggaaaggcctcgcgaagcgccctggcgctcttctgctcagacaggggccaggagaacctcccccaaggccagatctagaccccgagctttacctgtccgtccacgaccctgccggagccctgcaggccgcttttagacgatatccccgaggcgctcctgcccctcactgtgagatgagcaggttcgtcccgctccctgcttcagcgaagtgggcctctggactcaccccagcacagaactgccccagagcactggatggagcgtggcttatggtgagcatttcttcaccggtgctgtctcttagctctctgctaagaccgcagcccgagcctcagcaggaaccggttctgattacaatggccaccgttgttctgactgttttaacgcacacacccgctccccgagtgagactcggccaagacgccctgctcgacctttcattcgcttacatgcctccaacttccgaggccgcaagctccctcgccccaggaccacccccattcggtttagaatggcgtcgccagcacttgggaaaaggtcaccttctccttgcagctacccctggcctgaacggccagatgcccgctgcccaggaaggagccgtggcctttgctgcctgggatgacgacgaaccctggggcccatggactggaaatgggaccttctggctcccaagagttcagcccttccaggaagggacatatctagcaacaattcatctaccgtacctgcagggccaagttacgctagaacttgccgtctataagcctccaaaagtaagcttgatgcccgctaccctcgcgagggcagctccgggtgaagcccctccagaattgctgtgcctggtgtctcatttctacccaagcgggggactcgaagtggaatgggagttgaggggcggacccggtggtcggagtcaaaaggccgaaggccagaggtggctgtcagccctgcggcaccattcggacggaagtgtctccctgagcgggcacctgcagcctcccccagtgaccacggaacagcatggggctcggtacgcctgcagaatccaccaccccagcctccctgcctcaggcagaagcgcggaagtcaccttggaagtagctggactgtccgggccttctctcgaggatagcgtggggctcttcctcagcgcctttttacttctgggcctgttcaaggcattaggctgggctgccgtgtacctttcaacatgtaaggattccaagaaagtacaatgcagtaccagcctttacctgagcctggtgacgctctcgccccacccaatcagtaaacccatggaaggaggctgttggtgtggccgacaaaacctgggtctggaatttactctgatttgggtcaagacctggcattacattctgactgtgggtctattcgaacatgcaacatag

SEQ ID NO: 248654 - DNA, 1824 bp, Artificial Sequence
  derived and/or modified sequence
ctggagaggatctacccgggtccctgcctggccagtggggaaacaccggtcccccaggcaccttcacctaaccagagcggggatttccaccgcccctcatgccgccctttggaggaaagtgaaagtgaaaggaggaagaggaggcttcatggctgaggaggtcgcagcgccatgaagtccctgtctctgctcctcgctgtggctttgggcctggcgaccgccgtctcagcaggacccgcggtgatcgagtgttggttcgtggaggatgcgagcggaaagggcctggccaagagacccggtgcactgctgttgcgccagggaccgggggaaccgccgccccggccggacctcgaccctgagctctatctcagtgtacacgaccccgcgggcgccctccaggctgccttcaggcggtatccccggggcgcccccgcaccacactgcgagatgagccgcttcgtgcctctccccgcctctgcgaaatgggccagcggcctgacccccgcgcagaactgcccgcgggccctggatggggcttggctgatggtcagcatatccagcccagtcctcagcctctccagcctcttgcgaccacagccagagcctcagcaggagcctgttctcatcaccatggcaacagtggtactgactgtcctcacccacacccctgcccctcgagtgagactgggacaagatgctctgctggacttgagctttgcctacatgccccccacctccgaggccgcctcatctctggctccgggtccccctccctttgggctagagtggcgacgccagcacctgggtaagggacatctgctcctggctgcaactcctgggctgaatggccagatgccagcagcccaagaaggggccgtggcatttgctgcttgggatgatgatgagccatggggcccatggaccggaaatgggaccttctggctgcctacagttcaaccctttcaggagggcacctatctggccaccatacacctgccatacctgcaaggacaggtcaccctggagcttgctgtgtacaaaccccccaaagtgtccctgatgccagcaacccttgcacgggccgccccaggggaggcacccccggaattgctctgccttgtgtcccacttctacccttctgggggcctggaggtggagtgggaactccggggtggcccagggggccgctctcagaaggccgaggggcagaggtggctctcggccctgcgccaccattccgatggctctgtcagcctctctgggcacttgcagccgcccccagtcaccactgagcagcatggggcacgctatgcctgtcgaattcaccatcccagcctgcctgcctcggggcgcagcgctgaggtcaccctggaggtagcaggtctttcagggccctcccttgaggacagcgtaggccttttcctgtctgcctttcttctgcttgggctcttcaaggcactgggctgggctgctgtctacctgtccacctgcaaggattcaaagaaggtacagtgctccacctctctgtatctttcccttgtcactttatctcctcatcctatctcaaaacccatggagggaggctgctggtgtggtaggcagaacctaggcttggaattcacactgatctgggttaaaacctggcactatatcctaactgtaggactctttgagcatgctacttaatctatatgtttccttgggtgtagggattttaaaaagttacttaggcagtgctgtccaatagaaagataatgcaagccacatatgtaaatttaaatactctagtactcacattaaaaaaataagcagaaacaggtaaaa

SEQ ID NO: 248655 - DNA, 1824 bp, Artificial Sequence
  derived and/or modified sequence
ctggagaggatctacccgggtccctgcctggccagtggggaaacaccggtcccccaggcaccttcacctaaccagagcggggatttccaccgcccctcatgccgccctttggaggaaagtgaaagtgaaaggaggaagaggaggcttcatggctgaggaggtcgcagcgccatgaagtccctgtctctgctcctcgctgtggctttgggcctggcgaccgccgtctcagcaggacccgcggtgatcgagtgttggttcgtggaggatgcgagcggaaagggcctggccaagagacccggtgcactgctgttgcgccagggaccgggggaaccgccgccccggccggacctcgaccctgagctctatctcagtgtacacgaccccgcgggcgccctccaggctgccttcaggcggtatccccggggcgcccccgcaccacactgcgagatgagccgcttcgtgcctctccccgcctctgcgaaatgggccagcggcctgacccccgcgcagaactgcccgcgggccctggatggggcttggctgatggtcagcatatccagcccagtcctcagcctctccagcctcttgcgaccacagccagagcctcagcaggagcctgttctcatcaccatggcaacagtggtactgactgtcctcacccacacccctgcccctcgagtgagactgggacaagatgctctgctggacttgagctttgcctacatgccccccacctccgaggccgcctcatctctggctccgggtccccctccctttgggctagagtggcgacgccagcacctgggtaagggacatctgctcctggctgcaactcctgggctgaatggccagatgccagcagcccaagaaggggccgtggcatttgctgcttgggatgatgatgagccatggggcccatggaccggaaatgggaccttctggctgcctagagttcaaccctttcaggagggcacctatctggccaccatacacctgccatacctgcaaggacaggtcaccctggagcttgctgtgtacaaaccccccaaagtgtccctgatgccagcaacccttgcacgggccgccccaggggaggcacccccggaattgctctgccttgtgtcccacttctacccttctgggggcctggaggtggagtgggaactccggggtggcccagggggccgctctcagaaggccgaggggcagaggtggctctcggccctgcgccaccattccgatggctctgtcagcctctctgggcacttgcagccgcccccagtcaccactgagcagcatggggcacgctatgcctgtcgaattcaccatcccagcctgcctgcctcggggcgcagcgctgaggtcaccctggaggtagcaggtctttcagggccctcccttgaggacagcgtaggccttttcctgtctgcctttcttctgcttgggctcttcaaggcactgggctgggctgctgtctacctgtccacctgcaaggattcaaagaaggtacagtgctccacctctctgtatctttcccttgtcactttatctcctcatcctatctcaaaacccatggagggaggctgctggtgtggtaggcagaacctaggcttggaattcacactgatctgggttaaaacctggcactatatcctaactgtaggactctttgagcatgctacttaatctatatgtttccttgggtgtagggattttaaaaagttacttaggcagtgctgtccaatagaaagataatgcaagccacatatgtaaatttaaatactctagtactcacattaaaaaaataagcagaaacaggtaaaa

SEQ ID NO: 248656 - DNA, 1824 bp, Artificial Sequence
  derived and/or modified sequence
ctggagaggatctacccgggtccctgcctggccagtggggaaacaccggtcccccaggcaccttcacctaaccagagcggggatttccaccgcccctcatgccgccctttggaggaaagtgaaagtgaaaggaggaagaggaggctaaatggctgaggaggtcgcagcgccatgaagtccctgtctctgctcctcgctgtggctttgggcctggcgaccgccgtctcagcaggacccgcggtgatcgagtgttggttcgtggaggatgcgagcggaaagggcctggccaagagacccggtgcactgctgttgcgccagggaccgggggaaccgccgccccggccggacctcgaccctgagctctatctcagtgtacacgaccccgcgggcgccctccaggctgccttcaggcggtatccccggggcgcccccgcaccacactgcgagatgagccgcttcgtgcctctccccgcctctgcgaaatgggccagcggcctgacccccgcgcagaactgcccgcgggccctggatggggcttggctgatggtcagcatatccagcccagtcctcagcctctccagcctcttgcgaccacagccagagcctcagcaggagcctgttctcatcaccatggcaacagtggtactgactgtcctcacccacacccctgcccctcgagtgagactgggacaagatgctctgctggacttgagctttgcctacatgccccccacctccgaggccgcctcatctctggctccgggtccccctccctttgggctagagtggcgacgccagcacctgggtaagggacatctgctcctggctgcaactcctgggctgaatggccagatgccagcagcccaagaaggggccgtggcatttgctgcttgggatgatgatgagccatggggcccatggaccggaaatgggaccttctggctgcctagagttcaaccctttcaggagggcacctatctggccaccatacacctgccatacctgcaaggacaggtcaccctggagcttgctgtgtacaaaccccccaaagtgtccctgatgccagcaacccttgcacgggccgccccaggggaggcacccccggaattgctctgccttgtgtcccacttctacccttctgggggcctggaggtggagtgggaactccggggtggcccagggggccgctctcagaaggccgaggggcagaggtggctctcggccctgcgccaccattccgatggctctgtcagcctctctgggcacttgcagccgcccccagtcaccactgagcagcatggggcacgctatgcctgtcgaattcaccatcccagcctgcctgcctcggggcgcagcgctgaggtcaccctggaggtagcaggtctttcagggccctcccttgaggacagcgtaggccttttcctgtctgcctttcttctgcttgggctcttcaaggcactgggctgggctgctgtctacctgtccacctgcaaggattcaaagaaggtacagtgctccacctctctgtatctttcccttgtcactttatctcctcatcctatctcaaaacccatggagggaggctgctggtgtggtaggcagaacctaggcttggaattcacactgatctgggttaaaacctggcactatatcctaactgtaggactctttgagcatgctacttaatctatatgtttccttgggtgtagggattttaaaaagttacttaggcagtgctgtccaatagaaagataatgcaagccacatatgtaaatttaaatactctagtactcacattaaaaaaataagcagaaacaggtaaaa

SEQ ID NO: 248657 - DNA, 1888 bp, Artificial Sequence
  derived and/or modified sequence
ctggagaggatctacccgggtccctgcctggccagtggggaaacaccggtcccccaggcaccttcacctaaccagagcggggatttccaccgcccctcatgccgccctttggaggaaagtgaaagtgaaaggaggaagaggaggcttcatggctgaggaggtcgcagcgccatgaagtccctgtctctgctcctcgctgtggctttgggcctggcgaccgccgtctcagcaggacccgcggtgatcgagtgttggttcgtggaggatgcgagcggaaagggcctggccaagagacccggtgcactgctgttgcgccagggaccgggggaaccgccgccccggccggacctcgaccctgagctctatctcagtgtacacgaccccgcgggcgccctccaggctgccttcaggcggtatccccggggcgcccccgcaccacactgcgagatgagccgcttcgtgcctctccccgcctctgcgaaatgggccagcggcctgacccccgcgcagaactgcccgcgggccctggatggggcttggctgatggtcagcatatccagcccagtcctcagcctctccagcctcttgcgaccacagccagagcctcagcaggagcctgttctcatcaccatggcaacagtggtactgactgtcctcacccacacccctgcccctcgagtgagactgggacaagatgctctgctggacttgagctttgcctacatgccccccacctccgaggccgcctcatctctggctccgggtccccctccctttgggctagagtggcgacgccagcacctgggtaagggacatctgctcctggctgcaactcctgggctgaatggccagatgccagcagcccaagaaggggccgtggcatttgctgcttgggatgatgatgagccatggggcccatggaccggaaatgggaccttctggctgcctacagttcaaccctttcaggagggcacctatctggccaccatacacctgccatacctgcaaggacaggtcaccctggagcttgctgtgtacaaaccccccaaagtgtccctgatgccagcaacccttgcacgggccgccccaggggaggcacccccggaattgctctgccttgtgtcccacttctacccttctgggggcctggaggtggagtgggaactccggggtggcccagggggccgctctcagaaggccgaggggcagaggtggctctcggccctgcgccaccattccgatggctctgtcagcctctctgggcacttgcagccgcccccagtcaccactgagcagcatggggcacgctatgcctgtcgaattcaccatcccagcctgcctgcctcggggcgcagcgctgaggtcaccctggaggtagcaggtctttcagggccctcccttgaggacagcgtaggccttttcctgtctgcctttcttctgcttgggctcttcaaggcactgggctgggctgctgtctacctgtccacctgcaaggattcaaagaaggtacagtgctccacctctctgtatctttcccttgtcactttatctcctcatcctatctcaaaacccatggagggaggctgctggtgtggtaggcagaacctaggcttggaattcacactgatctgggttaaaacctggcactatatcctaactgtaggactctttgagcatgctacttaatctatatgtttccttgggtgtagggattttaaaaagttacttaggcagtgctgtccaatagaaagataatgcaagccacatatgtaaatttaaatactctagtactcacattaaaaaaataagcagaaacaggtaaaattaacttaataatataccttatttaatctaataattctggtcccttatctgaaatgcttgggtc

SEQ ID NO: 248658 - protein, 202 aa, Artificial Sequence
  derived and/or modified sequence
MKSLSLLLAVALGLATAVSAGPAVIECWFVEDASGKGLAKRPGALLLRQGPGEPPPRPDLDPELYLSVHVVLTVLTHTPAPRVRLGQDALLDLSFAYMPPTSEAASSLAPGPPPFGLEWRRQHLGKGHLLLAATPGLNGQMPAAQEGAVAFAAWDDDEPWGPWTGNGTFWLPRVQPFQEGTYLATIHLPYLQGQVTLELAVY

SEQ ID NO: 248659 - protein, 202 aa, Artificial Sequence
  derived and/or modified sequence
MKSLSLLLAVALGLATAVSAGPAVIECWFVEDASGKGLAKRPGALLLRQGPGEPPPRPDLDPELYLSVHVVLTVLTHTPAPRVRLGQDALLDLSFAYMPPTSEAASSLAPGPPPFGLEWRRQHLGKGHLLLAATPGLNGQMPAAQEGAVAFAAWDDDEPWGPWTGNGTFWLPTVQPFQEGTYLATIHLPYLQGQVTLELAVY

SEQ ID NO: 248660 - protein, 361 aa, Artificial Sequence
  derived and/or modified sequence
MKSLSLLLAVALGLATAVSAGPAVIECWFVEDASGKGLAKRPGALLLRQGPGEPPPRPDLDPELYLSVHVVLTVLTHTPAPRVRLGQDALLDLSFAYMPPTSEAASSLAPGPPPFGLEWRRQHLGKGHLLLAATPGLNGQMPAAQEGAVAFAAWDDDEPWGPWTGNGTFWLPTVQPFQEGTYLATIHLPYLQGQVTLELAVYKPPKVSLMPATLARAAPGEAPPELLCLVSHFYPSGGLEVEWELRGGPGGRSQKAEGQRWLSALRHHSDGSVSLSGHLQPPPVTTEQHGARYACRIHHPSLPASGRSAEVTLEVAGLSGPSLEDSVGLFLSAFLLLGLFKALGWAAVYLSTCKDSKKKAE

SEQ ID NO: 248661 - protein, 361 aa, Artificial Sequence
  derived and/or modified sequence
MKSLSLLLAVALGLATAVSAGPAVIECWFVEDASGKGLAKRPGALLLRQGPGEPPPRPDLDPELYLSVHVVLTVLTHTPAPRVRLGQDALLDLSFAYMPPTSEAASSLAPGPPPFGLEWRRQHLGKGHLLLAATPGLNGQMPAAQEGAVAFAAWDDDEPWGPWTGNGTFWLPRVQPFQEGTYLATIHLPYLQGQVTLELAVYKPPKVSLMPATLARAAPGEAPPELLCLVSHFYPSGGLEVEWELRGGPGGRSQKAEGQRWLSALRHHSDGSVSLSGHLQPPPVTTEQHGARYACRIHHPSLPASGRSAEVTLEVAGLSGPSLEDSVGLFLSAFLLLGLFKALGWAAVYLSTCKDSKKHAT

SEQ ID NO: 248662 - DNA, 609 bp, Artificial Sequence
  derived and/or modified sequence
atgaagagcctgagcctgctgctggccgtggccctgggcctggccaccgccgtgagcgccggccccgccgtgatcgagtgctggttcgtggaggacgccagcggcaagggcctggccaagagacccggcgccctgctgctgagacagggccccggcgagcccccccccagacccgacctggaccccgagctgtacctgagcgtgcacgtggtgctgaccgtgctgacccacacccccgcccccagagtgagactgggccaggacgccctgctggacctgagcttcgcctacatgccccccaccagcgaggccgccagcagcctggcccccggccccccccccttcggcctggagtggagaagacagcacctgggcaagggccacctgctgctggccgccacccccggcctgaacggccagatgcccgccgcccaggagggcgccgtggccttcgccgcctgggacgacgacgagccctggggcccctggaccggcaacggcaccttctggctgcccagagtgcagcccttccaggagggcacctacctggccaccatccacctgccctacctgcagggccaggtgaccctggagctggccgtgtactag

SEQ ID NO: 248663 - DNA, 609 bp, Artificial Sequence
  derived and/or modified sequence
atgaagagcctgagcctgctgctggccgtggccctgggcctggccaccgccgtgagcgccggccccgccgtgatcgagtgctggttcgtggaggacgccagcggcaagggcctggccaagagacccggcgccctgctgctgagacagggccccggcgagcccccccccagacccgacctggaccccgagctgtacctgagcgtgcacgtggtgctgaccgtgctgacccacacccccgcccccagagtgagactgggccaggacgccctgctggacctgagcttcgcctacatgccccccaccagcgaggccgccagcagcctggcccccggccccccccccttcggcctggagtggagaagacagcacctgggcaagggccacctgctgctggccgccacccccggcctgaacggccagatgcccgccgcccaggagggcgccgtggccttcgccgcctgggacgacgacgagccctggggcccctggaccggcaacggcaccttctggctgcccaccgtgcagcccttccaggagggcacctacctggccaccatccacctgccctacctgcagggccaggtgaccctggagctggccgtgtactag

SEQ ID NO: 248664 - DNA, 1086 bp, Artificial Sequence
  derived and/or modified sequence
atgaagagcctgagcctgctgctggccgtggccctgggcctggccaccgccgtgagcgccggccccgccgtgatcgagtgctggttcgtggaggacgccagcggcaagggcctggccaagagacccggcgccctgctgctgagacagggccccggcgagcccccccccagacccgacctggaccccgagctgtacctgagcgtgcacgtggtgctgaccgtgctgacccacacccccgcccccagagtgagactgggccaggacgccctgctggacctgagcttcgcctacatgccccccaccagcgaggccgccagcagcctggcccccggccccccccccttcggcctggagtggagaagacagcacctgggcaagggccacctgctgctggccgccacccccggcctgaacggccagatgcccgccgcccaggagggcgccgtggccttcgccgcctgggacgacgacgagccctggggcccctggaccggcaacggcaccttctggctgcccaccgtgcagcccttccaggagggcacctacctggccaccatccacctgccctacctgcagggccaggtgaccctggagctggccgtgtacaagccccccaaggtgagcctgatgcccgccaccctggccagagccgcccccggcgaggccccccccgagctgctgtgcctggtgagccacttctaccccagcggcggcctggaggtggagtgggagctgagaggcggccccggcggcagaagccagaaggccgagggccagagatggctgagcgccctgagacaccacagcgacggcagcgtgagcctgagcggccacctgcagcccccccccgtgaccaccgagcagcacggcgccagatacgcctgcagaatccaccaccccagcctgcccgccagcggcagaagcgccgaggtgaccctggaggtggccggcctgagcggccccagcctggaggacagcgtgggcctgttcctgagcgccttcctgctgctgggcctgttcaaggccctgggctgggccgccgtgtacctgagcacctgcaaggacagcaagaagaaggccgagtag

SEQ ID NO: 248665 - DNA, 1086 bp, Artificial Sequence
  derived and/or modified sequence
atgaagagcctgagcctgctgctggccgtggccctgggcctggccaccgccgtgagcgccggccccgccgtgatcgagtgctggttcgtggaggacgccagcggcaagggcctggccaagagacccggcgccctgctgctgagacagggccccggcgagcccccccccagacccgacctggaccccgagctgtacctgagcgtgcacgtggtgctgaccgtgctgacccacacccccgcccccagagtgagactgggccaggacgccctgctggacctgagcttcgcctacatgccccccaccagcgaggccgccagcagcctggcccccggccccccccccttcggcctggagtggagaagacagcacctgggcaagggccacctgctgctggccgccacccccggcctgaacggccagatgcccgccgcccaggagggcgccgtggccttcgccgcctgggacgacgacgagccctggggcccctggaccggcaacggcaccttctggctgcccagagtgcagcccttccaggagggcacctacctggccaccatccacctgccctacctgcagggccaggtgaccctggagctggccgtgtacaagccccccaaggtgagcctgatgcccgccaccctggccagagccgcccccggcgaggccccccccgagctgctgtgcctggtgagccacttctaccccagcggcggcctggaggtggagtgggagctgagaggcggccccggcggcagaagccagaaggccgagggccagagatggctgagcgccctgagacaccacagcgacggcagcgtgagcctgagcggccacctgcagcccccccccgtgaccaccgagcagcacggcgccagatacgcctgcagaatccaccaccccagcctgcccgccagcggcagaagcgccgaggtgaccctggaggtggccggcctgagcggccccagcctggaggacagcgtgggcctgttcctgagcgccttcctgctgctgggcctgttcaaggccctgggctgggccgccgtgtacctgagcacctgcaaggacagcaagaagcacgccacctag

SEQ ID NO: 248666 - DNA, 609 bp, Artificial Sequence
  derived and/or modified sequence
atgaagtcgctgagtctgcttcttgccgtggctctcgggttggccaccgctgtctcagccggaccagctgtcatcgagtgctggtttgtggaggacgcttcaggcaaggggcttgcaaagcgccccggcgctctgctgctgcgtcagggccccggggagccgcctccccgcccagatctcgatccggagctctacctgtcagtacacgtggttctcacagtcctgacccacacccctgctcccagagtccgacttggacaggatgcactgctcgacttaagctttgcctatatgcctccaaccagcgaggccgcctcctcacttgccccggggccacccccctttggccttgagtggaggagacaacatttgggcaagggacatctgttactggctgccactccgggcttgaatggacagatgcccgccgcccaggagggcgccgttgcctttgctgcgtgggatgacgacgagccttggggtccctggaccggtaatggcactttttggctgccacgagtccaacccttccaggagggcacttacctagccaccattcatctcccctaccttcaagggcaggttaccctggaactcgccgtctactag

SEQ ID NO: 248667 - DNA, 609 bp, Artificial Sequence
  derived and/or modified sequence
atgaagagcctatcactgcttttggccgtggcgctcggactcgcgactgccgtctctgcaggacccgccgtcattgagtgttggttcgttgaggacgcctccggcaaaggactggccaaacggcccggcgcgctgctgttgcggcagggcccaggtgagcccccgccaagacccgatctggatcccgagctttatttgagcgtccacgtcgtgctgaccgtactcactcatacacctgctcctcgcgtcaggctcggccaagatgcccttctggacctttccttcgcgtatatgcctccaactagcgaggctgccagcagtttggctcctggtccgccaccttttggactggaatggaggagacaacatctggggaaaggtcacctccttttggcggcaacccccggcctcaacggacaaatgcccgcggcacaggaaggcgccgttgcctttgctgcctgggatgacgacgaaccttggggcccttggaccggaaatggaacattctggctccccaccgtccaaccgttccaggagggaacctacctggctaccatccatctgccatatctgcagggacaagttaccctagaacttgccgtgtactag

SEQ ID NO: 248668 - DNA, 609 bp, Artificial Sequence
  derived and/or modified sequence
atgaagagtctgtcccttctgcttgctgtagctctggggcttgccacggctgtgagcgccggccctgccgtaattgaatgctggtttgtagaggatgcctcagggaaagggctcgccaagaggccgggagctctgctgttaagacaaggtcccggggagccccctcccaggccagacctagaccccgagctgtacttatccgttcacgtggtgctgactgtactaacacatacgcccgccccccgggtccgccttgggcaggacgccctccttgacctctcttttgcttatatgccaccaacctccgaagcagccagctccctcgctcctggacctcctccatttgggcttgagtggagaagacagcacctaggcaaaggacacttgctgctagccgccaccccaggcctgaacgggcagatgccggccgcacaagagggcgctgtggcctttgccgcctgggatgacgatgaaccttggggcccatggacaggcaatggaaccttttggttgccaagagttcagccatttcaggaagggacatacctggccacgattcatctcccgtacctacaaggccaggtgacgctggagctggccgtgtactag

SEQ ID NO: 248669 - DNA, 609 bp, Artificial Sequence
  derived and/or modified sequence
atgaagtctctgtcactgctgctggctgtggctctaggcctggccacagccgtcagcgcgggaccagcagtcatagagtgctggttcgtggaggatgcttccggaaaaggactggcaaagagacctggagcgcttctgcttcgccagggaccgggcgagcccccccccagacccgatctggatccagaactctatttgtccgttcacgtggttctgactgtcctcacccatacgccggcaccccgggtgcgactagggcaggacgctctcttagacctcagctttgcatatatgcccccaacatcagaggctgccagctcactggcacctgggcctcccccattcggtctggagtggaggaggcaacacttagggaaaggacatctgctgctggcagcgacaccaggactgaatggtcagatgcctgcggcacaggaaggggctgtcgccttcgcagcctgggatgatgacgaaccctggggcccatggaccgggaacggcacattctggctgcccagggtgcagccttttcaggaaggtacatatctcgcgaccattcacctgccctacctacaaggtcaggtgaccctggagctggccgtttattag

SEQ ID NO: 248670 - DNA, 1086 bp, Artificial Sequence
  derived and/or modified sequence
atgaagagcctgtcactgctcctagccgtggcgctgggtctcgctactgcagtgagcgctggcccagcagttatagaatgttggttcgtggaggatgctagtggcaagggattggctaaacggccaggagccctcctactacggcagggaccaggcgagccgcctccccgacctgatttggatccagagctttacttgtcagtgcacgttgtcctgactgtcttaacccacactccagcaccccgggtgaggctgggtcaggacgcgctactggacctgtcattcgcctacatgccgcctactagtgaggccgctagctctctcgctccaggccctcctccatttgggctggagtggaggagacaacacttgggcaaaggacacttgttactcgctgcgacgccaggcctgaatggtcagatgccagcggcacaggaaggcgccgtcgctttcgccgcctgggacgacgatgagccttgggggccatggactggtaacggcactttctggttacccaccgtacagccctttcaggagggcacttaccttgctaccattcacctgccttatctgcagggccaagtgacgctggagctcgccgtgtataagccacccaaggtctctctcatgcccgccaccctggctcgggccgctccaggggaggcacctccggagttgttgtgcctagtaagccacttttacccaagcgggggactagaggttgaatgggagctccgcggggggccaggcggaaggagccagaaggccgaggggcagagatggctctcagccctccgccatcattctgatgggtcagtgagccttagtggccatctgcaacctccacctgttacaactgaacagcatggggcccgttatgcctgcaggatccaccatcctagcctccccgcctctgggaggagcgcagaggtgacactggaggttgccgggctatctgggccttctctggaggacagcgtgggactgtttctctctgcctttctgcttctgggtcttttcaaggccctcggatgggctgccgtgtatctgtctacctgcaaggattctaagaagaaagctgagtag

SEQ ID NO: 248671 - DNA, 1086 bp, Artificial Sequence
  derived and/or modified sequence
atgaagtccctgtctcttctcctggccgttgccctggggctggctactgccgtgtctgccggacctgcagtcattgaatgttggtttgtcgaggacgcaagtggaaagggactggcaaagcgacctggggcgcttctgctgcgccaggggcctggcgaacctccccctaggccggatctagaccctgagttgtacctgtctgtgcatgtcgttctcacagtcctcactcataccccagccccacgagtgcgcttggggcaggacgcactgctggatctatcattcgcttacatgccgcccacctctgaggccgcatcatccctcgccccgggccctcctcccttcggcctagaatggcgtcgccaacacctgggtaaaggacacctcctgctggctgcgactcccgggcttaatggccaaatgcctgcagcgcaggagggggctgtcgcgttcgctgcgtgggatgatgacgagccttggggaccttggactggcaatggcactttctggctgcctagggtccagccttttcaagaagggacgtatctggccacaatccacctaccttacctccaggggcaggtgaccctggagcttgcggtgtacaagccacccaaagtcagcctgatgccggccactctggctcgagctgcacccggcgaagctcctccagagctcctctgcctggtcagccatttctatccgagtggaggcttggaggttgagtgggagctgcgcggaggccccgggggaagaagccagaaggcagagggccagaggtggctctccgcactgagacatcactccgacggatcagtgtccctgtctgggcatttgcagcccccgcctgtcactaccgaacagcatggggcccgatatgcgtgtcgtatccaccacccgagcttgcctgcctctggacggtctgcggaggtaactctggaagtggcggggctgagtgggccctccctggaggattctgtcgggctttttttatctgcattcctgttgcttggactattcaaagcgcttggatgggccgcagtatatctctccacttgcaaggatagcaagaagcatgctacctag

SEQ ID NO: 248672 - DNA, 1086 bp, Artificial Sequence
  derived and/or modified sequence
atgaaatccttgtcactcctgcttgccgtggccctcggacttgcaaccgccgtctccgccggcccagctgttatagaatgctggttcgtagaggatgcgtcagggaaaggtctggcaaaaagaccaggagctctgctgttaagacagggcccgggtgagccacctcctagaccagacctggacccagaactatatttgagcgtgcacgtagtcttaactgtccttacccatacacctgcacctcgagttaggctaggccaagatgctctcctcgacctgagtttcgcctatatgccccccacttcagaagccgcttcatctctcgcacccgggccacccccctttggattagagtggcgacggcaacatctcggaaagggccaccttttgcttgcagctacccctgggctgaacggccaaatgccggctgcccaggaaggtgcagtggccttcgctgcttgggacgatgatgaaccatggggcccatggactggaaatggtaccttctggctccccagagtccagccttttcaagaaggtacctatttagccaccatccacctgccatacctgcagggtcaagttactctggagctggcagtgtacaaacctcccaaggtctcgttgatgcctgcaactctcgccagagctgcacccggagaagctccacccgaattgctgtgcttggtttctcacttctacccttcaggcggactcgaagtggaatgggagttacgcggtggtcctggaggcaggtcacaaaaggccgaagggcagcgctggttgtctgctctccgtcatcactccgacggctccgtgagtctgagcgggcaccttcaaccacctcctgttactaccgaacaacatggcgcaaggtacgcatgtaggatccatcatccctccctgccggcatctggcaggtctgcagaggtaaccctggaggtcgccggcctgtcaggtccttcactggaagattctgtcggcctctttctatctgctttcttgttgttgggactctttaaagccctcggttgggctgccgtgtacctctctacatgcaaagactctaaaaagcatgcaacatag

SEQ ID NO: 248673 - DNA, 1086 bp, Artificial Sequence
  derived and/or modified sequence
atgaaatcattatcactgctgttagcggtagccttgggcctagccacagcagtttcagccggcccagccgtcatcgagtgctggtttgttgaggacgctagcggaaaagggctagcgaaaaggccgggggcactgctgctgaggcagggccctggagagccaccaccccggcccgatctggacccggagctgtacttgtccgttcatgtcgtgctgaccgtgttgacccacacgcctgcccccagagtccgactggggcaagatgccctgctcgacctctcttttgcctacatgccccccacttcagaagctgccagctcactcgctcctgggcctcccccctttggcttagagtggcggcgccagcacctgggtaagggccatctgctgctggcagccaccccaggattaaatggccagatgcccgccgcccaggagggtgccgtggccttcgcggcctgggatgacgacgagccatgggggccctggacaggcaatggaacgttttggctgcccacggtccagcccttccaagagggcacttatctcgccacaattcatctgccctacctgcagggtcaggtgactctggagttggctgtgtataaacctcccaaggtctcgctgatgccagcgacattggcaagagccgcccctggcgaggccccacctgagctcctctgtcttgtctcacacttctatccgtccggtggcttggaagtggaatgggaacttaggggaggccctggcggcaggtcccagaaggctgaggggcagagatggctctccgctctaaggcaccatagcgatgggtccgtgtctctgtcaggtcaccttcagccgccccccgtgacaaccgagcagcatggagctcgatatgcatgtcgaattcaccaccctagcctgcccgctagcggcagatccgcggaagtaaccctggaggtggccggattgagcggaccctcactggaggactctgtgggactgttcctgagcgcgtttctcctcctcggactcttcaaggctcttgggtgggccgctgtgtacctttcgacctgtaaagattctaaaaagaaggcagagtag

SEQ ID NO: 248674 - DNA, 1086 bp, Artificial Sequence
  derived and/or modified sequence
atgaagtctttaagcctcctccttgccgtcgccttggggctggccactgcagttagcgccggtccggccgtcattgaatgctggttcgtagaagacgcgtcgggtaaaggccttgcgaaaagaccaggagccttgcttctgcgtcaaggacccggagagccccccccaagaccagacttggatccagagttgtacctcagtgtccacgtggttctgacggtcctgacacacacaccggcccctcgcgtccggctcggccaggatgcactccttgacctcagtttcgcctatatgcctcccacttcggaggctgcgtcctcactagccccagggccaccccctttcggtctagagtggagacgccagcatctgggtaaagggcatctccttctggccgcaacacccggccttaatggtcagatgccagcagcacaggagggggcagtggccttcgccgcctgggacgacgatgagccttgggggccatggacaggaaacggtaccttttggctgcctagggttcaaccattccaggaggggacatacctggctactattcacttgccttatctgcagggccaggttactctcgaattagcggtgtataaaccccctaaggtgtcccttatgcccgcaacactggctcgggcagcccccggagaagcaccgcccgagctgctgtgcctagtcagccatttttaccccagtggtggcttagaagttgaatgggagctcagagggggcccgggagggcggtcacagaaggctgagggacaacgttggctcagtgccctgcgacaccacagcgacggctcagtgagcttatccggacatcttcaacctcctccagtcaccaccgagcagcatggggcacgatatgcatgccggattcatcaccccagccttccggcaagtgggcggtcggccgaggtcaccctggaggtggctgggctatccggaccttctctagaggactcagtaggcttatttctgtctgctttcttgttgcttggcctcttcaaagcccttggctgggctgcagtgtacctctccacatgcaaagattccaaaaaacatgcaacatag

SEQ ID NO: 248675 - DNA, 609 bp, Artificial Sequence
  derived and/or modified sequence
atgaagagcctgagcctgctgctggccgtggccctgggcctggccacagctgtgtctgctggccctgctgtgattgagtgctggtttgtggaggatgccagcggcaagggcctggccaagaggcctggggccctgctgctgcggcagggccctggagagcccccacccaggccagacctggaccctgagctgtacctgtctgtgcacgtggtgctgactgtgctgacccacaccccagccccccgggtgcggctgggccaggatgccctgctggacctgagctttgcctacatgccacccaccagcgaggccgccagcagcctggcccctggccccccaccatttggcctggagtggaggcggcagcacctgggcaagggccacctgctgctggccgccaccccaggcctgaatggccagatgcctgctgcccaggagggcgctgtggcctttgctgcctgggatgatgatgagccctggggcccctggacaggaaatggcaccttctggctgccccgggtgcagcccttccaggagggcacctacctggccaccatccacctgccctacctgcagggccaggtgaccctggagctggccgtgtactag

SEQ ID NO: 248676 - DNA, 609 bp, Artificial Sequence
  derived and/or modified sequence
atgaagagcctgagcctgctgctggccgtggccctgggcctggccacagctgtgtctgctggccctgctgtgattgagtgctggtttgtggaggatgccagcggcaagggcctggccaagaggcctggggccctgctgctgcggcagggccctggagagcccccacccaggccagacctggaccctgagctgtacctgtctgtgcacgtggtgctgactgtgctgacccacaccccagccccccgggtgcggctgggccaggatgccctgctggacctgagctttgcctacatgccacccaccagcgaggccgccagcagcctggcccctggccccccaccatttggcctggagtggaggcggcagcacctgggcaagggccacctgctgctggccgccaccccaggcctgaatggccagatgcctgctgcccaggagggcgctgtggcctttgctgcctgggatgatgatgagccctggggcccctggacaggaaatggcaccttctggctgcccaccgtgcagcccttccaggagggcacctacctggccaccatccacctgccctacctgcagggccaggtgaccctggagctggccgtgtactag

SEQ ID NO: 248677 - DNA, 1086 bp, Artificial Sequence
  derived and/or modified sequence
atgaagagcctgagcctgctgctggccgtggccctgggcctggccacagctgtgtctgctggccctgctgtgattgagtgctggtttgtggaggatgccagcggcaagggcctggccaagaggcctggggccctgctgctgcggcagggccctggagagcccccacccaggccagacctggaccctgagctgtacctgtctgtgcacgtggtgctgactgtgctgacccacaccccagccccccgggtgcggctgggccaggatgccctgctggacctgagctttgcctacatgccacccaccagcgaggccgccagcagcctggcccctggccccccaccatttggcctggagtggaggcggcagcacctgggcaagggccacctgctgctggccgccaccccaggcctgaatggccagatgcctgctgcccaggagggcgctgtggcctttgctgcctgggatgatgatgagccctggggcccctggacaggaaatggcaccttctggctgcccaccgtgcagcccttccaggagggcacctacctggccaccatccacctgccctacctgcagggccaggtgaccctggagctggccgtgtacaagccacccaaggtgtccctgatgcctgccaccctggcccgggccgcccctggagaggcccctcctgagctgctgtgcctggtgagccacttctaccccagcggcggcctggaggtggagtgggagctgcggggcggccctgggggccgcagccagaaggccgagggccagcgctggctgagcgccctgcggcaccacagtgatggctctgtgtccctgagcggccacctgcagcccccacctgtgaccacagagcagcacggggcccgctatgcctgccgcatccaccaccccagcctgcctgccagcggccgctctgctgaggtgaccctggaggtggccggcctgagcggccccagcctggaggacagcgtgggcctcttcctgagcgccttcctgctgctgggcctcttcaaggccctgggctgggccgctgtgtacctgagcacctgcaaggacagcaagaagaaggccgagtag

SEQ ID NO: 248678 - DNA, 1086 bp, Artificial Sequence
  derived and/or modified sequence
atgaagagcctgagcctgctgctggccgtggccctgggcctggccacagctgtgtctgctggccctgctgtgattgagtgctggtttgtggaggatgccagcggcaagggcctggccaagaggcctggggccctgctgctgcggcagggccctggagagcccccacccaggccagacctggaccctgagctgtacctgtctgtgcacgtggtgctgactgtgctgacccacaccccagccccccgggtgcggctgggccaggatgccctgctggacctgagctttgcctacatgccacccaccagcgaggccgccagcagcctggcccctggccccccaccatttggcctggagtggaggcggcagcacctgggcaagggccacctgctgctggccgccaccccaggcctgaatggccagatgcctgctgcccaggagggcgctgtggcctttgctgcctgggatgatgatgagccctggggcccctggacaggaaatggcaccttctggctgccccgggtgcagcccttccaggagggcacctacctggccaccatccacctgccctacctgcagggccaggtgaccctggagctggccgtgtacaagccacccaaggtgtccctgatgcctgccaccctggcccgggccgcccctggagaggcccctcctgagctgctgtgcctggtgagccacttctaccccagcggcggcctggaggtggagtgggagctgcggggcggccctgggggccgcagccagaaggccgagggccagcgctggctgagcgccctgcggcaccacagtgatggctctgtgtccctgagcggccacctgcagcccccacctgtgaccacagagcagcacggggcccgctatgcctgccgcatccaccaccccagcctgcctgccagcggccgctctgctgaggtgaccctggaggtggccggcctgagcggccccagcctggaggacagcgtgggcctcttcctgagcgccttcctgctgctgggcctcttcaaggccctgggctgggccgctgtgtacctgagcacctgcaaggacagcaagaagcacgccacctag

SEQ ID NO: 248679 - DNA, 609 bp, Artificial Sequence
  derived and/or modified sequence
atgaagagcctgagcctgctgctggccgtggccctgggcctggccacggcggtttccgcagggccagcagtgatagagtgctggtttgtggaggatgcctcaggtaaaggcctggcaaagcgccctggtgccctgttgctgcgtcaaggtcccggcgagccaccccctcgccctgatctagatcccgaactctacctctctgtgcacgtcgttttgactgttctgacccataccccggccccccgggtgcgtctgggccaggacgctctgcttgatctctcgttcgcttacatgccaccaacgagcgaggccgcatcctctcttgcgcctgggcctccacctttcggactggagtggaggcgacagcatcttggtaaggggcacctgctgctcgccgccaccccaggcctcaacggccaaatgcccgcagctcaggagggcgccgtcgccttcgccgcttgggacgatgacgagccttggggcccctggactggaaacggtaccttttggttgccaagagtccagccctttcaggagggcacttatctggccacaatacacttaccatatctgcagggccaggtcacactggagctggctgtgtattag

SEQ ID NO: 248680 - DNA, 609 bp, Artificial Sequence
  derived and/or modified sequence
atgaagagcctgagcctgctgctggccgtggccctgggcctggccaccgccgtgtcggccggcccagccgtcatcgaatgttggtttgtggaagatgccagcggaaagggcctcgctaaaaggcctggagcactccttcttcgccagggtccaggagagccaccacctcgccccgaccttgatcctgaactctatcttagtgttcacgtggtcctcacagtgctgactcacactcccgctccccgcgtgaggcttgggcaggacgccttgctggacttgtcttttgcgtacatgccccctacctcagaggccgcgtcaagcctggcacccggtccaccaccatttggcctggagtggaggcggcagcatttaggaaaaggccacctcttactggcagcgacacccggattaaatggtcagatgcctgcagcccaggagggtgcggtcgctttcgccgcttgggacgacgatgaaccctggggtccgtggaccggcaacggcaccttctggctgccgaccgtccaaccttttcaggagggaacttatctggccactatccatctgccatacctccaggggcaagtgacattagagttagccgtttattag

SEQ ID NO: 248681 - DNA, 609 bp, Artificial Sequence
  derived and/or modified sequence
atgaagagcctgagcctgctgctggccgtggccctgggcctggccaccgcagtgagcgctgggcctgcggttattgagtgctggtttgtagaggacgccagcggtaaaggtctggccaagaggccaggtgctctcctgctgcgccagggcccaggagagcctcctcctcgcccagacctggacccagagctgtaccttagcgtgcacgtggtgcttactgtgctaacccatacaccggcaccgagggtccggttagggcaggacgctctactggatctgagctttgcctatatgcctcccacgagtgaagcggcaagttctcttgcccccgggccacctccctttggcctggaatggaggcggcagcacctgggaaaaggacacctgctgctcgctgccacccccggcctgaacggtcagatgcctgcagcgcaggaaggggccgtggcattcgcggcatgggacgatgatgaaccgtgggggccgtggacaggcaacgggacattttggctgccgcgtgtgcaaccatttcaggaggggacgtatttggccacaatacacctcccttaccttcaggggcaggtgacactcgagctcgcagtgtattag

SEQ ID NO: 248682 - DNA, 609 bp, Artificial Sequence
  derived and/or modified sequence
atgaagagcctgagcctgctgctggccgtggccctgggcctggccactgccgtgtccgcgggacctgccgtgatagaatgctggtttgttgaggacgcgtcaggtaaagggctggctaaaaggccaggagcactgcttctgagacagggtcccggggagccacccccacggccagatttagatccagagctctatctgtcggtgcacgtagtgctgactgtcctcactcacacaccagccccacgggtgcggctgggtcaagatgcattgttagacttgtccttcgcctacatgccacccacctccgaagctgcctcttctcttgcccccggcccaccaccttttggcctggagtggaggagacaacatctgggaaaaggccacttactccttgccgctaccccgggactaaatgggcagatgcccgcggcccaggagggcgccgtggccttcgccgcgtgggacgacgacgagccatgggggccttggaccggaaatggcacattttggcttccgagggttcagccctttcaggagggtacctacctggcaactatccacctgccctatcttcagggccaggttactcttgaactcgctgtctactag

SEQ ID NO: 248683 - DNA, 1086 bp, Artificial Sequence
  derived and/or modified sequence
atgaagagcctgagcctgctgctggccgtggccctgggcctggccacagccgtctcagccggccctgctgtaatcgagtgttggtttgttgaggacgcctctggtaaaggactggcaaagcggccgggcgcactcttgctacgacaaggaccaggcgagcctcccccccggccagatcttgatccagagctgtatctcagtgtacatgtggtcttaacagtactgactcacactccggccccgagagtccgcctgggacaggacgccttattagatttgtcatttgcttatatgccacccacttccgaggcggcctcttcattggctccggggccccctccattcggactggagtggcggcgacaacatctgggtaaggggcaccttctccttgctgcaacccccggattaaacgggcagatgcccgcggcccaggagggggccgtcgctttcgcggcttgggatgacgatgagccttggggaccctggactggtaacggaaccttttggctgcccacggtgcagccatttcaggaaggtacttatcttgctactatccatcttccttacttgcaggggcaggtcacactggaactggcggtgtacaagccccctaaggtttctctgatgccggccaccctggcacgggcagcaccgggcgaggccccacctgagctgctttgcctagtgtcccatttctacccctcaggggggctggaggttgagtgggaattaagaggtggccccggagggcgatcccagaaagctgaaggccagcgctggctctcggcccttagacatcattccgatggaagtgtcagtttgagcgggcacctgcagccaccgccagtgaccactgagcagcacggcgccagatacgcttgtcggatccaccacccttctttgcccgcgagcggcaggagcgccgaagtgactctggaggtcgcgggtctctccggccccagcctggaagactccgtcggactgttcctgagtgcattccttctcctcggactctttaaagcccttggttgggcagccgtctatttgtctacttgcaaagattctaagaagaaggccgagtag

SEQ ID NO: 248684 - DNA, 1086 bp, Artificial Sequence
  derived and/or modified sequence
atgaagagcctgagcctgctgctggccgtggccctgggcctggccacagctgtcagcgctggccccgctgtgatagagtgctggttcgtggaagacgcttccggtaagggacttgccaagcgaccgggcgcactccttttaaggcaaggccccggggaacccccaccacgtcccgatctggatccagaactttatctatccgtgcatgtcgttttgaccgtcttgacacacaccccagcaccacgtgttcggctgggacaggatgctctgctggatttgtcattcgcttatatgccacctactagcgaggccgccagctctctggcgccggggcctcccccgttcgggctggagtggcgcagacagcatttggggaagggtcatcttctgcttgctgcaactccaggcctgaatgggcaaatgcccgccgcgcaggaaggtgccgtcgctttcgcagcttgggatgacgatgagccttggggtccctggactggcaatgggacattttggttgcctagagtgcagcctttccaggaagggacctatctcgcaaccatacaccttccgtacctccagggacaagtgacactcgaattggctgtctacaaaccccccaaagttagcctgatgccagcaaccctggcacgggccgcgcctggagaagctccaccggagttgctgtgtcttgtgagccacttctacccctctgggggcttggaagtggagtgggagctgcgcgggggcccaggaggcagaagtcaaaaggcagagggccagagatggctgagcgccttgagacaccactctgacggaagtgttagtctgagtggccatctgcagcctcctcccgtaactaccgagcagcacggcgcgagatatgcctgccggatacatcatccatctctgcctgcttctggcaggtccgccgaagtcacgttggaggttgcgggactgtctggcccctccctggaggactcagtaggtctcttcctgtctgcttttttactgcttggactttttaaagccctcggctgggcagccgtttacttgtcgacatgcaaggactccaagaagcatgccacctag

SEQ ID NO: 248685 - DNA, 1086 bp, Artificial Sequence
  derived and/or modified sequence
atgaagagcctgagcctgctgctggccgtggccctgggcctggccactgcagtcagtgccggtcctgctgtgatagagtgttggtttgtggaagacgcctcaggtaagggtctggccaaacgaccaggcgcccttctactgcgccagggcccgggggaacccccccctcgtcctgatttagatcccgaattgtacctttctgtccacgttgtgctcactgtcttgacgcatacgcctgcccccagagtccggctcggccaggatgccctcctggatctcagttttgcatacatgcctcccacctcagaagccgcatcctctctcgcacccggccccccccctttcggattagaatggcgacgacagcatcttgggaaaggtcacctccttctggccgcaactcctggtctgaacgggcagatgccagccgcacaggagggtgctgtggccttcgctgcttgggatgatgatgaaccctgggggccatggactggcaacggtacattttggttgcctcgggtgcagccattccaggagggcacatatctcgctacaatccaccttccatatctccagggccaggtaacactcgaactggccgtgtataagccaccaaaagttagtctgatgccggccacactggcccgagcggcccctggcgaagctccgcccgagctgttatgtctggtgagtcatttttatccaagtgggggcctggaggtggaatgggagctccgaggtggacccggaggccgaagtcaaaaggctgaggggcaacgatggcttagtgccctgaggcaccattccgatggttccgtgagcctatcagggcatttacaaccaccaccggtcaccactgaacagcacggagctaggtacgcgtgccggatccaccacccaagtctgcctgcaagcggaagatcagctgaggtgacgctggaggtcgccggtctaagcggaccatcattggaagactctgtgggcctcttcctgtctgccttccttctcctgggcctgttcaaagccctgggctgggctgcagtctatctgtctacttgcaaggactccaaaaaacacgctacatag

SEQ ID NO: 248686 - DNA, 1086 bp, Artificial Sequence
  derived and/or modified sequence
atgaagagcctgagcctgctgctggccgtggccctgggcctggccaccgctgtgtccgccggacccgcggttattgagtgctggttcgtggaggatgccagcgggaaggggcttgccaagcggcccggagcactactacttcgtcaggggccaggagaaccaccccccagaccagatcttgacccagaactgtacttaagcgtgcacgtcgtcttgaccgttctgactcacacaccggctccacgggtgagactcggtcaagatgctttgcttgacctgagtttcgcttacatgccaccaacatcagaagccgcttcgagtttggcacccgggcccccaccatttggattagaatggagacgccaacatttgggaaagggccatcttctgctcgccgcaacccctggtttgaatgggcaaatgcctgcggcacaggaaggggccgtggcgtttgcagcatgggacgatgatgagccctggggaccctggacaggcaacgggacattttggctgcctaccgtgcagccgttccaggagggaacttatttagctaccatccacttgccttatctacaaggacaggttaccttggaattggccgtttacaaacccccaaaggtaagcctgatgcctgccaccttggcccgggcggcccccggcgaggccccccccgagctgctctgcctcgtgagtcatttttacccatcaggagggttagaggtggaatgggagttgagaggtggaccgggcgggcgctcacaaaaggcagagggccagcgctggctgagtgcactgcgccaccattccgatgggtcagtgagcctctcaggccatctgcaacctcccccagtcacaacagagcaacatggcgcacgctacgcctgccggatccaccacccttccctgccagcaagtgggagaagtgctgaagtgacgctggaagttgccgggctgagcggacccagtttagaggattctgttggcctttttctgtcggcttttcttctgctcggcctttttaaagccctcggctgggctgctgtttacctctctacatgcaaggacagtaaaaagaaggcagagtag

SEQ ID NO: 248687 - DNA, 1086 bp, Artificial Sequence
  derived and/or modified sequence
atgaagagcctgagcctgctgctggccgtggccctgggcctggccacagccgtctcagccgggccggccgtaattgagtgttggtttgtggaggacgccagcggtaagggactcgccaagcgtcccggcgccctcctcctgagacagggccctggcgagcctccaccgcgccccgatctggaccctgagctgtacttatccgtgcatgtggtgcttacagtcctgacgcatacgccagccccccgtgtgcgcctcggccaggacgctctgctcgatctgagttttgcctacatgccacccacttcagaggcggcgtcctctctagcacctgggcctccccccttcggtttggagtggcggcgccagcacctgggaaaggggcacctgctgctggccgcaacccctggtctgaatggtcagatgccagccgcgcaggaaggcgcagtcgcctttgctgcctgggacgacgacgaaccctggggaccctggactggcaacggaaccttttggcttccccgcgtgcagccctttcaggagggcacttatttggccaccatccacctgccttacctgcagggccaggtcaccctggagcttgccgtctataagcccccaaaggtctcattgatgcctgccacgctggcccgcgcagcccctggcgaagccccccctgagctgctgtgtctggttagccatttttaccccagcggcggcctggaggtagagtgggagctccggggcggacccgggggccgctcccagaaggcagaagggcaacgatggctctctgcgctgagacatcattctgacggcagcgtgtccctttctggccatctacagcccccgcccgtgaccacggagcagcatggagctaggtacgcatgcaggatccaccacccctctttacctgctagcggccggtccgcggaggtcaccctggaagtcgccggcctgtcggggcctagcctggaagatagcgtgggcttgtttcttagcgcattcctgttgcttggattatttaaggctctcggctgggccgccgtgtacctttctacctgcaaggattccaagaagcacgctacttag

SEQ ID NO: 248688 - DNA, 609 bp, Artificial Sequence
  derived and/or modified sequence
atgaaaagtctcagtctcctccttgccgttgccctggggctggccacggctgtgagcgccggacccgcagtcatcgaatgctggttcgttgaggatgcatccggcaagggcctagcaaaacgaccaggagccctcctattgcgccagggccctggagagcctccgcctcggccagatcttgacccagagctgtacctgtcggtgcacgtggtacttaccgtccttactcatacaccagcccctagagtgagattgggacaagacgcactgctcgatctgagtttcgcttatatgcctcctacaagcgaggcagctagttctctcgcccctggtcctccccctttcggcctcgaatggcgcagacagcacctgggtaaaggacacctgctgttggcggcaacacccggactcaatggtcaaatgcccgctgcgcaggagggggctgtggcgttcgctgcttgggacgacgacgaaccatggggcccatggacaggcaacggtactttctggctccctagagtccaaccgtttcaggaaggcacatacttagctaccattcacctgccatacctgcagggacaggtgaccctcgagctggccgtctactag

SEQ ID NO: 248689 - DNA, 609 bp, Artificial Sequence
  derived and/or modified sequence
atgaaatcgctctcacttctgctggcggtcgcactgggactcgcgaccgcggtgtctgccggacctgctgtgatcgagtgctggttcgtggaagacgcctcaggtaaaggactcgccaagcgaccaggtgcgcttctgttgagacaaggaccaggagagcccccacctaggcctgaccttgatccagagctgtacctgtccgtccacgtggtcctgaccgtgctaacgcacacacctgctcccagggtcagactggggcaggacgcccttctcgacctgagctttgcctacatgccgccaacctcagaggcggcaagcagcttagccccaggcccaccgccttttggcctggaatggcgcagacaacacctgggaaaaggacacctgcttcttgccgctaccccgggactcaacggccaaatgccggctgctcaggaaggggctgtggccttcgccgcttgggatgacgacgagccctgggggccatggactggcaacgggaccttctggctgcccactgttcagcctttccaggaggggacctatttggctaccatccacctaccttatctccaggggcaagtaaccttagagctggccgtgtactag

SEQ ID NO: 248690 - DNA, 609 bp, Artificial Sequence
  derived and/or modified sequence
atgaaaagcctgagtctgttgctggccgtcgctctcggactggctaccgcagtgtccgcgggaccggcagttatcgaatgttggttcgtggaagatgcttccgggaaaggtctcgctaaaagaccaggcgcattgctcttgcgccagggtccgggagagccacctcctcgacccgatcttgacccggagctctacctgtctgtgcacgtggttctaaccgttcttacccatactcctgctccaagggtgcggctcggacaggacgctctcttggatctttcgtttgcatacatgccacctacttcggaggccgcatccagcttggccccagggcctcccccattcggtttggaatggcgccgtcagcacttgggaaaaggacacctcttacttgccgctacacctggcctgaacggccagatgcctgcagctcaggagggagccgtggcatttgcggcttgggacgatgacgaaccatgggggccttggaccggaaatggtactttctggttgcccagggtacagccattccaggaggggacgtacttagctactatacacttgccttacctgcagggacaagtcaccctcgagttggcggtttactag

SEQ ID NO: 248691 - DNA, 609 bp, Artificial Sequence
  derived and/or modified sequence
atgaagtcactgtccctgctcttggctgtggctttgggacttgccaccgccgtgtcagcgggtccagccgtgattgaatgctggttcgtggaggacgcctctgggaagggattggcaaaacggcctggagctctgctactgcggcaaggacctggcgaaccccctccaaggccggacctcgatccagagttatacctgtctgttcacgtcgttctgactgtcctcacccacactccagccccacgggtgaggctcggtcaggacgccctactggacttgagctttgcctacatgccccctacctcagaggccgcaagttctcttgcaccagggccacccccttttggactggagtggcgcagacagcatttggggaaggggcatctccttctggcagcgacccctggactgaatggtcagatgccagctgcccaggaaggagcagtggcctttgccgcttgggatgatgacgagccttggggcccttggactggaaacggaacgttctggttaccacgtgtacagccgttccaggaagggacatacttggccacaatacatctcccttacttgcagggccaggtaaccctggagctggccgtgtattag

SEQ ID NO: 248692 - DNA, 1086 bp, Artificial Sequence
  derived and/or modified sequence
atgaagtccttgtccttgcttcttgccgtagcgcttggactggccactgccgtctccgctgggcctgcagtcatcgagtgctggttcgttgaggatgcttcgggcaagggcttggcaaagcgcccaggggctctcctgctgcgccagggcccaggcgagcctcccccacggccagatttggaccctgaactatatctgtccgtgcacgttgtactcacagtgctcacgcatactcctgccccacgggtacggttgggccaggatgctctgctggatcttagctttgcctatatgcctccaacctcggaggccgcaagcagccttgcgccaggtcctcctccgtttgggcttgagtggaggcgccaacaccttggaaaggggcatctgttgttggccgctacacctgggttaaacggccagatgcccgcagcccaggagggcgctgtggcctttgcagcttgggacgacgatgaaccatgggggccttggaccggcaatgggaccttttggctccctacagtccagccgtttcaagaaggtacctatctcgccaccatccacttaccctatctccagggacaggtgacacttgagctggccgtgtacaagccacctaaggtgagcctgatgccggctactctggccagagcagctcccggtgaagcgcctccagagctcctgtgtttggtcagccacttctatccgtctggcggactggaagtggagtgggagcttcgcggaggtccagggggaagatctcagaaagccgaaggccagcgctggctgagcgcccttcggcatcactcagatgggtctgtgtctctctctggccacctgcagcctcccccagtgaccacagaacagcacggggctcgctatgcctgtagaatccatcatccgtcactcccagccagcgggagaagtgcagaggtgacactggaggtagcgggactttctggtccttcactagaggattctgtgggcctttttctgagcgccttcctgctgcttggcctgttcaaagccctgggatgggctgccgtttacttgtcaacctgcaaagatagcaagaagaaagccgaatag

SEQ ID NO: 248693 - DNA, 1086 bp, Artificial Sequence
  derived and/or modified sequence
atgaagagcctctccctcctcctggctgtagccttagggctagcaaccgccgtgagtgctgggccagcagtcatcgagtgttggtttgtggaggacgcctcaggcaaaggccttgccaaacgcccaggcgctcttctcctacggcagggacccggtgagcctccgcctcggccagatcttgaccctgaattgtatcttagcgtgcacgtagtcctgaccgtactgacgcacacccctgccccacgcgtgcgtcttgggcaagatgcactcctcgacctgtcattcgcttacatgccccctacatccgaggcagcctccagtctggcaccaggccctccaccattcggactagaatggaggcgccagcacttaggaaaagggcatttgcttctcgccgcaactcccggtctgaacggccaaatgcccgctgcccaggaaggagccgtcgctttcgccgcttgggacgatgatgaaccttggggaccttggaccgggaacggaaccttctggctgccaagagtccaaccttttcaggaaggaacgtacctagcaacgatacacttaccctacttgcaggggcaggtcacgctcgagttagctgtgtataaaccccctaaggtgtcccttatgcccgctaccttagccagggcggctcccggagaggccccacctgagctcttgtgtctggtgtcccacttttacccatctggtggtctggaagttgagtgggaactccggggtggtcctggaggaaggtcacagaaagctgaaggccagagatggctatctgcactgcgacaccactcagatggtagcgtctcactttcaggtcatttgcaaccgcctcccgtcaccaccgagcagcacggggctcgttatgcatgtcgaattcaccacccctctctccctgctagcggccgtagtgccgaggtaaccttagaagtggctggcctgtcaggtccttccctggaagacagtgtggggctttttctgagtgccttcctgctgctcggcctgttcaaagccctcgggtgggcagccgtgtacttgtccacctgtaaagattccaagaagcacgctacttag

SEQ ID NO: 248694 - DNA, 1086 bp, Artificial Sequence
  derived and/or modified sequence
atgaagagcctgtcgctgttgctggctgtggcactaggcctagcaaccgcagtgtcagcaggaccagcagtgatagagtgctggttcgtcgaggacgcctcaggtaaggggcttgccaaacgccctggcgcattgttgcttcggcagggcccaggagagcctcctccccgacctgacctagatcctgaactttatttgtctgtacacgtggtgttaactgtactgacccatacgccggctccccgagtgcggctggggcaggacgccctgttagatcttagcttcgcctatatgccaccgacgtctgaagccgctagcagccttgcaccaggccctcctcctttcggcctggagtggcgcagacagcatctgggcaagggccaccttctactggcagccacccctggactgaatggacagatgcccgcagcccaggagggcgcagtggcttttgccgcatgggacgacgatgaaccatggggcccttggacaggaaatgggaccttctggcttccacgtgttcagccttttcaggaaggcacatatctggccacgattcatctgccttatctgcagggacaggtgacgctcgaactcgctgtttacaagcctccaaaggtgtccttgatgcccgctactttggcccgagccgcacctggggaagctcccccagagctgctgtgtcttgtcagtcacttctacccaagcgggggactcgaggtggagtgggagctccgaggcggacccggaggaaggtcccagaaagccgaaggacagagatggctctcagcacttcgccatcacagcgacggatcagtgtctctgagtggccatttgcagcccccaccagtcacaactgagcagcatggcgcacggtacgcttgcaggattcaccacccctccctgccagcttccggtcggagcgcagaggtgacgttagaagtcgcaggtctcagcggtccgtccctcgaagacagtgtaggcttattccttagcgctttcctccttctgggactgttcaaagcccttggctgggccgctgtgtatctctcaacatgcaaagactccaagaagcatgccacatag

SEQ ID NO: 248695 - DNA, 1086 bp, Artificial Sequence
  derived and/or modified sequence
atgaagtccttgtcactgctactagccgttgccctgggactggcgaccgcagtctcagcaggaccagccgtgatcgaatgctggttcgttgaagatgcgagtggcaaaggcctggcaaaaagacccggagctctcctgctgcggcaaggaccaggagagcctccccctcgacctgacctggaccccgaactatacctgtcagtgcatgtcgtactgacagtactcactcatacccccgcaccgagggtgagactgggccaggacgctctgttggacctgtccttcgcctatatgcctccaacgtctgaagcggcatcttcactggccccaggaccccctccttttggacttgagtggagacgccagcacctgggaaaaggccaccttctccttgccgcaacacccggtctgaatggacagatgcccgctgctcaggaaggcgctgtggcttttgctgcatgggatgacgatgaaccttggggcccttggactggaaatggaacattttggcttcctacagttcaacccttccaggaagggacctatctggctaccatccacctaccatacttacagggtcaggtgaccctggaactggcagtgtacaaaccccctaaggtgtccctgatgcccgctacacttgcgagagcggcacccggagaagcgccacccgagctgctctgcctagtcagtcatttctatcccagcggaggccttgaggtcgaatgggaactgcggggaggcccaggtgggagatcccagaaggcggagggacaacgttggctgtccgcattacggcatcatagcgacgggagtgtttccttgtctggacaccttcagcctccacccgtcaccactgaacaacatggcgcacgatacgcctgccggattcaccatccgtccctcccagcctcagggaggagcgccgaagtgacactggaggtagcgggattgagtgggccaagtcttgaggactcggtcgggttgttcttgagcgcatttctcctgctaggccttttcaaagccctcggctgggctgcagtctacttatccacctgtaaggatagcaagaaaaaagcagagtag

SEQ ID NO: 248696 - DNA, 1086 bp, Artificial Sequence
  derived and/or modified sequence
atgaagagccttagcttacttctcgcagtggcccttggcctcgccacagcagtgagcgcaggccctgccgtgatcgagtgctggttcgtggaggatgcaagcggaaagggactagccaagcggcctggcgctctcctcctacgccagggacccggagaacctcctccgaggccggacctggacccagagctctatctgagcgtccacgtggtccttaccgtcctgacccatacgccagcaccacgtgttcgcttaggccaggacgctctgctggacctgtcattcgcttacatgccgccaacctctgaggcggctagcagcctggccccagggcctccaccattcgggctggagtggcggaggcagcatttgggcaagggccacctcctcctagcagccacgcccggactgaacggacagatgcccgcagctcaggagggcgcagtcgcatttgcggcttgggacgatgacgaaccatggggcccatggacaggcaacggaaccttttggctccctcgcgtgcaaccatttcaggaggggacctacctcgctaccatccatttgccatatctgcaaggccaagttactttggagctggccgtttataagcctccaaaggtcagtcttatgcccgctacacttgctcgggctgctcccggtgaggcgcctcccgagttactctgcctggtcagccatttttacccgtctggtggccttgaggtggaatgggaattaagaggagggccaggaggcaggagccaaaaagctgaagggcaacggtggttgtccgccctgaggcatcactctgatggtagcgtgagtctgagcggtcacctgcagcctcccccagtgactaccgagcaacatggcgcacgatatgcttgcaggattcatcatccatctttacccgcttccggaagaagtgcagaggtaactttagaggtagcgggtctgtctggacccagtctagaggacagcgtcggactgtttctatccgcctttctgctccttggtctgttcaaggctctggggtgggctgccgtgtatctttcaacgtgtaaagatagcaaaaagcatgcgacctag

SEQ ID NO: 248697 - DNA, 612 bp, Artificial Sequence
  derived and/or modified sequence
gcgccatgaagtccctgtctctgctcctcgctgtggctttgggcctggcgaccgccgtctcagcaggacccgcggtgatcgagtgttggttcgtggaggatgcgagcggaaagggcctggccaagagacccggtgcactgctgttgcgccagggaccgggggaaccgccgccccggccggacctcgaccctgagctctatctcagtgtacacgtggtactgactgtcctcacccacacccctgcccctcgagtgagactgggacaagatgctctgctggacttgagctttgcctacatgccccccacctccgaggccgcctcatctctggctccgggtccccctccctttgggctagagtggcgacgccagcacctgggtaagggacatctgctcctggctgcaactcctgggctgaatggccagatgccagcagcccaagaaggggccgtggcatttgctgcttgggatgatgatgagccatggggcccatggaccggaaatgggaccttctggctgcctagagttcaaccctttcaggagggcacctatctggccaccatacacctgccatacctgcaaggacaggtcaccctggagcttgctgtgtaca

SEQ ID NO: 248698 - DNA, 612 bp, Artificial Sequence
  derived and/or modified sequence
gcgccatgaagtccctgtctctgctcctcgctgtggctttgggcctggcgaccgccgtctcagcaggacccgcggtgatcgagtgttggttcgtggaggatgcgagcggaaagggcctggccaagagacccggtgcactgctgttgcgccagggaccgggggaaccgccgccccggccggacctcgaccctgagctctatctcagtgtacacgtggtactgactgtcctcacccacacccctgcccctcgagtgagactgggacaagatgctctgctggacttgagctttgcctacatgccccccacctccgaggccgcctcatctctggctccgggtccccctccctttgggctagagtggcgacgccagcacctgggtaagggacatctgctcctggctgcaactcctgggctgaatggccagatgccagcagcccaagaaggggccgtggcatttgctgcttgggatgatgatgagccatggggcccatggaccggaaatgggaccttctggctgcctacagttcaaccctttcaggagggcacctatctggccaccatacacctgccatacctgcaaggacaggtcaccctggagcttgctgtgtaca

SEQ ID NO: 248699 - DNA, 1299 bp, Artificial Sequence
  derived and/or modified sequence
agtccaggagggcgcggtaaggctggggtgtcctggtgagaactggagaggatctacccgggtccctgcctggccagtggggaaacaccggtcccccaggcaccttcacctaaccagagcggggatttccaccgcccctcatgccgccctttggaggaaagtgaaagtgaaaggaggaagaggaggcttcatggctgaggaggtcgcagcgccatgaagtccctgtctctgctcctcgctgtggctttgggcctggcgaccgccgtctcagcaggacccgcggtgatcgagtgttggttcgtggaggatgcgagcggaaagggcctggccaagagacccggtgcactgctgttgcgccagggaccgggggaaccgccgccccggccggacctcgaccctgagctctatctcagtgtacacgtggtactgactgtcctcacccacacccctgcccctcgagtgagactgggacaagatgctctgctggacttgagctttgcctacatgccccccacctccgaggccgcctcatctctggctccgggtccccctccctttgggctagagtggcgacgccagcacctgggtaagggacatctgctcctggctgcaactcctgggctgaatggccagatgccagcagcccaagaaggggccgtggcatttgctgcttgggatgatgatgagccatggggcccatggaccggaaatgggaccttctggctgcctacagttcaaccctttcaggagggcacctatctggccaccatacacctgccatacctgcaaggacaggtcaccctggagcttgctgtgtacaaaccccccaaagtgtccctgatgccagcaacccttgcacgggccgccccaggggaggcacccccggaattgctctgccttgtgtcccacttctacccttctgggggcctggaggtggagtgggaactccggggtggcccagggggccgctctcagaaggccgaggggcagaggtggctctcggccctgcgccaccattccgatggctctgtcagcctctctgggcacttgcagccgcccccagtcaccactgagcagcatggggcacgctatgcctgtcgaattcaccatcccagcctgcctgcctcggggcgcagcgctgaggtcaccctggaggtagcaggtctttcagggccctcccttgaggacagcgtaggccttttcctgtctgcctttcttctgcttgggctcttcaaggcactgggctgggctgctgtctacctgtccacctgcaaggattcaaagaagaaagcagagtga

SEQ ID NO: 248700 - DNA, 1404 bp, Artificial Sequence
  derived and/or modified sequence
ggagtaatggttttcgggcaagtggatgttggagagcacacacaggagttggggggcgggggagggcctggggttggggagggctcgaactcggggctgctgggtagtccaggagggcgcggtaaggctggggtatcctggtgagaactggagaggatctacccgggtccctgcctggccagtggggaaacaccggtcccccaggcaccttcacctaaccagagcggggatttccaccgcccctcatgccgccctttggaggaaagtgaaagtgaaaggaggaagaggaggcttcatggctgaggaggtcgcagcgccatgaagtccctgtctctgctcctcgctgtggctttgggcctggcgaccgccgtctcagcaggacccgcggtgatcgagtgttggttcgtggaggatgcgagcggaaagggcctggccaagagacccggtgcactgctgttgcgccagggaccgggggaaccgccgccccggccggacctcgaccctgagctctatctcagtgtacacgtggtactgactgtcctcacccacacccctgcccctcgagtgagactgggacaagatgctctgctggacttgagctttgcctacatgccccccacctccgaggccgcctcatctctggctccgggtccccctccctttgggctagagtggcgacgccagcacctgggtaagggacatctgctcctggctgcaactcctgggctgaatggccagatgccagcagcccaagaaggggccgtggcatttgctgcttgggatgatgatgagccatggggcccatggaccggaaatgggaccttctggctgcctagagttcaaccctttcaggagggcacctatctggccaccatacacctgccatacctgcaaggacaggtcaccctggagcttgctgtgtacaaaccccccaaagtgtccctgatgccagcaacccttgcacgggccgccccaggggaggcacccccggaattgctctgccttgtgtcccacttctacccttctgggggcctggaggtggagtgggaactccggggtggcccagggggccgctctcagaaggccgaggggcagaggtggctctcggccctgcgccaccattccgatggctctgtcagcctctctgggcacttgcagccgcccccagtcaccactgagcagcatggggcacgctatgcctgtcgaattcaccatcccagcctgcctgcctcggggcgcagcgctgaggtcaccctggaggtagcaggtctttcagggccctcccttgaggacagcgtaggccttttcctgtctgcctttcttctgcttgggctcttcaaggcactgggctgggctgctgtctacctgtccacctgcaaggattcaaagaagcatgctacttaa

SEQ ID NO: 248701 - DNA, 1404 bp, Artificial Sequence
  derived and/or modified sequence
ggagtaatggttttcgggcaagtggatgttggagagcacacacaggagttggggggcgggggagggcctggggttggggagggctcgaactcggggctgctgggtagtccaggagggcgcggtaaggctggggtatcctggtgagaactggagaggatctacccgggtccctgcctggccagtggggaaacaccggtcccccaggcaccttcacctaaccagagcggggatttccaccgcccctcatgccgccctttggaggaaagtgaaagtgaaaggaggaagaggaggctaaatggctgaggaggtcgcagcgccatgaagtccctgtctctgctcctcgctgtggctttgggcctggcgaccgccgtctcagcaggacccgcggtgatcgagtgttggttcgtggaggatgcgagcggaaagggcctggccaagagacccggtgcactgctgttgcgccagggaccgggggaaccgccgccccggccggacctcgaccctgagctctatctcagtgtacacgtggtactgactgtcctcacccacacccctgcccctcgagtgagactgggacaagatgctctgctggacttgagctttgcctacatgccccccacctccgaggccgcctcatctctggctccgggtccccctccctttgggctagagtggcgacgccagcacctgggtaagggacatctgctcctggctgcaactcctgggctgaatggccagatgccagcagcccaagaaggggccgtggcatttgctgcttgggatgatgatgagccatggggcccatggaccggaaatgggaccttctggctgcctagagttcaaccctttcaggagggcacctatctggccaccatacacctgccatacctgcaaggacaggtcaccctggagcttgctgtgtacaaaccccccaaagtgtccctgatgccagcaacccttgcacgggccgccccaggggaggcacccccggaattgctctgccttgtgtcccacttctacccttctgggggcctggaggtggagtgggaactccggggtggcccagggggccgctctcagaaggccgaggggcagaggtggctctcggccctgcgccaccattccgatggctctgtcagcctctctgggcacttgcagccgcccccagtcaccactgagcagcatggggcacgctatgcctgtcgaattcaccatcccagcctgcctgcctcggggcgcagcgctgaggtcaccctggaggtagcaggtctttcagggccctcccttgaggacagcgtaggccttttcctgtctgcctttcttctgcttgggctcttcaaggcactgggctgggctgctgtctacctgtccacctgcaaggattcaaagaagcatgctacttaa

SEQ ID NO: 248702 - DNA, 3495 bp, Artificial Sequence
  derived and/or modified sequence
ggggacgcggcacagatagggggaagccggagtaatggttttcgggcaagtggatgttggagagcacacacaggagttggggggcgggggagggcctggggttggggagggctcgaactcggggctgctgggtagtccaggagggcgcggtaaggctggggtgtcctggtgagaactggagaggatctacccgggtccctgcctggccagtggggaaacaccggtcccccaggcaccttcacctaaccagagcggggatttccaccgcccctcatgccgccctttggaggaaagtgaaagtgaaaggaggaagaggaggcttcatggctgaggaggtcgcagcgccatgaagtccctgtctctgctcctcgctgtggctttgggcctggcgaccgccgtctcagcaggacccgcggtgatcgagtgttggttcgtggaggatgcgagcggaaagggcctggccaagagacccggtgcactgctgttgcgccagggaccgggggaaccgccgccccggccggacctcgaccctgagctctatctcagtgtacacgtggtactgactgtcctcacccacacccctgcccctcgagtgagactgggacaagatgctctgctggacttgagctttgcctacatgccccccacctccgaggccgcctcatctctggctccgggtccccctccctttgggctagagtggcgacgccagcacctgggtaagggacatctgctcctggctgcaactcctgggctgaatggccagatgccagcagcccaagaaggggccgtggcatttgctgcttgggatgatgatgagccatggggcccatggaccggaaatgggaccttctggctgcctacagttcaaccctttcaggagggcacctatctggccaccatacacctgccatacctgcaaggacaggtcaccctggagcttgctgtgtacaaaccccccaaagtgtccctgatgccagcaacccttgcacgggccgccccaggggaggcacccccggaattgctctgccttgtgtcccacttctacccttctgggggcctggaggtggagtgggaactccggggtggcccagggggccgctctcagaaggccgaggggcagaggtggctctcggccctgcgccaccattccgatggctctgtcagcctctctgggcacttgcagccgcccccagtcaccactgagcagcatggggcacgctatgcctgtcgaattcaccatcccagcctgcctgcctcggggcgcagcgctgaggtcaccctggaggtagcaggtctttcagggccctcccttgaggacagcgtaggccttttcctgtctgcctttcttctgcttgggctcttcaaggcactgggctgggctgctgtctacctgtccacctgcaaggattcaaagaagaaagcagagtgagggcactcactgccatcctgtggaagccaccatcatctctggcccaagcttctgtagtagctccctaaaataataccctatcatctgctcctaatccctccaatctctctccactgagtggctggaatgcttttttttttttctttcacttatataagggataatttttcttttttttttttttttgagacggagtctcactcttccgcccaggctgcagtgcagtggcatgatcttggcttactgcaacctccgcctcctgggttcaagcaattctgtggcttcagcctccggagtagctgggattacaggcacatgccaccacacccagtgaatttttgtatttttagtagagacggggtttcaccatgttggccaggctggtcttgaattcctgacctcaggtgatctgcccacctcagcctcccaaagtgctgggattacaggcgtgagccaccacaccaggcccgagaaatgcttttttaaaaaacacacatcttatggcattcaccttcttggagctctaggacagtggttctcaaaatttttttctctcaggacctcttaaaaatcatcaaggaccccaaaaagcttttgggtatgtgggttatagctatcaatatttatggtactagaacttaaaagtgagaaaaatttaaaacacgagaatacataggcacacattctattcatcgtgggaaccatggtgtcaatacatatcatgtagcttctgaaaaactccactgtacacttatagaatgaagaaggcaaaaaacttttttttttttttttttgagacggagtctcgctctgtcgcccaggctggagtgcagtggcgcgatctcggctcactgcaagctccgcctctcgggttcacgccattctcctgcctcagcctcccaagtagctcggactacaggcgtcctccaccatgcctggctaatattttgtattttttagtagagacggggtttcaccgtgttagccaggatggtctcgatctcctaacctggtgatccgcccgcctcggcctcccaaagtattgggattacccgcgtgagccaccgcgcccggctgcaaataatctttctttttttctgagacagagtctcgctctgttgcccaggctggagtgcagtggcacgatctcggctcacggcacgctccgcctcccgggttcacgccattctcctgcctcagcttcccgagtagctgggactacaggggcccgccaccacgcccggctaactttttgtgtttttagtagagacggggtttcaccgtgttagccaggatggtctcgatctcctgaccttgtgatctgcccgcctcggcctcccaaagtgctgggattacaggcgtgagccaccgcgcccggcggcgaaacacgatattgtactaacatcttaattttgttataaaatctcacaaaccccctgacatagtctcagagatctgtagggccgaggttacatttggagaacccgtactctagggccaaatccattcttcttgccctggctcacttgtcccccccaccgccccgcgctggagccactgcctagttcttcagccctagatggtgctcgccagacctcctctcaatgctcatcacacacagggctattcctttcctccaatgaaccaaacgcctcccgcccacctccaggtcccagtcctctgttccctttgcctggtccacccttgccctccctgggtcgcagacgaggtcggcctcgtcattccccgcagaccgccgcgcgtccctcttgtgcggttcaccacagttgtatttaagtgatcgtgtgagtcgtcgttaaatgcctgtctccccgcggatcatgggctcctcgaggacagggactggcctgtctgtccactgctgtaaccccgcgccggcatagggacctaaggcccactggagggcgctcatcaagtagctgctggatgttgacgaaggaagcggcggcgcagctcagggatctccgagtcaggacggtcggccagacccacggggtaacgggtctaatcgtgtaggaataaagctgtattccagtgcttcc

SEQ ID NO: 248703 - protein, 243 aa, Artificial Sequence
  derived and/or modified sequence
MRPRLWLLLAAQLTVLHGNSVLQQTPAYIKVQTNKMVMLSCEAKISLSNMRIYWLRQRQAPSSDSHHEFLALWDSAKGTIHGEEVEQEKIAVFRDASRFILNLTSVKPEDSGIYFCMIVGSPELTFGKGTQLSVVDFLPTTAQPTKKSTLKKRVCRLPRPETQKGPLCSPITLGLLVAGVLVLLVSLGVAIHLCCRRRRARLRFMKQPQGEGISGTFVPQCLHGYYSNTTTSQKLLNPWILKT

SEQ ID NO: 248704 - protein, 30 aa, Artificial Sequence
  derived and/or modified sequence
MRPRLWLLLAAQLTGRRRRARLRFMKQLYK

SEQ ID NO: 248705 - DNA, 732 bp, Artificial Sequence
  derived and/or modified sequence
atgcggccgcggctttggctcctgctggctgcgcaattgaccgtgttacatggcaactcagtactacaacagacaccagcatatataaaagtccagactaacaagatggtgatgctttcatgtgaagctaaaatttccctgtctaacatgaggatctactggcttagacaaagacaggcgccctcgagcgacagccaccacgaatttttggctctttgggactctgcgaagggaacgattcacggggaagaggtggaacaagaaaagatcgctgtgttcagagatgcgtcaagatttattctgaacctcaccagtgtcaaaccagaagactccggaatctacttttgtatgatcgtggggagcccagagctcactttcgggaaaggaacccaactgtctgtggtggatttcttacctactactgcacaacccactaagaagtctactcttaaaaaacgcgtgtgccgcctgccgaggcctgaaactcagaaagggccgttgtgctctccaattaccctgggacttctcgtggcgggtgttctggtgctgctcgtgagtctcggtgtggcaattcacttatgttgccggagaaggagagcaagacttcgctttatgaaacagccacagggtgaaggcatctcaggcacctttgtaccgcaatgcctgcatgggtactactccaacacgactaccagccaaaagctgctgaacccctggatcctcaaaacttag

SEQ ID NO: 248706 - DNA, 732 bp, Artificial Sequence
  derived and/or modified sequence
atgaggccccggctgtggctgctgctggccgcccagctgactgtgctgcacggcaacagcgtgctgcagcagaccccagcctacatcaaggtgcagaccaacaagatggtgatgctgagctgtgaggccaagatcagcctgagcaacatgaggatctactggctgcggcagaggcaggcccccagcagtgacagccaccacgagttcctggccctgtgggacagcgccaagggcaccatccatggagaggaggtggagcaggagaagattgctgtgttcagagatgccagccgcttcatcctgaacctgacctctgtgaagccagaagattctggcatctacttctgcatgattgtgggcagccctgagctgaccttcggcaagggcacccagctgtctgtggtggacttcctgcccaccacagcccagcccaccaagaagagcaccctgaagaagagggtgtgccgcctgcccaggcctgagacccagaagggccccctgtgcagccccatcaccctgggcctgctggtggccggcgtgctggtgctgctggtgtccctgggcgtggccatccacctgtgctgcagaagaagaagagcccggctgcgcttcatgaagcagccccagggcgagggcatcagcggcacctttgtgccccagtgcctgcacggctactacagcaacaccaccaccagccagaagctgctgaacccctggatcctgaagacctag

SEQ ID NO: 248707 - DNA, 732 bp, Artificial Sequence
  derived and/or modified sequence
atgcggccccggctgtggctgctgctggccgcccagctgaccgtgctgcatggcaacagcgtgcttcagcagaccccggcctatatcaaagtgcagaccaataagatggtgatgctgtcatgtgaggccaaaatttctctgtcaaatatgcggatctattggcttaggcagcggcaagcacctagctccgattcacaccatgagtttttggctctttgggactctgcaaaggggacaatccacggcgaggaagtcgagcaggaaaaaatagctgtcttccgtgatgcgtcccggtttatcctgaacttgacttcagtcaaacctgaggactctgggatttacttctgtatgattgttgggagtccggagttaacattcggaaaaggcacccaactgagcgtggtggacttcctgccaaccacagctcagcctacgaagaagagcacactgaaaaaacgagtatgccggcttccacgcccagagacccaaaaggggccattatgctcgcccataacactcggactgctggtagccggtgtattggtgctgctcgtgagtctaggcgtggctatacatttgtgttgtaggaggaggcgcgcccgtctaagattcatgaagcaaccccagggggagggaataagcgggaccttcgtgcctcagtgtctgcacgggtattacagcaataccacaacctcacagaagctgctcaatccctggatactgaagacgtag

SEQ ID NO: 248708 - DNA, 732 bp, Artificial Sequence
  derived and/or modified sequence
atgcggccaagactctggctgctgctggccgctcagctaactgtgctgcacgggaattccgtcctgcagcagacaccagcatatatcaaggtgcagaccaacaaaatggttatgctgagttgcgaagccaaaatttcgctaagcaatatgaggatctactggttgagacagcgacaggccccatcgagtgactcgcaccacgagtttctggccctgtgggattccgccaagggtacgattcacggcgaggaagttgaacaggagaagatagccgtgttccgtgatgcctcccgttttattcttaacctcacctctgtgaagccagaggacagtggtatatacttttgcatgatcgttgggtccccagaacttactttcgggaagggtactcaactgagcgtggtggacttcctgccaactacagctcagcccaccaagaaatcaactcttaaaaagagagtttgtagactgccgcgtccagagactcagaaggggccactgtgtagcccaatcacactaggtcttctggttgctggggtgctcgtgctgcttgtcagtttgggagtggccattcacctctgctgtcgccgacgtcgcgctaggctgcggttcatgaaacagccacaaggggaaggtataagtggtacgtttgtgccccagtgtctgcatggttattactcaaacactaccacctcccaaaaactgctcaatccatggattcttaagacctag

SEQ ID NO: 248709 - DNA, 832 bp, Artificial Sequence
  derived and/or modified sequence
gcgactgtctccgccgagcccccggggccaggtgtcccgggcgcgccacgatgcggccgcggctgtggctcctcttggccgcgcagctgacagttctccatggcaactcagtcctccagcagacccctgcatacataaaggtgcaaaccaacaagatggtgatgctgtcctgcgaggctaaaatctccctcagtaacatgcgcatctactggctgagacagcgccaggcaccgagcagtgacagtcaccacgagttcctggccctctgggattccgcaaaagggactatccacggtgaagaggtggaacaggagaagatagctgtgtttcgggatgcaagccggttcattctcaatctcacaagcgtgaagccggaagacagtggcatctacttctgcatgatcgtcgggagccccgagctgaccttcgggaagggaactcagctgagtgtggttgatttccttcccaccactgcccagcccaccaagaagtccaccctcaagaagagagtgtgccggttacccaggccagagacccagaagggcccactttgtagccccatcacccttggcctgctggtggctggcgtcctggttctgctggtttccctgggagtggccatccacctgtgctgccggcggaggagagcccggcttcgtttcatgaaacagcctcaaggggaaggtatatcaggaacctttgtcccccaatgcctgcatggatactacagcaatactacaacctcacagaagctgcttaacccatggatcctgaaaacataggcaagaagcacaggtcctgatgagtggatctttactacttttaccagatt

SEQ ID NO: 248710 - DNA, 1096 bp, Artificial Sequence
  derived and/or modified sequence
gcgactgtctccgccgagcccccggggccaggtgtcccgggcgcgccacgatgcggccgcggctgtggctcctcttggccgcgcagctgacagttctccatggcaactcagtcctccagcagacccctgcatacataaaggtgcaaaccaacaagatggtgatgctgtcctgcgaggctaaaatctccctcagtaacatgcgcatctactggctgagacagcgccaggcaccgagcagtgacagtcaccacgagttcctggccctctgggattccgcaaaagggactatccacggtgaagaggtggaacaggagaagatagctgtgtttcgggatgcaagccggttcattctcaatctcacaagcgtgaagccggaagacagtggcatctacttctgcatgatcgtcgggagccccgagctgaccttcgggaagggaactcagctgagtgtggttgatttccttcccaccactgcccagcccaccaagaagtccaccctcaagaagagagtgtgccggttacccaggccagagacccagaagggcccactttgtagccccatcacccttggcctgctggtggctggcgtcctggttctgctggtttccctgggagtggccatccacctgtgctgccggcggaggagagcccggcttcgtttcatgaaacaactaagattacatccactggagaaatgttccagaatggactactgaatatacaggcctcaaggggaaggtatatcaggaacctttgtcccccaatgcctgcatggatactacagcaatactacaacctcacagaagctgcttaacccatggatcctgaaaacataggcaagaagcacaggtcctgatgagtggatctttactacttttaccagattcctccctcgctcagagggatcctcccacacacccagcagagacttctctgccaccatcaaccccccaagtcatagggggctcaagttctgccctggtgagctgtggcccccatccttgtgaaccccaaagtgtcccccttgtggaaccaaatgtatccatcttgaataaatttgcccaaaatcctaaagaccgggaaaagggaaccattg

SEQ ID NO: 248711 - DNA, 732 bp, Artificial Sequence
  derived and/or modified sequence
atgagacccagactgtggctgctgctggccgcccagctgaccgtgctgcacggcaacagcgtgctgcagcagacccccgcctacatcaaggtgcagaccaacaagatggtgatgctgagctgcgaggccaagatcagcctgagcaacatgagaatctactggctgagacagagacaggcccccagcagcgacagccaccacgagttcctggccctgtgggacagcgccaagggcaccatccacggcgaggaggtggagcaggagaagatcgccgtgttcagagacgccagcagattcatcctgaacctgaccagcgtgaagcccgaggacagcggcatctacttctgcatgatcgtgggcagccccgagctgaccttcggcaagggcacccagctgagcgtggtggacttcctgcccaccaccgcccagcccaccaagaagagcaccctgaagaagagagtgtgcagactgcccagacccgagacccagaagggccccctgtgcagccccatcaccctgggcctgctggtggccggcgtgctggtgctgctggtgagcctgggcgtggccatccacctgtgctgcagaagaagaagagccagactgagattcatgaagcagccccagggcgagggcatcagcggcaccttcgtgccccagtgcctgcacggctactacagcaacaccaccaccagccagaagctgctgaacccctggatcctgaagacctag

SEQ ID NO: 248712 - protein, 490 aa, Artificial Sequence
  derived and/or modified sequence
MSSCVSSQPSSNRAAPQDELGGRGSSSSESQKPCEALRGLSSLSIHLGMESFIVVTECEPGCAVDLGLARDRPLEADGQEVPLDTSGSQARPHLSGRKLSLQERSQGGLAAGGSLDMNGRCICPSLPYSPVSSPQSSPRLPRRPTVESHHVSITGMQDCVQLNQYTLKDEIGKGSYGVVKLAYNENDNTYYAMKVLSKKKLIRQAGFPRRPPPRGTRPAPGGCIQPRGPIEQVYQEIAILKKLDHPNVVKLVEVLDDPNEDHLYMVFELVNQGPVMEVPTLKPLSEDQARFYFQDLIKGIEYLHYQKIIHRDIKPSNLLVGEDGHIKIADFGVSNEFKGSDALLSNTVGTPAFMAPESLSETRKIFSGKALDVWAMGVTLYCFVFGQCPFMDERIMCLHSKIKSQALEFPDQPDIAEDLKDLITRMLDKNPESRIVVPEIKILVKTMIRKRSFGNPFEGSRREERSLSAPGNLLTKKPTRECESLSELKT

SEQ ID NO: 248713 - DNA, 150 bp, Artificial Sequence
  derived and/or modified sequence
atgagcagctgcgtgagcagccagcccagcagcaacagagccgccccccaggacgagctgggcggcagaggcagcagcagcagcgagagccagaagccctgcgaggccctgagaggcctgagcagcctgagcatccacctgggcatgtag

SEQ ID NO: 248714 - DNA, 1473 bp, Artificial Sequence
  derived and/or modified sequence
atgagcagctgcgtgagcagccagcccagcagcaacagagccgccccccaggacgagctgggcggcagaggcagcagcagcagcgagagccagaagccctgcgaggccctgagaggcctgagcagcctgagcatccacctgggcatggagagcttcatcgtggtgaccgagtgcgagcccggctgcgccgtggacctgggcctggccagagacagacccctggaggccgacggccaggaggtgcccctggacaccagcggcagccaggccagaccccacctgagcggcagaaagctgagcctgcaggagagaagccagggcggcctggccgccggcggcagcctggacatgaacggcagatgcatctgccccagcctgccctacagccccgtgagcagcccccagagcagccccagactgcccagaagacccaccgtggagagccaccacgtgagcatcaccggcatgcaggactgcgtgcagctgaaccagtacaccctgaaggacgagatcggcaagggcagctacggcgtggtgaagctggcctacaacgagaacgacaacacctactacgccatgaaggtgctgagcaagaagaagctgatcagacaggccggcttccccagaagacccccccccagaggcaccagacccgcccccggcggctgcatccagcccagaggccccatcgagcaggtgtaccaggagatcgccatcctgaagaagctggaccaccccaacgtggtgaagctggtggaggtgctggacgaccccaacgaggaccacctgtacatggtgttcgagctggtgaaccagggccccgtgatggaggtgcccaccctgaagcccctgagcgaggaccaggccagattctacttccaggacctgatcaagggcatcgagtacctgcactaccagaagatcatccacagagacatcaagcccagcaacctgctggtgggcgaggacggccacatcaagatcgccgacttcggcgtgagcaacgagttcaagggcagcgacgccctgctgagcaacaccgtgggcacccccgccttcatggcccccgagagcctgagcgagaccagaaagatcttcagcggcaaggccctggacgtgtgggccatgggcgtgaccctgtactgcttcgtgttcggccagtgccccttcatggacgagagaatcatgtgcctgcacagcaagatcaagagccaggccctggagttccccgaccagcccgacatcgccgaggacctgaaggacctgatcaccagaatgctggacaagaaccccgagagcagaatcgtggtgcccgagatcaagatcctggtgaagaccatgatcagaaagagaagcttcggcaaccccttcgagggcagcagaagagaggagagaagcctgagcgcccccggcaacctgctgaccaagaagcccaccagagagtgcgagagcctgagcgagctgaagacctag

SEQ ID NO: 248715 - DNA, 378 bp, Artificial Sequence
  derived and/or modified sequence
atgagcagctgcgtgagcagccagcccagcagcaacagagccgccccccaggacgagctgggcggcagaggcagcagcagcagcgagagccagaagccctgcgaggccctgagaggcctgagcagcctgagcatccacctgggcatggagagcttcatcgtggtgaccgagtgcgagcccggctgcgccgtggacctgggcctggccagagacagacccctggaggccgacggccaggaggtgcccctggacaccagcggcagccaggccagaccccacctgagcggcagaaagctgagcctgcaggagagaagccagggcggcctggccgccggcggcagcctggacatgaacggcagatgcatctgccccagctag

SEQ ID NO: 248716 - DNA, 264 bp, Artificial Sequence
  derived and/or modified sequence
atgagcagctgcgtgagcagccagcccagcagcaacagagccgccccccaggacgagctgggcggcagaggcagcagcagcagcgagagccagaagccctgcgaggccctgagaggcctgagcagcctgagcatccacctgggcatggagagcttcatcgtggtgaccgagtgcgagcccggctgcgccgtggacctgggcctggccagagacagacccctggaggccgacggccaggaggtgcccctggacaccagcggctag

SEQ ID NO: 248717 - DNA, 150 bp, Artificial Sequence
  derived and/or modified sequence
atgtcaagttgcgtgagttcacagcctagttctaatcgcgccgccccgcaagacgagctaggcggacggggttcctcatcaagcgaaagccagaagccctgtgaggccctgcgcgggttgtcatctctctccatccatctcggtatgtag

SEQ ID NO: 248718 - DNA, 1473 bp, Artificial Sequence
  derived and/or modified sequence
atgtcatcatgcgtgagttctcagcctagctcaaatcgggcagcccctcaggacgagctgggtggacgaggctcatcttcgagcgaatcgcagaaaccgtgtgaggctctccggggtttatcttctctgtcaatacacttaggaatggagtcatttatcgttgtgaccgaatgcgagccaggatgcgctgtagatctgggtctggcccgtgaccgcccactggaggcagatggtcaagaagtgccactggataccagcggctcacaggcccggccacatttgtcagggaggaagctgtccctgcaggaaaggtcccaaggaggcttagccgccggcggtagcctggatatgaacggcagatgcatctgcccttctctgccttatagtcctgtgagtagcccccagtcaagtcccagactgccccggaggccaaccgttgaatctcaccacgtgagtatcacaggtatgcaagattgcgtgcagttgaatcagtataccctgaaagacgagatcgggaagggttcctatggtgttgttaagttagcatataacgaaaatgacaacacgtactacgcaatgaaagtgctctccaagaagaagttgatcagacaagccggatttccaaggcgtccccccccccgcgggaccagacccgctcctggtggctgcatccagccacggggacctatcgaacaggtgtaccaggaaatcgctatcctcaagaaacttgaccatccgaacgtggtgaaactggtcgaagtcttggacgaccctaatgaagaccacttgtacatggtgttcgaattggtgaatcagggacccgttatggaggttcctactcttaaacccctgtccgaggatcaggctagattttatttccaggatctcattaagggtattgagtacttgcactaccaaaagattatccaccgagatattaaaccaagcaacctccttgtgggggaagatgggcacatcaagatcgctgatttcggcgtctcaaatgagtttaagggcagcgacgctctgctttctaacacagtcggcacccctgcgtttatggcaccagaaagcctgtctgaaacacgcaaaattttctccggtaaagctctggatgtgtgggccatgggagttacactctactgctttgtgttcgggcagtgccccttcatggacgaaagaatcatgtgtctccacagcaaaatcaagtcgcaggctcttgagtttcccgaccaacctgatatcgctgaggatctcaaggacctcataaccaggatgttagataagaatcccgagtcccgcattgtagtgccagaaatcaaaattctggtcaagacaatgatcagaaagcggtcttttggtaacccattcgaaggaagtcggcgagaagagcgttccctgtctgccccaggcaatcttttgactaaaaagccgaccagagagtgcgagtctctctcggaactaaagacctag

SEQ ID NO: 248719 - DNA, 378 bp, Artificial Sequence
  derived and/or modified sequence
atgtcatcttgtgtctccagccaaccaagcagcaatcgagccgccccgcaggacgagctgggggggaggggctcttcctcaagcgagagccagaaaccctgtgaagccctgaggggcttgtctagcttgagcattcacctcggaatggaatctttcatcgtggttacagagtgtgagccaggctgtgccgtggatctcgggcttgcacgcgaccgacccttggaggcagacggccaggaagtgcccctcgatacaagtggaagtcaggctaggcctcatctcagcggccgtaaattgagcctgcaggagcgcagtcagggaggcctggcggctggcggtagcctcgacatgaatggacggtgcatctgcccaagttag

SEQ ID NO: 248720 - DNA, 264 bp, Artificial Sequence
  derived and/or modified sequence
atgtcctcttgtgtgagtagccaaccctccagcaatagagccgcgcctcaagacgaattgggcgggaggggcagttcgagtagcgagtctcagaagccttgtgaagccctaagaggactgtccagtctttcaatccacctggggatggaatcctttattgttgttacagaatgtgaacctggatgtgcggtggatctgggcctggcacgcgataggcctcttgaggccgatggacaggaggtacctctggacacgtcggggtag

SEQ ID NO: 248721 - DNA, 150 bp, Artificial Sequence
  derived and/or modified sequence
atgagcagctgtgtgagcagccagcccagcagcaacagagctgccccccaggatgagctgggcggccggggcagcagcagcagcgagagccagaagccctgtgaggccctgcggggcctgagcagcctgagcatccacctgggcatgtag

SEQ ID NO: 248722 - DNA, 1473 bp, Artificial Sequence
  derived and/or modified sequence
atgagcagctgtgtgagcagccagcccagcagcaacagagctgccccccaggatgagctgggcggccggggcagcagcagcagcgagagccagaagccctgtgaggccctgcggggcctgagcagcctgagcatccacctgggcatggagagcttcatcgtggtgacagaatgtgagcccggctgtgctgtggacctgggcctggcccgggaccggcccctggaggctgatggccaggaggtgcccctggacaccagcggcagccaggcccggccccacctgagcggcaggaagctgagcctgcaggagaggagccagggcggcctggccgccggcggcagcctggacatgaatggccgctgcatctgccccagcctgccctacagccctgtgagcagcccccagagcagcccccggctgccccggcggcccaccgtggagagccaccacgtgtccatcaccggcatgcaggactgtgtgcagctgaaccagtacaccctgaaggatgaaattggcaagggcagctatggagtggtgaagctggcctacaatgaaaatgacaacacctactatgccatgaaggtgctgagcaagaagaagctgatccggcaggccggcttcccccggcggcccccaccccggggcaccaggcctgcccctgggggctgcatccagccccggggccccatcgagcaggtgtaccaggagatcgccatcctgaagaagctggaccaccccaacgtggtgaagctggtggaggtgctggatgaccccaatgaagaccacctgtacatggtgtttgagctggtgaaccagggccctgtgatggaggtgcccaccctgaagcccctgtctgaggaccaggcccgcttctacttccaggacctgatcaagggcatcgagtacctgcactaccagaagatcatccaccgggacatcaagcccagcaacctgctggtgggggaggatggccacatcaagattgctgactttggagtgtccaatgagttcaagggcagtgatgccctgctgagcaacacagtgggcaccccagccttcatggcccctgagagcctgtctgagaccaggaagatcttcagcggcaaggccctggatgtgtgggccatgggcgtgaccctgtactgctttgtgtttggccagtgccccttcatggatgagcgcatcatgtgcctgcacagcaagatcaagagccaggccctggagttcccagaccagcctgacattgctgaggacctgaaggacctgatcaccaggatgctggacaagaaccctgagagcagaattgtggtgcctgagatcaagatcctggtgaagaccatgatcaggaagaggagctttggaaacccctttgagggcagcagaagagaggagaggagcctgagcgcccctggcaacctgctgaccaagaagcccaccagagaatgtgagagcctgtctgagctgaagacctag

SEQ ID NO: 248723 - DNA, 378 bp, Artificial Sequence
  derived and/or modified sequence
atgagcagctgtgtgagcagccagcccagcagcaacagagctgccccccaggatgagctgggcggccggggcagcagcagcagcgagagccagaagccctgtgaggccctgcggggcctgagcagcctgagcatccacctgggcatggagagcttcatcgtggtgacagaatgtgagcccggctgtgctgtggacctgggcctggcccgggaccggcccctggaggctgatggccaggaggtgcccctggacaccagcggcagccaggcccggccccacctgagcggcaggaagctgagcctgcaggagaggagccagggcggcctggccgccggcggcagcctggacatgaatggccgctgcatctgccccagctag

SEQ ID NO: 248724 - DNA, 264 bp, Artificial Sequence
  derived and/or modified sequence
atgagcagctgtgtgagcagccagcccagcagcaacagagctgccccccaggatgagctgggcggccggggcagcagcagcagcgagagccagaagccctgtgaggccctgcggggcctgagcagcctgagcatccacctgggcatggagagcttcatcgtggtgacagaatgtgagcccggctgtgctgtggacctgggcctggcccgggaccggcccctggaggctgatggccaggaggtgcccctggacaccagcggctag

SEQ ID NO: 248725 - DNA, 150 bp, Artificial Sequence
  derived and/or modified sequence
atgagcagctgcgtgagcagccagcccagcagcaaccgggccgccccccaggacgaactgggaggccggggatcatcttcctctgagtcccagaaaccatgcgaagctctaaggggcctgtccagcttgagcatacacctggggatgtag

SEQ ID NO: 248726 - DNA, 1473 bp, Artificial Sequence
  derived and/or modified sequence
atgagcagctgcgtgagcagccagcccagcagcaaccgggccgccccacaggatgagctcggcgggagaggatcttcatcttctgaaagtcagaagccatgcgaggcgctgcgtgggctttcgtcgctgagcattcatttgggcatggaaagtttcatcgtggtaactgagtgtgagcccggctgtgccgtcgatctaggcctcgcccgtgaccgtcctcttgaggcggatggacaagaagtccctctggacacctctggctctcaggccaggcctcacttgtctggccggaaattgtctctccaggagcgcagccagggcggcctcgccgcaggcggcagtttagatatgaatggccgttgtatatgtccttccttgccttactcacctgtgagctccccccagtctagccctcggcttcctcgacgccctactgttgaatcccaccacgtgtctataacaggcatgcaagattgtgttcagttgaatcagtacacactgaaggacgaaatcggcaagggctcctacggtgtagtaaagctggcctataatgagaatgacaatacttactacgcaatgaaagttcttagcaagaaaaagcttatcagacaggccgggtttccccgaagaccacctcccagaggaacccgacccgccccagggggctgtattcagcctagaggtccgatcgagcaggtgtatcaggaaatcgccattctgaagaaactcgaccatcctaacgttgtgaaactggttgaggtcctggacgatcccaacgaggaccacctctatatggtgtttgagcttgttaaccaggggcccgtcatggaagtacctacgctgaagcctttgagtgaagaccaggctcgcttttactttcaagacctgatcaaagggattgaatacctgcattaccagaagataatccacagagacatcaaaccatctaacctattggttggcgaggatgggcacatcaaaatcgcagactttggcgtgagcaacgagtttaaaggatccgacgctttactttccaacaccgtgggaacgccagcatttatggctcctgagtcactttcagaaacaaggaagatattttctgggaaggccctcgacgtgtgggcaatgggggtaacattatactgcttcgtgttcgggcagtgtccctttatggacgagagaatcatgtgtctccattccaaaatcaaaagtcaagccttggaatttcccgaccagcccgatatcgcggaggatctcaaggacctgattacacgtatgcttgacaagaacccagagagccgaattgtagtgccagagataaaaatcctggtgaagacgatgattcgcaagcgtagtttcggtaacccattcgaagggagtcgccgcgaggaaaggtccctgtctgcaccaggaaacctgttgactaaaaaacccacccgggagtgcgagtctctatcagagcttaaaacttag

SEQ ID NO: 248727 - DNA, 378 bp, Artificial Sequence
  derived and/or modified sequence
atgagcagctgcgtgagcagccagcccagcagcaaccgggccgcccctcaggacgagctagggggtcgtgggagtagttcctcggagtcccagaaaccatgtgaggcactgcggggtctttcatcacttagcattcacttaggcatggaatccttcatcgttgtcaccgaatgtgagccaggctgcgccgtcgatttgggcctggcccgggataggccgctagaagcggatggccaggaagtgccgctcgatacatctggttcacaggctaggccccacctgtccggccgaaagctgtcactgcaagaacgaagccagggaggcctagcggcagggggatccctcgatatgaatggtagatgcatatgcccaagttag

SEQ ID NO: 248728 - DNA, 264 bp, Artificial Sequence
  derived and/or modified sequence
atgagcagctgcgtgagcagccagcccagcagcaaccgggccgcccctcaggacgaactgggcggacgcggatcaagttcgtctgaatctcaaaagccatgtgaagctctccggggattgtctagcctatccatccacttgggtatggagagtttcatcgtcgtgaccgagtgcgaacccgggtgtgcagtagacttgggcctcgctcgcgatcgtccactcgaagctgacgggcaggaggtacctttggacaccagtgggtag

SEQ ID NO: 248729 - DNA, 150 bp, Artificial Sequence
  derived and/or modified sequence
atgtcctcctgcgtgagttcccaacccagtagtaatcgcgctgctcctcaggacgagctgggcggaagaggttcctctagttctgaatcacagaaaccttgcgaggccctccgcggactttcaagtctgagcattcacctgggcatgtag

SEQ ID NO: 248730 - DNA, 1473 bp, Artificial Sequence
  derived and/or modified sequence
atgtcaagctgtgtaagctcccaaccttccagcaaccgagccgctcctcaggatgagctgggtgggagaggcagctcatcctccgaaagccagaagccatgcgaggcgctcagggggctgtcatcattgtctatacatctgggaatggagtccttcatcgtggtgacagaatgtgaaccaggctgcgcagtggaccttgggctggcacgtgacagacctctggaggctgacgggcaggaagtcccactggacacaagcggcagccaagcacggcctcacctgagtggcagaaaactgtcattacaagaaaggagccagggcggactcgccgcaggaggttcactggatatgaatggtcgttgcatctgtccatcgttgccctattcacctgtgtcgagtcctcagtcctcccctaggctccctcggaggccaactgtggagagtcaccatgtgtcaattactggcatgcaggattgcgtacagttgaaccagtatactttgaaggatgagattggcaagggaagttatggtgtggtgaagcttgcctacaacgagaatgacaatacttactatgctatgaaggtactgagtaagaaaaaacttattcgacaggcaggcttccctcgcaggcctcctccacgaggcacccgccctgccccaggtggttgtatccaaccaagagggcctatcgagcaggtctatcaggagatcgcaatactcaagaaactggatcaccctaatgtggtgaaactggtagaagtgctggacgatcctaatgaggatcacctctacatggtcttcgaattggttaatcagggcccagtcatggaggttcccacactcaagccattgtcggaagatcaagcccgattctacttccaggacctgattaaggggatcgagtacctgcattaccagaaaattatccacagggacatcaagccaagtaacttgcttgtgggagaagacgggcacatcaaaatcgctgactttggtgtcagcaatgagtttaagggttctgacgccctgttgagcaatactgttgggaccccggctttcatggcgccagagtccttatccgaaactaggaaaatcttctccggaaaggcactcgacgtttgggcgatgggagtgaccctgtactgtttcgtatttggccagtgtcccttcatggacgaacggatcatgtgccttcactccaaaattaaaagtcaggcactcgagttcccagaccaacccgatattgcagaagacctcaaagatctgatcacaagaatgttagacaagaatcctgagagtcggatcgtggtgcccgagatcaagatactggtgaagaccatgatcagaaaaagaagctttggcaatccattcgaaggtagccgtagggaagaaaggagtcttagtgcgccaggcaatctgctaacgaaaaagccgactagggagtgtgagtcactgtcagaactgaagacttag

SEQ ID NO: 248731 - DNA, 378 bp, Artificial Sequence
  derived and/or modified sequence
atgtcctcctgtgtaagtagccagccatccagcaacagagccgcacctcaggatgagctcggcggaaggggtagcagcagctcagagagtcagaaaccctgtgaggctcttcgtggtctttcaagtctcagcatccatctgggcatggaatccttcattgtggtgacagaatgtgagccagggtgtgcagtggacctcgggctagctcgagatcgacctctggaagccgacggtcaggaagtgcctctcgatacttccgggagtcaagctcgcccacacctcagcggaagaaaactttcactgcaggagcggagtcaggggggactcgccgctggcggttccctcgacatgaacggaaggtgtatatgtccatcctag

SEQ ID NO: 248732 - DNA, 264 bp, Artificial Sequence
  derived and/or modified sequence
atgtcatcatgtgtctcatctcaaccgtctagcaatcgcgcagcaccacaggatgagctcggtggacgcggaagttcttccagcgaatcccagaagccttgcgaggccctccgtggattaagttctttaagtatccacctcggaatggagtcctttattgtcgtgacagagtgtgagcccggttgtgctgtggacttgggtctggcacgtgaccgccctctcgaagccgacggacaagaagtgcccctcgatacaagcggttag

SEQ ID NO: 248733 - DNA, 2587 bp, Artificial Sequence
  derived and/or modified sequence
cccatctctacgaaaaatacaaaaattagccaagtatggtggccggcgcctgtaatcccagctactcgggagactgaggcagagaactgcttgaacctgggaggcagaggttgcagtgatccgagatcgcgtcactgcactccagcgtgggcgacagagcgagactccgtttcagaaaagaaaaaaaaaaaaaaaaaaaagggagtcggggtggagctctcattggctcgttgcatgtgagtgtccctacggcctagaaatacaagagaagcacatcggaacgggctggaaatccacccagttaactagagggctttgaaccttttattaacttggaggttgactctcctgtcaactcgattcccttttggctgtttggcagggtcagtgagacatcccctgggtcgctcgaccccgtaggacggttcagggagccctccaggtcttcgtttctcctcttccccgcacagtgctgttatccagctgggggatccaacgcacacttaaggctccagcaaagtggctccgctgccggatgggagtgccccagtgtgctggatgaagctggcgcatgcaccatgtcatcatgtgtctctagccagcccagcagcaaccgggccgccccccaggatgagctggggggcaggggcagcagcagcagcgaaagccagaagccctgtgaggccctgcggggcctctcatccttgagcatccacctgggcatggagtccttcattgtggtcaccgagtgtgagccgggctgtgctgtggacctcggcttggcgcgggaccggcccctggaggccgatggccaagaggtcccccttgacacctccgggtcccaggcccggccccacctctccggtcgcaagctgtctctgcaagagcggtcccagggtgggctggcagccggtggcagcctggacatgaacggacgctgcatctgcccgtccctgccctactcacccgtcagctccccgcagtcctcgcctcggctgccccggcggccgacagtggagtctcaccacgtctccatcacgggtatgcaggactgtgtgcagctgaatcagtataccctgaaggatgaaattggaaagggctcctatggtgtcgtcaagttggcctacaatgaaaatgacaatacctactatgcaatgaaggtgctgtccaaaaagaagctgatccggcaggccggctttccacgtcgccctccaccccgaggcacccggccagctcctggaggctgcatccagcccaggggccccattgagcaggtgtaccaggaaattgccatcctcaagaagctggaccaccccaatgtggtgaagctggtggaggtcctggatgaccccaatgaggaccatctgtacatggtgttcgaactggtcaaccaagggcccgtgatggaagtgcccaccctcaaaccactctctgaagaccaggcccgtttctacttccaggatctgatcaaaggcatcgagtacttacactaccagaagatcatccaccgtgacatcaaaccttccaacctcctggtcggagaagatgggcacatcaagatcgctgactttggtgtgagcaatgaattcaagggcagtgacgcgctcctctccaacaccgtgggcacgcccgccttcatggcacccgagtcgctctctgagacccgcaagatcttctctgggaaggccttggatgtttgggccatgggtgtgacactatactgctttgtctttggccagtgcccattcatggacgagcggatcatgtgtttacacagtaagatcaagagtcaggccctggaatttccagaccagcccgacatagctgaggacttgaaggacctgatcacccgtatgctggacaagaaccccgagtcgaggatcgtggtgccggaaatcaagatcctggtgaagaccatgatacgtaaacgctcctttgggaacccattcgagggcagccggcgggaggaacgctcactgtcagcgcctggaaacttgctcaccaaaaaaccaaccagggaatgtgagtccctgtctgagctcaagacctagaaaataagtccccttcctgcctgttgcaaagtaacgtaagagttccctcacccgagtggatgcagaccttcttgctgtcagccacccttccttcatacacatagccagcccaggtgaccagaacctcccaggacagatgaggctttgtgtccttatgagactgggagaacctgctgggcacccctgctgcaggtgctgtggtgggtggggaccccactgcccttcccactgagcacatcatggctacctgacttggtgggagctccaggcagtcacttctgtttcttaaacatagctttactgaggtacaattcacataccatgtaattcacccacgggaagtgtatgattcagtggtttctaatacagacttctgcagccattaccaccgtcaactttacgacattttcatcagcccaagaagacaccctacactccttagctgtccccatccaactcccccaccccagtaaccactcagaataggtatggatttgcctattctggacgtttcgtataaatggcgtcatacacta

SEQ ID NO: 248734 - DNA, 563 bp, Artificial Sequence
  derived and/or modified sequence
aacgcacacttaaggctccagcaaagtaagtgccaaaaaggggagaatgggaagaatatgctgtatttcacaaaaagcatctaagtagccatctggaaaagccagaatgaacttcaatggtgcatccaggtggctccgctgccggatgggagtgccccagtgtgctggatgaagctggcgcatgcaccatgtcatcatgtgtctctagccagcccagcagcaaccgggccgccccccaggatgagctggggggcaggggcagcagcagcagcgaaagccagaagccctgtgaggccctgcggggcctctcatccttgagcatccacctgggcatggagtccttcattgtggtcaccgagtgtgagccgggctgtgctgtggacctcggcttggcgcgggaccggcccctggaggccgatggccaagaggtcccccttgacacctccgggtcccaggcccggccccacctctccggtcgcaagctgtctctgcaagagcggtcccagggtgggctggcagccggtggcagcctggacatgaacggacgctgcatctgcccgtcc

SEQ ID NO: 248735 - DNA, 543 bp, Artificial Sequence
  derived and/or modified sequence
gagtcggtggtggcccaaagtccaggccgcatccaccgcccggcgcctagcgcaggggcagcagccgggtcgccacaggaggggccccgggtgttcttgccggcttgggggaactttcccagggtcagcccggaggcgccctgcagccccggcatttggctaaacaaagcaagcgctgccggcgcggcccgcccgagggcgccgcgggaagaacctgggcaggtggctccgctgccggatgggagtgccccagtgtgctggatgaagctggcgcatgcaccatgtcatcatgtgtctctagccagcccagcagcaaccgggccgccccccaggatgagctggggggcaggggcagcagcagcagcgaaagccagaagccctgtgaggccctgcggggcctctcatccttgagcatccacctgggcatggagtccttcattgtggtcaccgagtgtgagccgggctgtgctgtggacctcggcttggcgcgggaccggcccctggaggccgatggccaagaggtcccccttgacacctccgggt

SEQ ID NO: 248736 - protein, 926 aa, Artificial Sequence
  derived and/or modified sequence
MTTKDYPSLWGFGTTKTFKIPIEHLDFKYIEKCSDVKHLEKILCVLRSGEEGYYPELTEFCEKHLQALAPESRALRKDKPAATAASFTAEEWEKIDGDIKSWVSEIKKEEDKMHFHETETFPAMKDNLPPVRGSNSCLHVGKEKYSKRPTKKKTPRDYAEWDKFDVEKECLKIDEDYKEKTVIDKSHLSKIETRIDTAGLTEKEKDFLATREKEKGNEAFNSGDYEEAVMYYTRSISALPTVVAYNNRAQAEIKLQNWNSAFQDCEKVLELEPGNVKALLRRATTYKHQNKLREATEDLSKVLDVEPDNDLAKKTLSEVERDLKNSEAASETQTKGKRMVIQEIENSEDEEGKSGRKHEDGGGDKKPAEPAGAARAAQPCVMGNIQKKLTGKAEGGKRPARGAPQRGQTPEAGADKRSPRRASAAAAAGGGATGHPGGGQGAENPAGLKSQGNELFRSGQFAEAAGKYSAAIALLEPAGSEIADDLSILYSNRAACYLKEGNCSGCIQDCNRALELHPFSMKPLLRRAMAYETLEQYGKAYVDYKTVLQIDCGLQLANDSVNRLSRILMELDGPNWREKLSPIPAVPASVPLQAWHPAKEMISKQAGDSSSHRQQGITDEKTFKALKEEGNQCVNDKNYKDALSKYSECLKINNKECAIYTNRALCYLKLCQFEEAKQDCDQALQLADGNVKAFYRRALAHKGLKNYQKSLIDLNKVILLDPSIIEAKMELEEVTRLLNLKDKTAPFNKEKERRKIEIQEVNEGKEEPGRPAGEVSMGCLASEKGGKSSRSPEDPEKLPIAKPNNAYEFGQIINALSTRKDKEACAHLLAITAPKDLPMFLSNKLEGDTFLLLIQSLKNNLIEKDPSLVYQHLLYLSKAERFKMMLTLISKGQKELIEQLFEDLSDTPNNHFTLEDIQALKRQYEL

SEQ ID NO: 248737 - DNA, 2781 bp, Artificial Sequence
  derived and/or modified sequence
atgaccaccaaggactaccccagcctgtggggcttcggcaccaccaagaccttcaagatccccatcgagcacctggacttcaagtacatcgagaagtgcagcgacgtgaagcacctggagaagatcctgtgcgtgctgagaagcggcgaggagggctactaccccgagctgaccgagttctgcgagaagcacctgcaggccctggcccccgagagcagagccctgagaaaggacaagcccgccgccaccgccgccagcttcaccgccgaggagtgggagaagatcgacggcgacatcaagagctgggtgagcgagatcaagaaggaggaggacaagatgcacttccacgagaccgagaccttccccgccatgaaggacaacctgccccccgtgagaggcagcaacagctgcctgcacgtgggcaaggagaagtacagcaagagacccaccaagaagaagacccccagagactacgccgagtgggacaagttcgacgtggagaaggagtgcctgaagatcgacgaggactacaaggagaagaccgtgatcgacaagagccacctgagcaagatcgagaccagaatcgacaccgccggcctgaccgagaaggagaaggacttcctggccaccagagagaaggagaagggcaacgaggccttcaacagcggcgactacgaggaggccgtgatgtactacaccagaagcatcagcgccctgcccaccgtggtggcctacaacaacagagcccaggccgagatcaagctgcagaactggaacagcgccttccaggactgcgagaaggtgctggagctggagcccggcaacgtgaaggccctgctgagaagagccaccacctacaagcaccagaacaagctgagagaggccaccgaggacctgagcaaggtgctggacgtggagcccgacaacgacctggccaagaagaccctgagcgaggtggagagagacctgaagaacagcgaggccgccagcgagacccagaccaagggcaagagaatggtgatccaggagatcgagaacagcgaggacgaggagggcaagagcggcagaaagcacgaggacggcggcggcgacaagaagcccgccgagcccgccggcgccgccagagccgcccagccctgcgtgatgggcaacatccagaagaagctgaccggcaaggccgagggcggcaagagacccgccagaggcgccccccagagaggccagacccccgaggccggcgccgacaagagaagccccagaagagccagcgccgccgccgccgccggcggcggcgccaccggccaccccggcggcggccagggcgccgagaaccccgccggcctgaagagccagggcaacgagctgttcagaagcggccagttcgccgaggccgccggcaagtacagcgccgccatcgccctgctggagcccgccggcagcgagatcgccgacgacctgagcatcctgtacagcaacagagccgcctgctacctgaaggagggcaactgcagcggctgcatccaggactgcaacagagccctggagctgcaccccttcagcatgaagcccctgctgagaagagccatggcctacgagaccctggagcagtacggcaaggcctacgtggactacaagaccgtgctgcagatcgactgcggcctgcagctggccaacgacagcgtgaacagactgagcagaatcctgatggagctggacggccccaactggagagagaagctgagccccatccccgccgtgcccgccagcgtgcccctgcaggcctggcaccccgccaaggagatgatcagcaagcaggccggcgacagcagcagccacagacagcagggcatcaccgacgagaagaccttcaaggccctgaaggaggagggcaaccagtgcgtgaacgacaagaactacaaggacgccctgagcaagtacagcgagtgcctgaagatcaacaacaaggagtgcgccatctacaccaacagagccctgtgctacctgaagctgtgccagttcgaggaggccaagcaggactgcgaccaggccctgcagctggccgacggcaacgtgaaggccttctacagaagagccctggcccacaagggcctgaagaactaccagaagagcctgatcgacctgaacaaggtgatcctgctggaccccagcatcatcgaggccaagatggagctggaggaggtgaccagactgctgaacctgaaggacaagaccgcccccttcaacaaggagaaggagagaagaaagatcgagatccaggaggtgaacgagggcaaggaggagcccggcagacccgccggcgaggtgagcatgggctgcctggccagcgagaagggcggcaagagcagcagaagccccgaggaccccgagaagctgcccatcgccaagcccaacaacgcctacgagttcggccagatcatcaacgccctgagcaccagaaaggacaaggaggcctgcgcccacctgctggccatcaccgcccccaaggacctgcccatgttcctgagcaacaagctggagggcgacaccttcctgctgctgatccagagcctgaagaacaacctgatcgagaaggaccccagcctggtgtaccagcacctgctgtacctgagcaaggccgagagattcaagatgatgctgaccctgatcagcaagggccagaaggagctgatcgagcagctgttcgaggacctgagcgacacccccaacaaccacttcaccctggaggacatccaggccctgaagagacagtacgagctgtag

SEQ ID NO: 248738 - DNA, 2781 bp, Artificial Sequence
  derived and/or modified sequence
atgactacgaaagattacccctccctgtgggggttcggcaccacgaagacatttaagattcctattgagcatctggattttaagtatattgaaaagtgctcagacgtgaaacacctagagaagatcctgtgcgtgttgaggtctggcgaggaggggtactaccctgaactgactgagttctgtgaaaaacaccttcaggccttagctcctgagagcagggcccttagaaaggacaagccggccgcaacggcagcgagcttcactgccgaagagtgggaaaaaatagacggcgatattaagtcatgggtgagcgagattaaaaaagaggaggataagatgcacttccacgaaacagagaccttcccagctatgaaggataacctaccacctgtgcgcggtagcaacagttgcctgcatgtcggcaaggagaaatatagcaaaaggcctactaagaaaaagacaccacgagattatgctgagtgggacaagtttgatgtagaaaaggagtgtcttaaaatcgatgaagattacaaagagaaaacagttatcgacaagagccatctgagtaagatagagacccgtatcgacaccgccggactcaccgaaaaagagaaagactttctggctacccgggaaaaggaaaagggcaatgaggcattcaatagtggcgattacgaggaagcggtcatgtactatacccggagcatctcagcgctgcccaccgtcgtcgcttacaacaacagagcacaggctgagatcaaactgcaaaattggaacagcgcctttcaagactgtgagaaagtcctcgagctggaacccgggaacgtgaaggccttgcttcgcagagcaactacctacaagcaccaaaataaattgagagaggcaactgaggacctgtctaaggtgctggacgtcgagcctgataatgacctggcaaaaaaaacgctctctgaagtggaacgagatttgaaaaactcagaagcagccagcgagactcagacgaaggggaaaagaatggtgattcaagagatcgaaaactctgaggatgaagaggggaagtctgggcgaaaacacgaagacggaggcggcgacaaaaagcctgccgagcctgctggtgccgcaagagccgcccagccttgtgttatgggcaacatccaaaaaaagctaactggtaaggccgagggaggtaaacggcccgcccggggtgccccccaaagggggcagactccagaggcaggagcagacaaacgcagtccaaggcgcgcgtctgctgcagcagcagcaggcggcggcgctactggacaccctggaggcgggcaaggggcagagaacccagctggactgaaatctcaggggaacgagctcttccggtcgggacagtttgccgaggccgcggggaagtacagtgcagcaatcgctcttcttgagccagccggatcagaaatcgccgacgacctatccatattgtacagtaacagggcggcttgttatcttaaggagggcaattgtagcggctgtattcaagactgcaatcgagcacttgaattacacccgttctctatgaagccgctgcttcgacgcgcgatggcatacgaaactttggagcaatatggcaaggcctatgtcgactacaaaaccgtgctgcagatagactgcgggttacagctcgcgaacgatagtgttaatcgacttagtcgtattctcatggagctggacggaccgaactggagggagaaactatcccccatacccgctgtgcccgccagtgtgcccctgcaggcttggcacccggccaaagaaatgatttccaagcaggcaggcgatagctcttcgcaccgccagcagggcataacagatgaaaagaccttcaaggccctaaaggaagaggggaaccagtgcgtaaatgacaagaactacaaggatgcgctgagcaaatatagcgagtgtctgaaaatcaacaataaggagtgtgcaatctacaccaatagggccttatgttatttgaaactttgtcaatttgaggaggccaagcaagattgcgatcaggccctacaacttgcagacgggaacgtaaaggccttctaccgccgggctctggcccacaagggccttaagaactatcagaaatctttgatcgatctgaataaggtcatcctgctggatcctagcatcattgaagcaaaaatggagttggaagaggtgactcggctcctcaatcttaaggacaagacggccccatttaacaaagagaaagagaggaggaagatagagatccaggaggtcaatgaaggcaaggaagagccggggcgcccagctggcgaagtttccatgggctgcctcgctagtgagaaaggaggaaaaagttctagatccccggaggacccagaaaagttgccaattgcaaaacctaataatgcttacgagttcggacagatcatcaacgccctcagcacccgcaaggataaagaggcctgcgcacacttattggccattacggctccaaaggatcttcccatgttcctgagtaacaaattagaaggggacacattcctgttactcatccagtcactgaagaacaatctgatagagaaagacccctcactggtctaccagcacctgctttacctgagcaaagccgaaaggttcaagatgatgctcaccctcatctctaagggtcagaaagaactcatagaacagctcttcgaagacctgtccgacacgccgaacaatcatttcaccctggaggacatacaagccctgaaaaggcagtatgagttgtag

SEQ ID NO: 248739 - DNA, 2781 bp, Artificial Sequence
  derived and/or modified sequence
atgacaacaaaagactaccctagtctgtggggttttgggaccaccaaaacctttaagatacctattgagcatctagactttaaatatatcgaaaagtgtagtgatgtgaagcacctggagaagatcttatgcgtgctgagatctggtgaggaaggatattatcccgaactaacggagttctgcgaaaagcacctgcaggcactagcccccgagtcccgagcgctgcgcaaagacaagccagctgccacggccgcgtcttttaccgcagaagagtgggaaaagatcgatggggatataaagtcctgggtatccgagatcaaaaaggaagaggacaaaatgcatttccacgagacggaaacgttcccagcaatgaaggataatctgcctcccgtgcgagggtcaaatagttgtttacacgtgggaaaggagaagtactctaaaagaccaacaaagaagaaaactccacgagactacgccgagtgggacaaattcgatgtggagaaggagtgcctaaagatcgacgaagattacaaggagaaaactgtgattgataagagtcatctctcaaaaatagaaactcgaattgacacagccggactcacagaaaaagaaaaggacttcctggccactagagagaaggaaaagggaaatgaggcattcaactccggggattatgaggaagccgtgatgtactacacaaggagcattagtgccctccctacagtggtcgcctacaataatagagcacaagctgaaattaagctgcagaattggaattctgcttttcaggactgcgagaaagtgctggaactggaaccaggcaacgtgaaggcccttctaagaagagctaccacatataagcatcagaataagctgagggaggcgaccgaggacctgtctaaggttctagatgtggagccagacaacgatctggctaaaaagacattatctgaggtggagcgagacctcaagaacagcgaagcggcgagtgaaacacagaccaaagggaagagaatggttatccaggagatagaaaacagcgaagatgaagaggggaagtccggccggaagcatgaggatggcgggggagacaagaaaccagcagagcccgcgggggccgctagagccgcacagccctgtgtgatgggtaatatccagaaaaaattgactggcaaagcagaaggaggaaaacggccagcccgtggtgctccacagagaggccagacacctgaggccggcgccgataagaggtccccccgtcgggccagtgcggctgctgccgcgggtgggggcgccactggacacccaggcgggggccagggcgcagagaaccctgcgggactcaaatctcagggcaacgaactgttccggtccgggcagttcgctgaagccgctggaaaatacagcgctgctattgctttgttagaaccagcaggctctgagatcgccgacgacttgagtatactctactctaatcgtgcagcctgctatctgaaggaaggtaattgctcggggtgtatccaggattgcaatcgggccctggagctgcaccccttttcaatgaagcctctgcttcgaagggcaatggcatatgaaaccctagagcagtatggcaaggcgtacgtcgattataagactgtcctgcagattgactgtggattgcaacttgccaacgactccgttaaccgcctgtccagaatcctgatggagctagacgggcccaactggagggagaagctgagccccattcccgccgtccctgcttccgttcctctgcaagcatggcatcccgccaaggaaatgatctctaagcaggctggcgattccagcagtcacagacagcagggaattacagacgagaaaacctttaaagctttgaaagaggagggtaaccagtgcgtcaatgacaagaactataaggacgcgttatctaaatacagcgaatgcttaaaaattaacaacaaggaatgcgccatctatactaatagggccctgtgttacttgaaactgtgccagtttgaggaggcgaagcaggattgcgaccaggcactacagttagcagacggtaacgtcaaagcgttctacaggagggctctcgcccacaaaggacttaagaattatcagaagagccttatagatctgaacaaagtcatcttactagatcccagtattatagaagctaagatggagttggaagaagttacacggctgctgaacctcaaagacaagacggctccttttaacaaggagaaagaacggcgaaaaatcgaaattcaggaggttaatgaggggaaggaggaacccggacggccggctggcgaagtgagcatggggtgtctggcttcagagaaaggcggcaaaagctctcgatcacccgaagaccccgaaaaactaccaattgcaaagcccaacaacgcctacgaatttgggcaaatcataaacgccctctcaacccggaaagacaaggaagcctgcgctcatttactggctatcaccgccccaaaggatctgcccatgtttctgtctaataaactagaaggcgacacatttctactactgattcaatcgctcaaaaacaacctgattgagaaggacccctcattagtgtaccagcatctactttatctgtccaaagccgaaagattcaaaatgatgcttacacttatttccaaaggccaaaaagaattaatagagcaactgtttgaggacctgagcgacacacctaacaaccatttcactctggaagatatccaggccctgaagaggcagtatgagctgtag

SEQ ID NO: 248740 - DNA, 2781 bp, Artificial Sequence
  derived and/or modified sequence
atgaccaccaaggactaccccagcctgtggggcttcggcaccaccaagaccttcaagatccccatcgagcacctggacttcaagtacatcgagaagtgcagtgatgtgaagcacctggagaagatcctgtgtgtgctgcggagcggggaggagggctactacccagagctgacagagttctgtgagaagcacctgcaggccctggcccctgagagccgggccctgaggaaggacaagccagctgccacagctgccagcttcaccgctgaggagtgggagaagattgatggagacatcaagtcctgggtgtctgagatcaagaaggaggaggacaagatgcacttccacgagacagagaccttccctgccatgaaggacaacctgccccctgtgcggggcagcaacagctgcctgcacgtgggcaaggagaagtacagcaagaggcccaccaagaagaagaccccccgggactatgcagagtgggacaagtttgatgtggagaaggaatgtctgaagattgatgaggactacaaggagaagacagtgattgacaagagccacctgagcaagattgagaccagaattgacacagctggcctgacagagaaggagaaggacttcctggccacccgggagaaggagaagggaaatgaggccttcaacagcggggactatgaggaggccgtgatgtactacaccaggagcatcagcgccctgcccaccgtggtggcctacaacaacagagcccaggccgagatcaagctgcagaactggaacagcgccttccaggactgtgagaaggtgctggagctggagcctggaaatgtgaaggccctgctgcggcgggccaccacctacaagcaccagaacaagctgcgggaggccacagaggacctgagcaaggtgctggatgtggagccagacaatgacctggccaagaagaccctgtctgaggtggagcgggacctgaagaacagcgaggccgccagcgagacccagaccaagggcaagaggatggtgatccaggagattgaaaattctgaagatgaggagggcaagagcggcaggaagcatgaagatggcggcggggacaagaagccagctgagcctgctggagctgcccgggccgcccagccctgtgtgatgggcaacatccagaagaagctgaccgggaaggccgagggcggcaagaggcctgcccggggggccccccagaggggccagaccccagaggccggggctgacaagaggagcccccggcgggccagcgctgctgctgctgctgggggcggggccaccggccaccctgggggcggccagggcgcagaaaatcctgctggcctgaagagccagggcaatgaactcttccgcagcggccagtttgctgaggccgccggcaagtacagcgctgccatcgccctgctggagcccgccggcagcgagattgctgatgacctgagcatcctgtacagcaacagagctgcctgctacctgaaggagggcaactgcagcggctgcatccaggactgcaacagagccctggagctgcaccccttctccatgaagcccctgctgcggcgggccatggcctatgagaccctggagcagtatggcaaggcctacgtggactacaagacagtgctgcagattgactgtggcctgcagctggccaatgacagcgtgaaccggctgagccgcatcctgatggagctggatggccccaactggagggagaagctgagccccatcccagctgtgcctgcctctgtgcccctgcaggcctggcacccagccaaggagatgatcagcaagcaggccggggacagcagcagccaccggcagcagggcatcacagatgagaagaccttcaaggccctgaaggaggagggcaaccagtgtgtgaatgacaagaactacaaggatgccctgagcaagtacagcgagtgcctgaagatcaacaacaaggaatgtgccatctacaccaacagagccctgtgctacctgaagctgtgccagtttgaggaggccaagcaggactgtgaccaggccctgcagctggctgatggaaatgtgaaggccttctaccgccgggccctggcccacaagggcctgaagaactaccagaagagcctgattgacctgaacaaggtgatcctgctggaccccagcatcatcgaggccaagatggagctggaggaggtgacccggctgctgaacctgaaggacaagacagcccccttcaacaaggagaaggagaggaggaagattgagatccaggaggtgaatgaaggcaaggaggagcccggccggcctgctggggaggtgtccatgggctgcctggccagcgagaagggcggcaagagcagccgcagcccagaagatcctgagaagctgcccatcgccaagcccaacaatgcctatgaatttggccagatcatcaatgccctgagcaccaggaaggacaaggaggcctgtgcccacctgctggccatcacagcccccaaggacctgcccatgttcctgagcaacaagctggagggggacaccttcctgctgctgatccagagcctgaagaacaacctgattgagaaggaccccagcctggtgtaccagcacctgctgtacctgagcaaggccgagcgcttcaagatgatgctgaccctcatcagcaagggccagaaggagctgattgagcagctgtttgaggacctgagtgacacccccaacaaccacttcaccctggaggacatccaggccctgaagaggcagtatgagctgtag

SEQ ID NO: 248741 - DNA, 2781 bp, Artificial Sequence
  derived and/or modified sequence
atgaccaccaaggactaccccagcctgtggggcttcggcaccaccaagactttcaaaatacccatcgaacacctggacttcaagtacatcgagaagtgctctgatgtgaagcacctggagaagatcttatgtgtcttgcgcagcggcgaggagggttattaccccgagctcactgaattctgtgaaaaacacctacaggctctggcacctgaatcgagggcactccgtaaggacaaacccgccgcgactgccgcttcgtttactgcagaggagtgggagaagatcgatggggatattaagagttgggtctccgaaattaaaaaggaggaagacaagatgcactttcacgaaacagagacctttccagctatgaaagataatttacctccggtacggggtagcaacagttgcctgcacgttggcaaagagaaatactctaaaagacccacaaaaaaaaaaaccccaagagactacgccgaatgggacaagtttgatgtcgaaaaagaatgtctaaaaatcgacgaggattacaaagagaagaccgtcatcgataagagtcacttgtctaagatcgaaacccgcatcgatactgcgggcctgacagagaaagagaaagatttcttagctacccgggaaaaggagaagggtaatgaagcattcaatagcggagattacgaggaagcagtcatgtactatacccgcagcatcagcgccttaccaaccgtggttgcctacaataatagagcccaggcagaaattaagctccaaaattggaacagcgcctttcaggactgcgagaaagtgcttgaattggagcctgggaacgtaaaggcgctcttgaggcgcgccaccacatataaacaccagaacaagctgcgggaggccactgaggatttgtcaaaggtattagacgtggaacctgataatgaccttgcgaagaaaaccctcagcgaggtcgagcgcgaccttaaaaacagcgaagcagcctccgagacgcagaccaaaggaaagagaatggtcatccaggagatagagaactctgaggacgaggagggcaagagcggaagaaagcacgaggatggtggcggagataaaaagccagcagaaccagccggcgcggcccgcgccgcccaaccctgtgtgatgggcaatatccagaaaaaacttactggaaaggccgagggaggcaaaaggcctgcgcgcggtgctccccagcggggccagaccccagaggccggggcagacaaacggtctcctcggcgggcctccgcggccgcggccgccggtggaggcgccaccggacaccccgggggggggcagggcgcagagaatccagcggggctgaaatcacaaggtaacgaactgtttcgctcagggcagtttgccgaggcagcgggcaagtattcggcggccatcgctcttctcgaacccgcgggcagtgagattgcggacgacttaagcatactgtactcgaaccgtgcagcctgttatctcaaggagggtaactgttcaggatgtatacaagactgtaacagggcattagaactccatcccttttctatgaaacctctcctgcggagggcgatggcctatgagactctagagcagtatggcaaagcgtatgtggattataagacagtgctccaaattgattgtggactgcagttggcgaacgattccgtgaacaggttaagtcgcatacttatggaattggatggaccaaattggagagagaaactgagccccatccctgccgtgcctgcctcagtccctctgcaggcctggcaccccgccaaggagatgatctctaagcaggcgggtgatagtagcagccacagacagcaagggataaccgacgagaagacatttaaagccctcaaggaagaaggtaaccagtgcgttaacgataagaattataaggacgcactatcaaagtatagtgagtgtctgaaaataaataacaaagaatgtgctatctatacaaatagggcactgtgttatctgaagctgtgccagtttgaagaagccaaacaggattgcgaccaagcactgcagttggcagacggaaacgtcaaggcattctacagacgggcattggcgcataagggtctgaagaattaccagaaaagtctcatagatctgaataaggtgatcctgctggacccctcgattatcgaggccaaaatggaactggaggaggttaccaggctgctgaatctgaaggataagaccgccccttttaacaaagaaaaagagaggagaaaaatcgagattcaggaggtgaatgaaggcaaagaagagccgggcaggcccgccggcgaggtgtcgatgggctgtttggccagcgagaaaggcggtaagtctagccgctcgcctgaggatcctgaaaaacttcctatagccaaacccaataatgcttacgagtttggccagattattaacgcgttaagcacccgcaaagacaaagaagcatgtgctcacctcctagccattactgctcccaaggatctcccaatgttcttgtctaataaattggagggggatacatttttgctactcatccaatcattaaagaacaatctgattgagaaagatccgtcactcgtttatcagcacctgctgtacttgtccaaggcagaaagatttaagatgatgctcacgctgatcagcaaggggcagaaggaacttatcgagcagctgtttgaggacttatctgacacccctaacaaccacttcaccctggaagatatccaggccctgaaacggcagtacgaactgtag

SEQ ID NO: 248742 - DNA, 2781 bp, Artificial Sequence
  derived and/or modified sequence
atgaccaccaaggactaccccagcctgtggggcttcggcaccaccaagaccttcaagattcccattgaacatcttgatttcaagtacatcgagaagtgtagcgatgtaaagcacctggagaaaattctatgtgttctgcggagcggagaggagggatactaccctgaacttaccgaattttgcgagaagcatctgcaggcactggctcctgagtctagagccctccgtaaggacaaacccgccgccacagccgccagcttcacagcagaagagtgggagaagatcgatggagacattaagtcttgggtgtctgaaataaaaaaggaagaggataagatgcattttcatgagaccgagactttcccggctatgaaggacaatttgccccccgttcgtgggtcaaatagctgtctgcatgtgggcaaggagaagtatagcaagcgtccaacaaaaaaaaagaccccaagggactacgccgagtgggacaaatttgatgttgaaaaagaatgtctcaagattgacgaagactacaaggaaaagacagtgatcgataagtctcacctgagcaaaatcgaaactagaattgacaccgcgggactgaccgagaaggaaaaagacttcctcgccacacgagagaaggagaagggcaatgaggcttttaactccggcgactacgaggaggcagtgatgtattatacgcggtctatctccgcccttcccaccgtggtcgcatacaacaaccgagcacaggccgaaatcaagctgcagaattggaactctgcctttcaggactgtgagaaagtactggaattggaacctggaaatgtgaaagctctgcttcgtcgggctacaacatacaaacaccagaataagctgcgtgaagccaccgaggatctgtcaaaggtcctggatgtcgagcccgacaacgatctggccaagaaaaccctctccgaggttgagagggatctgaaaaactcagaggccgcgtctgagacacaaactaaggggaagaggatggtgatccaggagatcgaaaactctgaggatgaagagggtaagtctggacggaaacatgaagatggaggaggtgataaaaagcccgctgaacccgcaggtgcagcccgggcagcgcagccctgtgtgatgggtaatattcagaagaaacttacgggcaaggctgagggaggcaaaaggcctgcaagaggagcacctcaacgcggccagacaccagaggccggcgcagacaagcgatcccctcgaagggctagcgccgcagcggctgcagggggaggggcgaccggtcaccctggcggaggccaaggcgccgaaaatcccgcaggactcaaatcacaggggaatgagctgtttaggagtggccagtttgccgaagcagctggaaagtactccgctgcaatagctcttttggagcccgcggggtcagagatagctgacgacctcagtattctgtattctaacagagctgcttgctacttgaaggaggggaactgtagcggatgcatccaagactgcaaccgagctcttgagctgcatccatttagcatgaagccactgctcagacgggccatggcttacgaaactttggaacaatacgggaaagcatacgttgactataagacggttttacaaattgattgtgggttgcagctagcaaatgactccgtcaatcgcctgagccggattctgatggagttggatgggcctaattggcgagagaagttatcccccatacctgctgtgccagcatctgttcccctgcaggcttggcaccccgctaaggaaatgataagtaaacaggccggcgacagctcctcgcaccgccaacaggggattacagatgagaaaaccttcaaagccttaaaggaggaagggaatcagtgtgtaaatgataagaactacaaagacgccctgtctaaatacagtgagtgtctgaaaatcaacaacaaggaatgcgcgatctacactaacagagcactatgttacttaaagctgtgccaattcgaagaagcaaaacaggattgcgaccaagccctgcagttggctgacgggaacgtgaaggccttttatcggagggctcttgcgcacaagggactcaagaactatcaaaaatcacttattgacctcaataaagtgatactgctcgatcccagcatcatagaggccaagatggaactggaggaagttacaagactccttaacctaaaagataaaacggccccttttaacaaagagaaagagcgccggaagattgagatccaggaggtcaatgagggcaaggaagaacccggtcggccagccggggaggtgtccatgggatgtctggcttccgagaagggcgggaagtcatctaggagccccgaggatcccgaaaagctgccaatcgccaagcctaacaatgcttatgaatttgggcagattatcaacgctctgagcacacgaaaggataaggaggcatgtgctcacctactggccattacagcccccaaggacctcccaatgtttttaagtaacaagctggaaggggacacattcttgcttttgatccagagcctgaaaaataatttaatcgagaaggatccctctcttgtgtaccagcatctactctacttgtctaaagctgagagattcaagatgatgctgacattgatatccaaaggccagaaagagttaattgaacagttgttcgaggacctctcagacacgcccaataatcattttactctggaagatattcaggccctgaagaggcagtacgaactgtag

SEQ ID NO: 248743 - DNA, 2781 bp, Artificial Sequence
  derived and/or modified sequence
atgaccaccaaagactatccctctctttgggggtttggcacaactaagacattcaaaatccccatagaacacctggattttaaatacattgagaaatgctcagacgtcaaacacttggagaagatcctttgcgtcctaaggtccggcgaggagggttactacccggagttgaccgaattctgcgagaagcatcttcaggccttggcgcctgagtccagggccctgcgcaaggataagcccgcagccaccgccgcatcatttactgctgaagaatgggagaagatcgatggagacatcaaatcttgggtgtctgagattaagaaggaggaagacaaaatgcactttcacgaaactgagactttccctgccatgaaggataacttgccccctgttagaggatctaatagctgcctgcacgttggaaaggagaagtatagcaaacgaccaaccaagaagaaaaccccaagagattacgcggaatgggacaaatttgacgttgagaaggagtgcttaaaaatagatgaagattacaaggaaaagaccgtgatcgataaatcccatctctccaaaatcgaaacacgcattgacactgcgggtctcacagagaaagaaaaagactttctcgcaacgcgcgagaaagaaaaaggaaacgaagccttcaactcaggtgactacgaggaggccgtgatgtactacacacgtagcatctccgctctccctaccgttgtggcttacaataacagagcccaggctgagataaagctacaaaattggaattcggcattccaggattgcgagaaggtgttggaactggagcccggtaatgtgaaggccttgctgcgccgagctaccacatataagcaccaaaataagctgcgcgaggccacagaggacttatcaaaggtattggatgtagagcctgataacgatctagccaagaagaccttatctgaggttgagcgggacctgaaaaattccgaagccgctagcgagactcagacaaaggggaagcggatggttattcaggagattgagaactccgaagacgaagaggggaaaagcgggagaaaacacgaggacggcggtggagacaaaaaacctgctgaacctgcaggagcagccagagctgcgcagccttgcgtgatgggcaatattcagaaaaaacttacgggcaaggccgagggaggcaaaagacctgcaagaggcgctccacaacgaggacagaccccagaagccggagctgataagagatctcctagaagggcttccgccgcagccgcagccggagggggagctaccggccacccaggcggtgggcaaggcgcagaaaacccagcaggactgaaatctcagggcaacgagttgtttcgtagtgggcagttcgccgaagcggcagggaaatactctgcagccattgcccttctggagcctgctggatctgagatcgccgacgacttgtccatactgtactcaaatcgtgcggcttgttacctgaaagagggcaactgttctggctgcattcaggactgcaaccgggctctggagctgcacccattcagtatgaagcctctgctgaggcgtgccatggcatacgagacactggaacagtatggaaaggcttacgtcgactacaaaacagtgctgcagatagattgcggactgcagctggcaaatgattccgtcaaccgtctgtccaggatcctgatggaactggacggaccaaactggagagagaagctaagccccatccccgctgtcccagcaagcgtccctctccaggcctggcacccggcaaaggagatgataagcaagcaggcgggagactcttctagccacaggcaacagggtataacagacgagaaaacttttaaggcattaaaagaagagggtaaccagtgtgtgaatgataagaattacaaagacgctctaagcaagtacagtgaatgtttaaaaatcaataacaaagaatgtgcaatttataccaaccgtgcgctgtgttatctgaagctttgccagttcgaagaagctaagcaggattgcgaccaagccctgcagctggcagacggcaatgtgaaagctttctatcgacgggcactggcccacaaaggcctcaaaaactatcaaaagtcactgattgatttgaacaaagtaatcctgctggacccaagcatcattgaagcaaaaatggaattagaagaggttactaggcttcttaacctcaaggacaagacagctcccttcaacaaggagaaggagaggagaaaaattgagatccaggaggtgaatgaggggaaagaagaacctggccgtcctgcaggcgaagttagcatgggatgtctggcgagtgaaaaaggtggtaagagcagtcggtcaccggaagaccctgaaaagttgccgattgccaagcctaataacgcatatgaatttggacagataattaacgccctgtctaccaggaaggataaggaggcctgcgcacacctgctcgccatcaccgcaccaaaggaccttccaatgttcttgtcaaataagctggaaggagacacatttctgctgcttattcagtccctgaaaaacaacctgattgagaaggatccaagtctcgtttatcaacatctgttgtacctatctaaagcagagcgattcaagatgatgcttacacttatcagcaaaggtcagaaggagctgatcgagcagctcttcgaggacctgagcgatacacccaacaaccacttcactctagaggatatccaagccttaaagcggcagtatgagttgtag

SEQ ID NO: 248744 - DNA, 2781 bp, Artificial Sequence
  derived and/or modified sequence
atgaccaccaaggattatcctagtttatggggcttcgggaccactaagacattcaaaatccccatcgagcacctggattttaagtacatcgaaaagtgcagtgatgtgaaacatctggagaagattctgtgtgtacttagatctggtgaagaaggctattatcccgaactgaccgaattctgtgagaagcacctgcaggccctcgcaccggagagtcgcgcactcaggaaagacaaaccagccgcaaccgctgcttcatttaccgctgaagaatgggaaaagatcgatggagacatcaagtcatgggtgtctgagattaagaaagaggaagacaaaatgcatttccatgagaccgaaacttttccagccatgaaagataacctaccccctgttcggggtagcaactcctgtctccacgttggaaaagaaaagtacagcaagcgacccacgaaaaagaagacccctcgtgactacgcagagtgggacaagttcgacgtggagaaggaatgcctgaagatagacgaagactacaaggaaaaaactgttattgacaagtcgcatctctctaagatagagacacggatcgacaccgctggtctcacagagaaggaaaaggatttcctggccacaagagagaaagagaaaggaaacgaagctttcaactccggcgactacgaagaagccgtgatgtactacacccgatccatttccgcgcttcctacagtggtagcatacaataaccgagctcaggccgaaattaagctccagaactggaactctgcatttcaagattgcgagaaagtactggagctggagcccggaaacgtgaaagccctgctccggcgtgccacgacatataaacatcagaacaaactccgggaggcaacagaggacctgagcaaggtgttagacgtggaacccgacaacgacctagccaagaagactctatcagaagtggagcgcgatcttaagaacagcgaagctgctagcgaaacacagactaaaggaaaacgaatggtcattcaggaaattgagaacagcgaggatgaggagggcaagtctggcagaaaacacgaagacggaggaggcgacaaaaagcctgccgagcccgctggagctgccagggctgcccagccctgcgtgatgggaaatatccagaagaagcttaccggcaaggccgaaggcggtaagagaccagctagaggcgctccacaaagaggccaaactccagaggccggagctgataaaagatcccctaggagggcttctgcagcggctgcggcaggcggaggagctactggccatcctgggggagggcaaggggcagaaaatccggctgggctgaagtcacaaggcaatgagctgtttagaagcggccagttcgccgaggccgcaggtaagtactcggctgcgatcgctctgctcgaacccgctggttctgagatcgcggatgacctttcaatcctgtactcaaaccgcgcagcttgttaccttaaagaaggcaactgctcgggttgtatacaagactgtaacagggctcttgagctccatccttttagtatgaagcccctgctgaggagagctatggcttacgagacactagagcagtacggcaaagcttacgtggattataagactgtcttacaaatcgattgtgggctgcagcttgccaacgatagcgtcaatcgcctctcccgcatcctcatggagctcgacggtcccaactggagagaaaaattatctcccatccccgctgtccctgccagtgtgccactgcaagcctggcacccggcaaaggaaatgatcagcaaacaggccggagacagcagcagtcaccgacagcagggaatcaccgacgagaagacgtttaaagcgctcaaagaggagggaaaccagtgtgttaatgataaaaattacaaggatgccctcagcaagtatagtgagtgccttaagatcaacaataaagagtgtgcaatatataccaaccgagcactatgctacctaaaattgtgccagttcgaagaggccaaacaggattgcgaccaggctcttcaacttgcagatggaaatgtcaaggccttctatcgcagagcccttgcgcataagggtctgaagaattaccagaagagcctgatcgaccttaacaaagtgattctgctggaccctagtatcatcgaagctaagatggaattggaggaggtgaccagacttcttaaccttaaggataaaactgcgccatttaacaaggaaaaggagcgcagaaagatagaaattcaagaagtgaacgagggcaaagaggagcccggtcgaccggcaggcgaggtgtcaatggggtgtcttgcatctgagaagggcggaaagtcttcgcggtcacccgaggatcctgagaaactgcccatcgccaagcccaacaacgcatatgaattcggacagataataaacgcgctgtctacccggaaagacaaagaggcctgtgcccacttgctcgcaataactgctcccaaggatctgccaatgttcctttcaaacaaactcgagggggatacctttctgctactgatccaaagcttaaaaaacaatctcatcgaaaaggaccccagtctggtttatcaacacctgctgtatctctctaaggctgaacggtttaaaatgatgctgacactgattagcaaaggtcagaaagaactgattgaacagttgttcgaagacttatccgacaccccaaacaaccatttcacactggaggatatccaggcccttaagcggcagtacgagctgtag

SEQ ID NO: 248745 - DNA, 3747 bp, Artificial Sequence
  derived and/or modified sequence
gacgagaccctccctcagcacctgcagtgcagccagagccggtgcggcggccgcgacttccccgacgcggggcgctgagaagcactatgaccaccaaagattatccatcattgtggggctttggaacaacaaaaacattcaaaattcccattgaacatctagatttcaaatacattgaaaaatgttcagatgttaaacatctggaaaaaattctttgcgtgctcagatctggtgaggaaggatattatcctgaacttacagaattttgtgaaaagcatcttcaagccttggcccctgaaagcagagctttgaggaaagataaaccagcagcaacagcagccagttttacagctgaagaatgggaaaaaattgatggtgatataaagagttgggtatcagaaattaaaaaagaagaagataaaatgcactttcatgaaactgagacatttccagcaatgaaagataatttgcctccagttcgtggttcaaacagctgtcttcatgtaggcaaggaaaaatattctaaaagaccaactaaaaagaaaactccaagggattacgcggaatgggataaatttgacgtggagaaggaatgtttaaaaattgatgaagattacaaagaaaagacggtaatagacaagtcacacttgtctaaaattgagacaagaatagatacagcaggtctaactgagaaagaaaaggattttcttgccactcgtgaaaaggagaaaggaaatgaagctttcaactcaggagattatgaagaagcagtgatgtattataccaggagcatatcagcgcttcccactgtagttgcctataacaatcgagctcaagcagaaatcaaattacagaactggaatagtgcttttcaggattgtgaaaaggtcttggagttagaacctggaaacgtaaaggctcttctgcgtcgtgctactacatataaacatcaaaacaagctccgggaagctacagaagatttgagtaaagtactagatgttgagcctgataatgatttggccaagaaaaccttgtcagaggttgaaagagatctgaaaaattctgaagctgcatctgagactcaaaccaaagggaaaaggatggttattcaggaaatagaaaactccgaagatgaagaaggaaaaagcggaagaaaacatgaagatggcggtggagataagaagcccgcggagccggcgggagccgcgcgcgccgcccagccgtgcgtcatgggcaacatccagaagaagctgactggcaaagccgaaggcggcaagcggccggcaaggggcgcgccgcagcggggccagaccccggaggccggcgcggacaagcggagcccacggcgggcctctgcggcggcggcggcgggcggcggcgccaccgggcatccgggcggcgggcagggcgcggagaaccctgccggcctgaagagccagggcaacgagctgttccgaagcgggcagttcgccgaggcggccggcaagtactcggcggcaatcgcgctcctggagccagcaggaagtgaaattgcagatgatctaagtatcttatattcaaatagagcagcatgttacctaaaagaaggaaactgcagtggctgcattcaagattgtaacagggctctggaacttcatccattctctatgaaacctcttctgaggcgggcgatggcctatgaaactctagagcagtatgggaaagcttatgtggattataaaacagtgttgcagatagactgtggactccagctagcaaatgacagtgttaacaggctatcaagaattttaatggagctggatggaccaaattggcgggagaagctgtcacctattcctgctgtgcctgcttctgtgccactgcaagcttggcatccggcaaaagagatgatctcaaaacaagcaggagactccagcagccatcgccagcagggcatcacagatgaaaaaacatttaaagcccttaaggaagaaggaaatcaatgtgtaaatgacaaaaactataaagacgccctcagtaaatacagcgaatgcttaaagattaacaataaggaatgtgccatatatacaaacagagctctctgttacttgaagctgtgccagtttgaagaagcaaagcaggactgtgatcaggcacttcagctagctgatgggaacgtgaaagccttctatagacgagctctggctcataaaggactcaagaattatcagaaaagcttaattgatctcaataaagttatcctactagatccaagtattattgaggcaaagatggaactggaagaggtaactagactccttaatcttaaggataagacagcaccattcaacaaagaaaaggagagaaggaaaattgagattcaagaggtgaatgaaggcaaggaggagcctggaagacctgcaggggaggtctccatgggatgccttgcttctgagaagggaggcaaaagcagcaggtcaccagaagaccctgagaaacttccgatagccaagcctaataatgcctatgaatttggtcagattataaatgctctcagtaccaggaaggataaagaagcctgtgcacatcttttagccatcactgcaccaaaagatttgccgatgtttttaagtaacaaacttgaaggggatacattccttctcctcattcagtctctgaaaaataatcttattgaaaaagatccctcattggtgtatcagcatcttttatacctgagtaaagcagaaaggtttaagatgatgttgacactaattagcaagggccaaaaggagctaattgaacagctgtttgaggacctttcggacacaccaaacaaccattttactttagaagatatacaggccctaaaaaggcagtatgagctttaaatcaagataattgttagatttcttccatgcatgtatgtgttccaggaatgttaatgagatggtattgtaaaagagttgcatggataaaacttggcctagaaaagtttggtctgcactataaaacattttacttattttcctacatagaacatgtatattctacaatctgctttttattagttgtaaatattttcttatgtaccagaaccaaataagtatatttagaacttgttaaaaatacattttaatttatgatatacatattattttaattacttgttaaaattttgagttaagttgcatttctttgggctatgaaggagtcctcttaagtttgatagaaatgaatttcttgtaacattcttttttaaaagtggaagtcattaacagtgattattatatcacttatatcctgctaagatacacataaatcccattttgtactagtacctgtggattacagtcagttaaaatgaaatgcaacactgaagtctataacatgaaatgattattaaattgtttattaatttagagctataagaggaacttattttttctaatacggaagcattgcctaataattaagaacaaaaattgccaaaaatttctaccactttttactagattttaaaaagctactttcttttatattgcctatataagcaaaaaaccaaccactgtattaaagcaaactaagcctgcatttatatctgaattattacctccatattttaccaaacatttgaatgtcccccttcccccttttttgttttctgcttttatgactgtatttattcctttactgtaaaagaatatgaagaactcatacatgttgaaagctcctttgttgactgggtcaaagtgaaggaatttcaatctc

SEQ ID NO: 248746 - DNA, 3852 bp, Artificial Sequence
  derived and/or modified sequence
ggggctccccagtcccggcaggtcctggcgccgctgtacatagaaaccgttgccacggcgggaggatgccgtttcttttcggtctccgactgcagggggcggtcggccctgtggatgcaggaaagagggtgcctcggtgggagagacccagcttttcgcgttagtaggcccgagcagtttgaactggagctatgaccaccaaagattatccatcattgtggggctttggaacaacaaaaacattcaaaattcccattgaacatctagatttcaaatacattgaaaaatgttcagatgttaaacatctggaaaaaattctttgcgtgctcagatctggtgaggaaggatattatcctgaacttacagaattttgtgaaaagcatcttcaagccttggcccctgaaagcagagctttgaggaaagataaaccagcagcaacagcagccagttttacagctgaagaatgggaaaaaattgatggtgatataaagagttgggtatcagaaattaaaaaagaagaagataaaatgcactttcatgaaactgagacatttccagcaatgaaagataatttgcctccagttcgtggttcaaacagctgtcttcatgtaggcaaggaaaaatattctaaaagaccaactaaaaagaaaactccaagggattacgcggaatgggataaatttgacgtggagaaggaatgtttaaaaattgatgaagattacaaagaaaagacggtaatagacaagtcacacttgtctaaaattgagacaagaatagatacagcaggtctaactgagaaagaaaaggattttcttgccactcgtgaaaaggagaaaggaaatgaagctttcaactcaggagattatgaagaagcagtgatgtattataccaggagcatatcagcgcttcccactgtagttgcctataacaatcgagctcaagcagaaatcaaattacagaactggaatagtgcttttcaggattgtgaaaaggtcttggagttagaacctggaaacgtaaaggctcttctgcgtcgtgctactacatataaacatcaaaacaagctccgggaagctacagaagatttgagtaaagtactagatgttgagcctgataatgatttggccaagaaaaccttgtcagaggttgaaagagatctgaaaaattctgaagctgcatctgagactcaaaccaaagggaaaaggatggttattcaggaaatagaaaactccgaagatgaagaaggaaaaagcggaagaaaacatgaagatggcggtggagataagaagcccgcggagccggcgggagccgcgcgcgccgcccagccgtgcgtcatgggcaacatccagaagaagctgactggcaaagccgaaggcggcaagcggccggcaaggggcgcgccgcagcggggccagaccccggaggccggcgcggacaagcggagcccacggcgggcctctgcggcggcggcggcgggcggcggcgccaccgggcatccgggcggcgggcagggcgcggagaaccctgccggcctgaagagccagggcaacgagctgttccgaagcgggcagttcgccgaggcggccggcaagtactcggcggcaatcgcgctcctggagccagcaggaagtgaaattgcagatgatctaagtatcttatattcaaatagagcagcatgttacctaaaagaaggaaactgcagtggctgcattcaagattgtaacagggctctggaacttcatccattctctatgaaacctcttctgaggcgggcgatggcctatgaaactctagagcagtatgggaaagcttatgtggattataaaacagtgttgcagatagactgtggactccagctagcaaatgacagtgttaacaggctatcaagaattttaatggagctggatggaccaaattggcgggagaagctgtcacctattcctgctgtgcctgcttctgtgccactgcaagcttggcatccggcaaaagagatgatctcaaaacaagcaggagactccagcagccatcgccagcagggcatcacagatgaaaaaacatttaaagcccttaaggaagaaggaaatcaatgtgtaaatgacaaaaactataaagacgccctcagtaaatacagcgaatgcttaaagattaacaataaggaatgtgccatatatacaaacagagctctctgttacttgaagctgtgccagtttgaagaagcaaagcaggactgtgatcaggcacttcagctagctgatgggaacgtgaaagccttctatagacgagctctggctcataaaggactcaagaattatcagaaaagcttaattgatctcaataaagttatcctactagatccaagtattattgaggcaaagatggaactggaagaggtaactagactccttaatcttaaggataagacagcaccattcaacaaagaaaaggagagaaggaaaattgagattcaagaggtgaatgaaggcaaggaggagcctggaagacctgcaggggaggtctccatgggatgccttgcttctgagaagggaggcaaaagcagcaggtcaccagaagaccctgagaaacttccgatagccaagcctaataatgcctatgaatttggtcagattataaatgctctcagtaccaggaaggataaagaagcctgtgcacatcttttagccatcactgcaccaaaagatttgccgatgtttttaagtaacaaacttgaaggggatacattccttctcctcattcagtctctgaaaaataatcttattgaaaaagatccctcattggtgtatcagcatcttttatacctgagtaaagcagaaaggtttaagatgatgttgacactaattagcaagggccaaaaggagctaattgaacagctgtttgaggacctttcggacacaccaaacaaccattttactttagaagatatacaggccctaaaaaggcagtatgagctttaaatcaagataattgttagatttcttccatgcatgtatgtgttccaggaatgttaatgagatggtattgtaaaagagttgcatggataaaacttggcctagaaaagtttggtctgcactataaaacattttacttattttcctacatagaacatgtatattctacaatctgctttttattagttgtaaatattttcttatgtaccagaaccaaataagtatatttagaacttgttaaaaatacattttaatttatgatatacatattattttaattacttgttaaaattttgagttaagttgcatttctttgggctatgaaggagtcctcttaagtttgatagaaatgaatttcttgtaacattcttttttaaaagtggaagtcattaacagtgattattatatcacttatatcctgctaagatacacataaatcccattttgtactagtacctgtggattacagtcagttaaaatgaaatgcaacactgaagtctataacatgaaatgattattaaattgtttattaatttagagctataagaggaacttattttttctaatacggaagcattgcctaataattaagaacaaaaattgccaaaaatttctaccactttttactagattttaaaaagctactttcttttatattgcctatataagcaaaaaaccaaccactgtattaaagcaaactaagcctgcatttatatctgaattattacctccatattttaccaaacatttgaatgtcccccttcccccttttttgttttctgcttttatgactgtatttattcctttactgtaaaagaatatgaagaactcatacatgttgaaagctcctttgttgactgggtcaaagtgaaggaatttcaatctc

SEQ ID NO: 248747 - protein, 175 aa, Artificial Sequence
  derived and/or modified sequence
MTPLGPASSLPQSFLLKCLEQVRKIQGDGAALQEKLCATYKLCHPEELVLLGHSLGIPWAPLSSCPSQALQLAGCLSQLHSGLFLYQGLLQALEGISPELGPTLDTLQLDVADFATTIWQQMEELGMAPALQPTQGAMPAFASAFQRRAGGVLVASHLQSFLEVSYRVLRHLAQP

SEQ ID NO: 248748 - protein, 200 aa, Artificial Sequence
  derived and/or modified sequence
MSPEPALSPALQLLLWHSALWTVQEATPLGPASSLPQSFLLKCLEQVRKIQGDGAALQEKLCATYKLCHPEELVLLGHSLGIPWAPLSSCPSQALQLAGCLSQLHSGLFLYQGLLQALEGISPELGPTLDTLQLDVADFATTIWQQMEELGMAPALQPTQGAMPAFASAFQRRAGGVLVASHLQSFLEVSYRVLRHLAQP

SEQ ID NO: 248749 - protein, 204 aa, Artificial Sequence
  derived and/or modified sequence
MAGPATQSPMKLMALQLLLWHSALWTVQEATPLGPASSLPQSFLLKCLEQVRKIQGDGAALQEKLCATYKLCHPEELVLLGHSLGIPWAPLSSCPSQALQLAGCLSQLHSGLFLYQGLLQALEGISPELGPTLDTLQLDVADFATTIWQQMEELGMAPALQPTQGAMPAFASAFQRRAGGVLVASHLQSFLEVSYRVLRHLAQP

SEQ ID NO: 248750 - protein, 288 aa, Artificial Sequence
  derived and/or modified sequence
MAGPATQSPMKLMALQLLLWHSALWTVQESSSSKAPPPSLPSPSRLPGPSDTPILPQATPLGPASSLPQSFLLKCLEQVRKIQGDGAALQEKLCATYKLCHPEELVLLGHSLGIPWAPLSSCPSQALQLAGCLSQLHSGLFLYQGLLQALEGISPELGPTLDTLQLDVADFATTIWQQMEELGMAPALQPTQGAMPAFASAFQRRAGGVLVASHLQSFLEVSYRVLRHLAQPSSSSKAPPPSLPSPSRLPGPSDTPILPQSSSSKAPPPSLPSPSRLPGPSDTPILPQ

SEQ ID NO: 248751 - protein, 285 aa, Artificial Sequence
  derived and/or modified sequence
MATGSRTSLLLAFGLLCLPWLQEGSASSSSKAPPPSLPSPSRLPGPSDTPILPQATPLGPASSLPQSFLLKCLEQVRKIQGDGAALQEKLCATYKLCHPEELVLLGHSLGIPWAPLSSCPSQALQLAGCLSQLHSGLFLYQGLLQALEGISPELGPTLDTLQLDVADFATTIWQQMEELGMAPALQPTQGAMPAFASAFQRRAGGVLVASHLQSFLEVSYRVLRHLAQPSSSSKAPPPSLPSPSRLPGPSDTPILPQSSSSKAPPPSLPSPSRLPGPSDTPILPQ

SEQ ID NO: 248752 - protein, 232 aa, Artificial Sequence
  derived and/or modified sequence
MAGPATQSPMKLMALQLLLWHSALWTVQESSSSKAPPPSLPSPSRLPGPSDTPILPQATPLGPASSLPQSFLLKCLEQVRKIQGDGAALQEKLCATYKLCHPEELVLLGHSLGIPWAPLSSCPSQALQLAGCLSQLHSGLFLYQGLLQALEGISPELGPTLDTLQLDVADFATTIWQQMEELGMAPALQPTQGAMPAFASAFQRRAGGVLVASHLQSFLEVSYRVLRHLAQP

SEQ ID NO: 248753 - protein, 260 aa, Artificial Sequence
  derived and/or modified sequence
MAGPATQSPMKLMALQLLLWHSALWTVQEATPLGPASSLPQSFLLKCLEQVRKIQGDGAALQEKLCATYKLCHPEELVLLGHSLGIPWAPLSSCPSQALQLAGCLSQLHSGLFLYQGLLQALEGISPELGPTLDTLQLDVADFATTIWQQMEELGMAPALQPTQGAMPAFASAFQRRAGGVLVASHLQSFLEVSYRVLRHLAQPSSSSKAPPPSLPSPSRLPGPSDTPILPQSSSSKAPPPSLPSPSRLPGPSDTPILPQ

SEQ ID NO: 248754 - DNA, 772 bp, Artificial Sequence
  derived and/or modified sequence
ttggaccctcgtacagaagctaatacgactcactatagggaaataagagagaaaagaagagtaagaagaaatataagagccaccatggccctgcagttgctgctttggcactcggccctctggacagtccaagaagcgactcctctcggacctgcctcatcgttgccgcagtcattccttttgaagtgtctggagcaggtgcgaaagattcagggcgatggagccgcactccaagagaagctctgcgcgacatacaaactttgccatcccgaggagctcgtactgctcgggcacagcttggggattccctgggctcctctctcgtcctgtccgtcgcaggctttgcagttggcagggtgcctttcccagctccactccggtttgttcttgtatcagggactgctgcaagcccttgagggaatctcgccagaattgggcccgacgctggacacgttgcagctcgacgtggcggatttcgcaacaaccatctggcagcagatggaggaactggggatggcacccgcgctgcagcccacgcagggggcaatgccggcctttgcgtccgcgtttcagcgcagggcgggtggagtcctcgtagcgagccaccttcaatcatttttggaagtctcgtaccgggtgctgagacatcttgcgcagccgtgagccttctgcggggcttgccttctggccatgcccttcttctctcccttgcacctgtacctcttggtctttgaataaagcctgagtaggaaggcggccgctcgagcatgca

SEQ ID NO: 248755 - DNA, 746 bp, Artificial Sequence
  derived and/or modified sequence
ctcactatagggaaataagagagaaaagaagagtaagaagaaatataagagccaccaatggccctgcagttgctgctttggcactcggccctctggacagtccaagaagcgactcctctcggacctgcctcatcgttgccgcagtcattccttttgaagtgtctggagcaggtgcgaaagattcagggcgatggagccgcactccaagagaagctctgcgcgacatacaaactttgccatcccgaggagctcgtactgctcgggcacagcttggggattccctgggctcctctctcgtcctgtccgtcgcaggctttgcagttggcagggtgcctttcccagctccactccggtttgttcttgtatcagggactgctgcaagcccttgagggaatctcgccagaattgggcccgacgctggacacgttgcagctcgacgtggcggatttcgcaacaaccatctggcagcagatggaggaactggggatggcacccgcgctgcagcccacgcagggggcaatgccggcctttgcgtccgcgtttcagcgcagggcgggtggagtcctcgtagcgagccaccttcaatcatttttggaagtctcgtaccgggtgctgagacatcttgcgcagccgtgagccttctgcggggcttgccttctggccatgcccttcttctctcccttgcacctgtacctcttggtctttgaataaagcctgagtaggaaggcggccgctcgagcatgcat

SEQ ID NO: 248756 - DNA, 852 bp, Artificial Sequence
  derived and/or modified sequence
agcttttggaccctcgtacagaagctaatacgactcactatagggaaataagagagaaaagaagagtaagaagaaatataagagccaccatggccggtcccgcgacccaaagccccatgaaacttatggccctgcagttgctgctttggcactcggccctctggacagtccaagaagcgactcctctcggacctgcctcatcgttgccgcagtcattccttttgaagtgtctggagcaggtgcgaaagattcagggcgatggagccgcactccaagagaagctctgcgcgacatacaaactttgccatcccgaggagctcgtactgctcgggcacagcttggggattccctgggctcctctctcgtcctgtccgtcgcaggctttgcagttggcagggtgcctttcccagctccactccggtttgttcttgtatcagggactgctgcaagcccttgagggaatctcgccagaattgggcccgacgctggacacgttgcagctcgacgtggcggatttcgcaacaaccatctggcagcagatggaggaactggggatggcacccgcgctgcagcccacgcagggggcaatgccggcctttgcgtccgcgtttcagcgcagggcgggtggagtcctcgtagcgagccaccttcaatcatttttggaagtctcgtaccgggtgctgagacatcttgcgcagccgtgaagcgctgccttctgcggggcttgccttctggccatgcccttcttctctcccttgcacctgtacctcttggtctttgaataaagcctgagtaggaaggcggccgctcgagcatgcatctagagggcccaattcgccctattcgaagtcg

SEQ ID NO: 248757 - DNA, 3547 bp, Artificial Sequence
  derived and/or modified sequence
accaatgcttaatcagtgaggcacctatctcagcgatctgtctatttcgttcatccatagttgcctgactccccgtcgtgtagataactacgatacgggagggcttaccatctggccccagcgctgcgatgataccgcgagaaccacgctcaccggctccggatttatcagcaataaaccagccagccggaagggccgagcgcagaagtggtcctgcaactttatccgcctccatccagtctattaattgttgccgggaagctagagtaagtagttcgccagttaatagtttgcgcaacgttgttgccatcgctacaggcatcgtggtgtcacgctcgtcgtttggtatggcttcattcagctccggttcccaacgatcaaggcgagttacatgatcccccatgttgtgcaaaaaagcggttagctccttcggtcctccgatcgttgtcagaagtaagttggccgcagtgttatcactcatggttatggcagcactgcataattctcttactgtcatgccatccgtaagatgcttttctgtgactggtgagtactcaaccaagtcattctgagaatagtgtatgcggcgaccgagttgctcttgcccggcgtcaatacgggataataccgcgccacatagcagaactttaaaagtgctcatcattggaaaacgttcttcggggcgaaaactctcaaggatcttaccgctgttgagatccagttcgatgtaacccactcgtgcacccaactgatcttcagcatcttttactttcaccagcgtttctgggtgagcaaaaacaggaaggcaaaatgccgcaaaaaagggaataagggcgacacggaaatgttgaatactcatattcttcctttttcaatattattgaagcatttatcagggttattgtctcatgagcggatacatatttgaatgtatttagaaaaataaacaaataggggtcagtgttacaaccaattaaccaattctgaacattatcgcgagcccatttatacctgaatatggctcataacaccccttgtttgcctggcggcagtagcgcggtggtcccacctgaccccatgccgaactcagaagtgaaacgccgtagcgccgatggtagtgtggggactccccatgcgagagtagggaactgccaggcatcaaataaaacgaaaggctcagtcgaaagactgggcctttcgcccgggctaattatggggtgtcgcccttttgacgcgacttcgaatagggcgaattgggccctctagatgcatgctcgagcggccgccttcctactcaggctttattcaaagaccaagaggtacaggtgcaagggagagaagaagggcatggccagaaggcaagccccgcagaaggcagcgcttcacggctgcgcaagatgtctcagcacccggtacgagacttccaaaaatgattgaaggtggctcgctacgaggactccacccgccctgcgctgaaacgcggacgcaaaggccggcattgccccctgcgtgggctgcagcgcgggtgccatccccagttcctccatctgctgccagatggttgttgcgaaatccgccacgtcgagctgcaacgtgtccagcgtcgggcccaattctggcgagattccctcaagggcttgcagcagtccctgatacaagaacaaaccggagtggagctgggaaaggcaccctgccaactgcaaagcctgcgacggacaggacgagagaggagcccagggaatccccaagctgtgcccgagcagtacgagctcctcgggatggcaaagtttgtatgtcgcgcagagcttctcttggagtgcggctccatcgccctgaatctttcgcacctgctccagacacttcaaaaggaatgactgcggcaacgatgaggcaggtccgagaggagtcgcttcttggactgtccagagggccgagtgccaaagcagcaactgcagggccataagtttcatggggctttgggtcgcgggaccggccatggtggctcttatatttcttcttactcttcttttctctcttatttccctatagtgagtcgtattagcttctgtacgagggtccaaaagctttcagcgaagggcgacacaaaatttattctaaatgcataataaatactgataacatcttatagtttgtattatattttgtattatcgttgacatgtataattttgatatcaaaaactgattttccctttattattttcgagatttattttcttaattctctttaacaaactagaaatattgtatatacaaaaaatcataaataatagatgaatagtttaattataggtgttcatcaatcgaaaaagcaacgtatcttatttaaagtgcgttgcttttttctcatttataaggttaaataattctcatatatcaagcaaagtgacaggcgcccttaaatattctgacaaatgctctttccctaaactccccccataaaaaaacccgccgaagcgggtttttacgttatttgcggattaacgattactcgttatcagaaccgcccagggggcccgagcttaagactggccgtcgttttacaacacagaaagagtttgtagaaacgcaaaaaggccatccgtcaggggccttctgcttagtttgatgcctggcagttccctactctcgccttccgcttcctcgctcactgactcgctgcgctcggtcgttcggctgcggcgagcggtatcagctcactcaaaggcggtaatacggttatccacagaatcaggggataacgcaggaaagaacatgtgagcaaaaggccagcaaaaggccaggaaccgtaaaaaggccgcgttgctggcgtttttccataggctccgcccccctgacgagcatcacaaaaatcgacgctcaagtcagaggtggcgaaacccgacaggactataaagataccaggcgtttccccctggaagctccctcgtgcgctctcctgttccgaccctgccgcttaccggatacctgtccgcctttctcccttcgggaagcgtggcgctttctcatagctcacgctgtaggtatctcagttcggtgtaggtcgttcgctccaagctgggctgtgtgcacgaaccccccgttcagcccgaccgctgcgccttatccggtaactatcgtcttgagtccaacccggtaagacacgacttatcgccactggcagcagccactggtaacaggattagcagagcgaggtatgtaggcggtgctacagagttcttgaagtggtgggctaactacggctacactagaagaacagtatttggtatctgcgctctgctgaagccagttaccttcggaaaaagagttggtagctcttgatccggcaaacaaaccaccgctggtagcggtggtttttttgtttgcaagcagcagattacgcgcagaaaaaaaggatctcaagaagatcctttgatcttttctacggggtctgacgctcagtggaacgacgcgcgcgtaactcacgttaagggattttggtcatgagcttgcgccgtcccgtcaagtcagcgtaatgctctgctttt

SEQ ID NO: 248758 - DNA, 1593 bp, Artificial Sequence
  derived and/or modified sequence
agtcgtggccccaggtaatttcctcccaggcctccatggggttatgtataaaggcccccctagagctgggccccaaaacagcccggagcctgcagcccagccccacccagacccatggctggacctgccacccagagccccatgaagctgatggccctgcagctgctgctgtggcacagtgcactctggacagtgcaggaagccacccccctgggccctgccagctccctgccccagagcttcctgctcaagtgcttagagcaagtgaggaagatccagggcgatggcgcagcgctccaggagaagctgtgtgccacctacaagctgtgccaccccgaggagctggtgctgctcggacactctctgggcatcccctgggctcccctgagcagctgccccagccaggccctgcagctggcaggctgcttgagccaactccatagcggccttttcctctaccaggggctcctgcaggccctggaagggatctcccccgagttgggtcccaccttggacacactgcagctggacgtcgccgactttgccaccaccatctggcagcagatggaagaactgggaatggcccctgccctgcagcccacccagggtgccatgccggccttcgcctctgctttccagcgccgggcaggaggggtcctggttgcctcccatctgcagagcttcctggaggtgtcgtaccgcgttctacgccaccttgcccagccctgagccaagccctccccatcccatgtatttatctctatttaatatttatgtctatttaagcctcatatttaaagacagggaagagcagaacggagccccaggcctctgtgtccttccctgcatttctgagtttcattctcctgcctgtagcagtgagaaaaagctcctgtcctcccatcccctggactgggaggtagataggtaaataccaagtatttattactatgactgctccccagccctggctctgcaatgggcactgggatgagccgctgtgagcccctggtcctgagggtccccacctgggacccttgagagtatcaggtctcccacgtgggagacaagaaatccctgtttaatatttaaacagcagtgttccccatctgggtccttgcacccctcactctggcctcagccgactgcacagcggcccctgcatccccttggctgtgaggcccctggacaagcagaggtggccagagctgggaggcatggccctggggtcccacgaatttgctggggaatctcgtttttcttcttaagacttttgggacatggtttgactcccgaacatcaccgacgcgtctcctgtttttctgggtggcctcgggacacctgccctgcccccacgagggtcaggactgtgactctttttagggccaggcaggtgcctggacatttgccttgctggacggggactggggatgtgggagggagcagacaggaggaatcatgtcaggcctgtgtgtgaaaggaagctccactgtcaccctccacctcttcaccccccactcaccagtgtcccctccactgtcacattgtaactgaacttcaggataataaagtgtttgcctccaaaaaaaaaaa

SEQ ID NO: 248759 - DNA, 758 bp, Artificial Sequence
  derived and/or modified sequence
gggaaataagagagaaaagaagagtaagaagaaatataagagccaccatggccggtcccgcgacccaaagccccatgaaacttatggccctgcagttgctgctttggcactcggccctctggacagtccaagaagcgactcctctcggacctgcctcatcgttgccgcagtcattccttttgaagtgtctggagcaggtgcgaaagattcagggcgatggagccgcactccaagagaagctctgcgcgacatacaaactttgccatcccgaggagctcgtactgctcgggcacagcttggggattccctgggctcctctctcgtcctgtccgtcgcaggctttgcagttggcagggtgcctttcccagctccactccggtttgttcttgtatcagggactgctgcaagcccttgagggaatctcgccagaattgggcccgacgctggacacgttgcagctcgacgtggcggatttcgcaacaaccatctggcagcagatggaggaactggggatggcacccgcgctgcagcccacgcagggggcaatgccggcctttgcgtccgcgtttcagcgcagggcgggtggagtcctcgtagcgagccaccttcaatcatttttggaagtctcgtaccgggtgctgagacatcttgcgcagccgtgaagcgctgccttctgcggggcttgccttctggccatgcccttcttctctcccttgcacctgtacctcttggtctttgaataaagcctgagtaggaag

SEQ ID NO: 248760 - DNA, 615 bp, Artificial Sequence
  derived and/or modified sequence
atggctggacctgccacccagagccccatgaagctgatggccctgcagctgctgctgtggcacagtgcactctggacagtgcaggaagccacccccctgggccctgccagctccctgccccagagcttcctgctcaagtgcttagagcaagtgaggaagatccagggcgatggcgcagcgctccaggagaagctgtgtgccacctacaagctgtgccaccccgaggagctggtgctgctcggacactctctgggcatcccctgggctcccctgagcagctgccccagccaggccctgcagctggcaggctgcttgagccaactccatagcggccttttcctctaccaggggctcctgcaggccctggaagggatctcccccgagttgggtcccaccttggacacactgcagctggacgtcgccgactttgccaccaccatctggcagcagatggaagaactgggaatggcccctgccctgcagcccacccagggtgccatgccggccttcgcctctgctttccagcgccgggcaggaggggtcctggttgcctcccatctgcagagcttcctggaggtgtcgtaccgcgttctacgccaccttgcccagccctga

SEQ ID NO: 248761 - DNA, 800 bp, Artificial Sequence
  derived and/or modified sequence
taatacgactcactatagggaaataagagagaaaagaagagtaagaagaaatataagagccaccatggctggacctgccacccagagccccatgaagctgatggccctgcagctgctgctgtggcacagtgcactctggacagtgcaggaagccacccccctgggccctgccagctccctgccccagagcttcctgctcaagtgcttagagcaagtgaggaagatccagggcgatggcgcagcgctccaggagaagctgtgtgccacctacaagctgtgccaccccgaggagctggtgctgctcggacactctctgggcatcccctgggctcccctgagcagctgccccagccaggccctgcagctggcaggctgcttgagccaactccatagcggccttttcctctaccaggggctcctgcaggccctggaagggatctcccccgagttgggtcccaccttggacacactgcagctggacgtcgccgactttgccaccaccatctggcagcagatggaagaactgggaatggcccctgccctgcagcccacccagggtgccatgccggccttcgcctctgctttccagcgccgggcaggaggggtcctggttgcctcccatctgcagagcttcctggaggtgtcgtaccgcgttctacgccaccttgcccagccctgaagcgctgccttctgcggggcttgccttctggccatgcccttcttctctcccttgcacctgtacctcttggtctttgaataaagcctgagtaggaaggcggccgctcgagcatgcatctaga

SEQ ID NO: 248762 - DNA, 800 bp, Artificial Sequence
  derived and/or modified sequence
taatacgactcactatagggaaataagagagaaaagaagagtaagaagaaatataagagccaccatggccggtcccgcgacccaaagccccatgaaacttatggccctgcagttgctgctttggcactcggccctctggacagtccaagaagcgactcctctcggacctgcctcatcgttgccgcagtcattccttttgaagtgtctggagcaggtgcgaaagattcagggcgatggagccgcactccaagagaagctctgcgcgacatacaaactttgccatcccgaggagctcgtactgctcgggcacagcttggggattccctgggctcctctctcgtcctgtccgtcgcaggctttgcagttggcagggtgcctttcccagctccactccggtttgttcttgtatcagggactgctgcaagcccttgagggaatctcgccagaattgggcccgacgctggacacgttgcagctcgacgtggcggatttcgcaacaaccatctggcagcagatggaggaactggggatggcacccgcgctgcagcccacgcagggggcaatgccggcctttgcgtccgcgtttcagcgcagggcgggtggagtcctcgtagcgagccaccttcaatcatttttggaagtctcgtaccgggtgctgagacatcttgcgcagccgtgaagcgctgccttctgcggggcttgccttctggccatgcccttcttctctcccttgcacctgtacctcttggtctttgaataaagcctgagtaggaaggcggccgctcgagcatgcatctaga

SEQ ID NO: 248763 - DNA, 803 bp, Artificial Sequence
  derived and/or modified sequence
taatacgactcactatagggaaataagagagaaaagaagagtaagaagaaatataagagccaccatggccggtcccgcgacccaaagccccatgaaacttatggccctgcagttgctgctttggcactcggccctctggacagtccaagaagcgactcctctcggacctgcctcatcgttgccgcagtcattccttttgaagtgtctggagcaggtgcgaaagattcagggcgatggagccgcactccaagagaagctctgcgcgacatacaaactttgccatcccgaggagctcgtactgctcgggcacagcttggggattccctgggctcctctctcgtcctgtccgtcgcaggctttgcagttggcagggtgcctttcccagctccactccggtttgttcttgtatcagggactgctgcaagcccttgagggaatctcgccagaattgggcccgacgctggacacgttgcagctcgacgtggcggatttcgcaacaaccatctggcagcagatggaggaactggggatggcacccgcgctgcagcccacgcagggggcaatgccggcctttgcgtccgcgtttcagcgcagggcgggtggagtcctcgtagcgagccaccttcaatcatttttggaagtctcgtaccgggtgctgagacatcttgcgcagccgtgatgataagctgccttctgcggggcttgccttctggccatgcccttcttctctcccttgcacctgtacctcttggtctttgaataaagcctgagtaggaaggcggccgctcgagcatgcatctaga

SEQ ID NO: 248764 - DNA, 758 bp, Artificial Sequence
  derived and/or modified sequence
gggaaataagagagaaaagaagagtaagaagaaatataagagccaccatggccggtcccgcgacccaaagccccatgaaacttatggccctgcagttgctgctttggcactcggccctctggacagtccaagaagcgactcctctcggacctgcctcatcgttgccgcagtcattccttttgaagtgtctggagcaggtgcgaaagattcagggcgatggagccgcactccaagagaagctctgcgcgacatacaaactttgccatcccgaggagctcgtactgctcgggcacagcttggggattccctgggctcctctctcgtcctgtccgtcgcaggctttgcagttggcagggtgcctttcccagctccactccggtttgttcttgtatcagggactgctgcaagcccttgagggaatctcgccagaattgggcccgacgctggacacgttgcagctcgacgtggcggatttcgcaacaaccatctggcagcagatggaggaactggggatggcacccgcgctgcagcccacgcagggggcaatgccggcctttgcgtccgcgtttcagcgcagggcgggtggagtcctcgtagcgagccaccttcaatcatttttggaagtctcgtaccgggtgctgagacatcttgcgcagccgtgataagctgccttctgcggggcttgccttctggccatgcccttcttctctcccttgcacctgtacctcttggtctttgaataaagcctgagtaggaag

SEQ ID NO: 248765 - DNA, 825 bp, Artificial Sequence
  derived and/or modified sequence
taatacgactcactatagggaaataagagagaaaagaagagtaagaagaaatataagagccaccatggccggtcccgcgacccaaagccccatgaaacttatggccctgcagttgctgctttggcactcggccctctggacagtccaagaagcgactcctctcggacctgcctcatcgttgccgcagtcattccttttgaagtgtctggagcaggtgcgaaagattcagggcgatggagccgcactccaagagaagctctgcgcgacatacaaactttgccatcccgaggagctcgtactgctcgggcacagcttggggattccctgggctcctctctcgtcctgtccgtcgcaggctttgcagttggcagggtgcctttcccagctccactccggtttgttcttgtatcagggactgctgcaagcccttgagggaatctcgccagaattgggcccgacgctggacacgttgcagctcgacgtggcggatttcgcaacaaccatctggcagcagatggaggaactggggatggcacccgcgctgcagcccacgcagggggcaatgccggcctttgcgtccgcgtttcagcgcagggcgggtggagtcctcgtagcgagccaccttcaatcatttttggaagtctcgtaccgggtgctgagacatcttgcgcagccgtgatgataagctgccttctgcggggcttgccttctggccatgcccttcttctctcccttgcacctgtacctctcaaacaccattgtcacactccatggtctttgaataaagcctgagtaggaaggcggccgctcgagcatgcatctaga

SEQ ID NO: 248766 - DNA, 780 bp, Artificial Sequence
  derived and/or modified sequence
gggaaataagagagaaaagaagagtaagaagaaatataagagccaccatggccggtcccgcgacccaaagccccatgaaacttatggccctgcagttgctgctttggcactcggccctctggacagtccaagaagcgactcctctcggacctgcctcatcgttgccgcagtcattccttttgaagtgtctggagcaggtgcgaaagattcagggcgatggagccgcactccaagagaagctctgcgcgacatacaaactttgccatcccgaggagctcgtactgctcgggcacagcttggggattccctgggctcctctctcgtcctgtccgtcgcaggctttgcagttggcagggtgcctttcccagctccactccggtttgttcttgtatcagggactgctgcaagcccttgagggaatctcgccagaattgggcccgacgctggacacgttgcagctcgacgtggcggatttcgcaacaaccatctggcagcagatggaggaactggggatggcacccgcgctgcagcccacgcagggggcaatgccggcctttgcgtccgcgtttcagcgcagggcgggtggagtcctcgtagcgagccaccttcaatcatttttggaagtctcgtaccgggtgctgagacatcttgcgcagccgtgataagctgccttctgcggggcttgccttctggccatgcccttcttctctcccttgcacctgtacctctcaaacaccattgtcacactccatggtctttgaataaagcctgagtaggaag

SEQ ID NO: 248767 - DNA, 863 bp, Artificial Sequence
  derived and/or modified sequence
taatacgactcactatagggaaataagagagaaaagaagagtaagaagaaatataagagccaccatggccggtcccgcgacccaaagccccatgaaacttatggccctgcagttgctgctttggcactcggccctctggacagtccaagaagcgactcctctcggacctgcctcatcgttgccgcagtcattccttttgaagtgtctggagcaggtgcgaaagattcagggcgatggagccgcactccaagagaagctctgcgcgacatacaaactttgccatcccgaggagctcgtactgctcgggcacagcttggggattccctgggctcctctctcgtcctgtccgtcgcaggctttgcagttggcagggtgcctttcccagctccactccggtttgttcttgtatcagggactgctgcaagcccttgagggaatctcgccagaattgggcccgacgctggacacgttgcagctcgacgtggcggatttcgcaacaaccatctggcagcagatggaggaactggggatggcacccgcgctgcagcccacgcagggggcaatgccggcctttgcgtccgcgtttcagcgcagggcgggtggagtcctcgtagcgagccaccttcaatcatttttggaagtctcgtaccgggtgctgagacatcttgcgcagccgtgatgataagctgccttctgcggggcttgccttctggccatgcccttcttctctcccttgcacctgtacctctcaaacaccattgtcacaaacaccattgtcacaaacaccattgtcacaaacaccattgtcatggtctttgaataaagcctgagtaggaaggcggccgctcgagcatgcatctaga

SEQ ID NO: 248768 - DNA, 818 bp, Artificial Sequence
  derived and/or modified sequence
gggaaataagagagaaaagaagagtaagaagaaatataagagccaccatggccggtcccgcgacccaaagccccatgaaacttatggccctgcagttgctgctttggcactcggccctctggacagtccaagaagcgactcctctcggacctgcctcatcgttgccgcagtcattccttttgaagtgtctggagcaggtgcgaaagattcagggcgatggagccgcactccaagagaagctctgcgcgacatacaaactttgccatcccgaggagctcgtactgctcgggcacagcttggggattccctgggctcctctctcgtcctgtccgtcgcaggctttgcagttggcagggtgcctttcccagctccactccggtttgttcttgtatcagggactgctgcaagcccttgagggaatctcgccagaattgggcccgacgctggacacgttgcagctcgacgtggcggatttcgcaacaaccatctggcagcagatggaggaactggggatggcacccgcgctgcagcccacgcagggggcaatgccggcctttgcgtccgcgtttcagcgcagggcgggtggagtcctcgtagcgagccaccttcaatcatttttggaagtctcgtaccgggtgctgagacatcttgcgcagccgtgataagctgccttctgcggggcttgccttctggccatgcccttcttctctcccttgcacctgtacctctcaaacaccattgtcacaaacaccattgtcacaaacaccattgtcacaaacaccattgtcatggtctttgaataaagcctgagtaggaag

SEQ ID NO: 248769 - DNA, 824 bp, Artificial Sequence
  derived and/or modified sequence
taatacgactcactatagggaaataagagagaaaagaagagtaagaagaaatataagagccaccatggccggtcccgcgacccaaagccccatgaaacttatggccctgcagttgctgctttggcactcggccctctggacagtccaagaagcgactcctctcggacctgcctcatcgttgccgcagtcattccttttgaagtgtctggagcaggtgcgaaagattcagggcgatggagccgcactccaagagaagctctgcgcgacatacaaactttgccatcccgaggagctcgtactgctcgggcacagcttggggattccctgggctcctctctcgtcctgtccgtcgcaggctttgcagttggcagggtgcctttcccagctccactccggtttgttcttgtatcagggactgctgcaagcccttgagggaatctcgccagaattgggcccgacgctggacacgttgcagctcgacgtggcggatttcgcaacaaccatctggcagcagatggaggaactggggatggcacccgcgctgcagcccacgcagggggcaatgccggcctttgcgtccgcgtttcagcgcagggcgggtggagtcctcgtagcgagccaccttcaatcatttttggaagtctcgtaccgggtgctgagacatcttgcgcagccgtgataataggctgccttctgcggggcttgccttctggccatgcccttcttctctcccttgcacctgtacctctagtagtgctttctactttatgtggtctttgaataaagcctgagtaggaaggcggccgctcgagcatgcatctaga

SEQ ID NO: 248770 - DNA, 782 bp, Artificial Sequence
  derived and/or modified sequence
gggaaataagagagaaaagaagagtaagaagaaatataagagccaccatggccggtcccgcgacccaaagccccatgaaacttatggccctgcagttgctgctttggcactcggccctctggacagtccaagaagcgactcctctcggacctgcctcatcgttgccgcagtcattccttttgaagtgtctggagcaggtgcgaaagattcagggcgatggagccgcactccaagagaagctctgcgcgacatacaaactttgccatcccgaggagctcgtactgctcgggcacagcttggggattccctgggctcctctctcgtcctgtccgtcgcaggctttgcagttggcagggtgcctttcccagctccactccggtttgttcttgtatcagggactgctgcaagcccttgagggaatctcgccagaattgggcccgacgctggacacgttgcagctcgacgtggcggatttcgcaacaaccatctggcagcagatggaggaactggggatggcacccgcgctgcagcccacgcagggggcaatgccggcctttgcgtccgcgtttcagcgcagggcgggtggagtcctcgtagcgagccaccttcaatcatttttggaagtctcgtaccgggtgctgagacatcttgcgcagccgtgataataggctgccttctgcggggcttgccttctggccatgcccttcttctctcccttgcacctgtacctctagtagtgctttctactttatgtggtctttgaataaagcctgagtaggaag

SEQ ID NO: 248771 - DNA, 810 bp, Artificial Sequence
  derived and/or modified sequence
taatacgactcactatagggaaataagagagaaaagaagagtaagaagaaatataagagccaccatggccggtcccgcgacccaaagccccatgaaacttatggccctgcagttgctgctttggcactcggccctctggacagtccaagaagcgactcctctcggacctgcctcatcgttgccgcagtcattccttttgaagtgtctggagcaggtgcgaaagattcagggcgatggagccgcactccaagagaagctctgcgcgacatacaaactttgccatcccgaggagctcgtactgctcgggcacagcttggggattccctgggctcctctctcgtcctgtccgtcgcaggctttgcagttggcagggtgcctttcccagctccactccggtttgttcttgtatcagggactgctgcaagcccttgagggaatctcgccagaattgggcccgacgctggacacgttgcagctcgacgtggcggatttcgcaacaaccatctggcagcagatggaggaactggggatggcacccgcgctgcagcccacgcagggggcaatgccggcctttgcgtccgcgtttcagcgcagggcgggtggagtcctcgtagcgagccaccttcaatcatttttggaagtctcgtaccgggtgctgagacatcttgcgcagccgtgataataggctgccttctgcggggcttgccttctggccatgcccttcttctctcccttgcacctgtacctctactttattggtctttgaataaagcctgagtaggaaggcggccgctcgagcatgcatctaga

SEQ ID NO: 248772 - DNA, 768 bp, Artificial Sequence
  derived and/or modified sequence
gggaaataagagagaaaagaagagtaagaagaaatataagagccaccatggccggtcccgcgacccaaagccccatgaaacttatggccctgcagttgctgctttggcactcggccctctggacagtccaagaagcgactcctctcggacctgcctcatcgttgccgcagtcattccttttgaagtgtctggagcaggtgcgaaagattcagggcgatggagccgcactccaagagaagctctgcgcgacatacaaactttgccatcccgaggagctcgtactgctcgggcacagcttggggattccctgggctcctctctcgtcctgtccgtcgcaggctttgcagttggcagggtgcctttcccagctccactccggtttgttcttgtatcagggactgctgcaagcccttgagggaatctcgccagaattgggcccgacgctggacacgttgcagctcgacgtggcggatttcgcaacaaccatctggcagcagatggaggaactggggatggcacccgcgctgcagcccacgcagggggcaatgccggcctttgcgtccgcgtttcagcgcagggcgggtggagtcctcgtagcgagccaccttcaatcatttttggaagtctcgtaccgggtgctgagacatcttgcgcagccgtgataataggctgccttctgcggggcttgccttctggccatgcccttcttctctcccttgcacctgtacctctactttattggtctttgaataaagcctgagtaggaag

SEQ ID NO: 248773 - DNA, 817 bp, Artificial Sequence
  derived and/or modified sequence
taatacgactcactatagggaaataagagagaaaagaagagtaagaagaaatataagagccaccatggccggtcccgcgacccaaagccccatgaaacttatggccctgcagttgctgctttggcactcggccctctggacagtccaagaagcgactcctctcggacctgcctcatcgttgccgcagtcattccttttgaagtgtctggagcaggtgcgaaagattcagggcgatggagccgcactccaagagaagctctgcgcgacatacaaactttgccatcccgaggagctcgtactgctcgggcacagcttggggattccctgggctcctctctcgtcctgtccgtcgcaggctttgcagttggcagggtgcctttcccagctccactccggtttgttcttgtatcagggactgctgcaagcccttgagggaatctcgccagaattgggcccgacgctggacacgttgcagctcgacgtggcggatttcgcaacaaccatctggcagcagatggaggaactggggatggcacccgcgctgcagcccacgcagggggcaatgccggcctttgcgtccgcgtttcagcgcagggcgggtggagtcctcgtagcgagccaccttcaatcatttttggaagtctcgtaccgggtgctgagacatcttgcgcagccgtgataataggctgccttctgcggggcttgccttctggccatgcccttcttctctcccttgcacctgtacctctagtagtgctttctgtggtctttgaataaagcctgagtaggaaggcggccgctcgagcatgcatctaga

SEQ ID NO: 248774 - DNA, 775 bp, Artificial Sequence
  derived and/or modified sequence
gggaaataagagagaaaagaagagtaagaagaaatataagagccaccatggccggtcccgcgacccaaagccccatgaaacttatggccctgcagttgctgctttggcactcggccctctggacagtccaagaagcgactcctctcggacctgcctcatcgttgccgcagtcattccttttgaagtgtctggagcaggtgcgaaagattcagggcgatggagccgcactccaagagaagctctgcgcgacatacaaactttgccatcccgaggagctcgtactgctcgggcacagcttggggattccctgggctcctctctcgtcctgtccgtcgcaggctttgcagttggcagggtgcctttcccagctccactccggtttgttcttgtatcagggactgctgcaagcccttgagggaatctcgccagaattgggcccgacgctggacacgttgcagctcgacgtggcggatttcgcaacaaccatctggcagcagatggaggaactggggatggcacccgcgctgcagcccacgcagggggcaatgccggcctttgcgtccgcgtttcagcgcagggcgggtggagtcctcgtagcgagccaccttcaatcatttttggaagtctcgtaccgggtgctgagacatcttgcgcagccgtgataataggctgccttctgcggggcttgccttctggccatgcccttcttctctcccttgcacctgtacctctagtagtgctttctgtggtctttgaataaagcctgagtaggaag

SEQ ID NO: 248775 - DNA, 826 bp, Artificial Sequence
  derived and/or modified sequence
taatacgactcactatagggaaataagagagaaaagaagagtaagaagaaatataagagccaccatggccggtcccgcgacccaaagccccatgaaacttatggccctgcagttgctgctttggcactcggccctctggacagtccaagaagcgactcctctcggacctgcctcatcgttgccgcagtcattccttttgaagtgtctggagcaggtgcgaaagattcagggcgatggagccgcactccaagagaagctctgcgcgacatacaaactttgccatcccgaggagctcgtactgctcgggcacagcttggggattccctgggctcctctctcgtcctgtccgtcgcaggctttgcagttggcagggtgcctttcccagctccactccggtttgttcttgtatcagggactgctgcaagcccttgagggaatctcgccagaattgggcccgacgctggacacgttgcagctcgacgtggcggatttcgcaacaaccatctggcagcagatggaggaactggggatggcacccgcgctgcagcccacgcagggggcaatgccggcctttgcgtccgcgtttcagcgcagggcgggtggagtcctcgtagcgagccaccttcaatcatttttggaagtctcgtaccgggtgctgagacatcttgcgcagccgtgataataggctgccttctgcggggcttgccttctggccatgcccttcttctctcccttgcacctgtacctcttccataaagtaggaaacactacatggtctttgaataaagcctgagtaggaaggcggccgctcgagcatgcatctaga

SEQ ID NO: 248776 - DNA, 784 bp, Artificial Sequence
  derived and/or modified sequence
gggaaataagagagaaaagaagagtaagaagaaatataagagccaccatggccggtcccgcgacccaaagccccatgaaacttatggccctgcagttgctgctttggcactcggccctctggacagtccaagaagcgactcctctcggacctgcctcatcgttgccgcagtcattccttttgaagtgtctggagcaggtgcgaaagattcagggcgatggagccgcactccaagagaagctctgcgcgacatacaaactttgccatcccgaggagctcgtactgctcgggcacagcttggggattccctgggctcctctctcgtcctgtccgtcgcaggctttgcagttggcagggtgcctttcccagctccactccggtttgttcttgtatcagggactgctgcaagcccttgagggaatctcgccagaattgggcccgacgctggacacgttgcagctcgacgtggcggatttcgcaacaaccatctggcagcagatggaggaactggggatggcacccgcgctgcagcccacgcagggggcaatgccggcctttgcgtccgcgtttcagcgcagggcgggtggagtcctcgtagcgagccaccttcaatcatttttggaagtctcgtaccgggtgctgagacatcttgcgcagccgtgataataggctgccttctgcggggcttgccttctggccatgcccttcttctctcccttgcacctgtacctcttccataaagtaggaaacactacatggtctttgaataaagcctgagtaggaag

SEQ ID NO: 248777 - DNA, 810 bp, Artificial Sequence
  derived and/or modified sequence
taatacgactcactatagggaaataagagagaaaagaagagtaagaagaaatataagagccaccatggccggtcccgcgacccaaagccccatgaaacttatggccctgcagttgctgctttggcactcggccctctggacagtccaagaagcgactcctctcggacctgcctcatcgttgccgcagtcattccttttgaagtgtctggagcaggtgcgaaagattcagggcgatggagccgcactccaagagaagctctgcgcgacatacaaactttgccatcccgaggagctcgtactgctcgggcacagcttggggattccctgggctcctctctcgtcctgtccgtcgcaggctttgcagttggcagggtgcctttcccagctccactccggtttgttcttgtatcagggactgctgcaagcccttgagggaatctcgccagaattgggcccgacgctggacacgttgcagctcgacgtggcggatttcgcaacaaccatctggcagcagatggaggaactggggatggcacccgcgctgcagcccacgcagggggcaatgccggcctttgcgtccgcgtttcagcgcagggcgggtggagtcctcgtagcgagccaccttcaatcatttttggaagtctcgtaccgggtgctgagacatcttgcgcagccgtgataataggctgccttctgcggggcttgccttctggccatgcccttcttctctcccttgcacctgtacctctacactactggtctttgaataaagcctgagtaggaaggcggccgctcgagcatgcatctaga

SEQ ID NO: 248778 - DNA, 768 bp, Artificial Sequence
  derived and/or modified sequence
gggaaataagagagaaaagaagagtaagaagaaatataagagccaccatggccggtcccgcgacccaaagccccatgaaacttatggccctgcagttgctgctttggcactcggccctctggacagtccaagaagcgactcctctcggacctgcctcatcgttgccgcagtcattccttttgaagtgtctggagcaggtgcgaaagattcagggcgatggagccgcactccaagagaagctctgcgcgacatacaaactttgccatcccgaggagctcgtactgctcgggcacagcttggggattccctgggctcctctctcgtcctgtccgtcgcaggctttgcagttggcagggtgcctttcccagctccactccggtttgttcttgtatcagggactgctgcaagcccttgagggaatctcgccagaattgggcccgacgctggacacgttgcagctcgacgtggcggatttcgcaacaaccatctggcagcagatggaggaactggggatggcacccgcgctgcagcccacgcagggggcaatgccggcctttgcgtccgcgtttcagcgcagggcgggtggagtcctcgtagcgagccaccttcaatcatttttggaagtctcgtaccgggtgctgagacatcttgcgcagccgtgataataggctgccttctgcggggcttgccttctggccatgcccttcttctctcccttgcacctgtacctctacactactggtctttgaataaagcctgagtaggaag

SEQ ID NO: 248779 - DNA, 819 bp, Artificial Sequence
  derived and/or modified sequence
taatacgactcactatagggaaataagagagaaaagaagagtaagaagaaatataagagccaccatggccggtcccgcgacccaaagccccatgaaacttatggccctgcagttgctgctttggcactcggccctctggacagtccaagaagcgactcctctcggacctgcctcatcgttgccgcagtcattccttttgaagtgtctggagcaggtgcgaaagattcagggcgatggagccgcactccaagagaagctctgcgcgacatacaaactttgccatcccgaggagctcgtactgctcgggcacagcttggggattccctgggctcctctctcgtcctgtccgtcgcaggctttgcagttggcagggtgcctttcccagctccactccggtttgttcttgtatcagggactgctgcaagcccttgagggaatctcgccagaattgggcccgacgctggacacgttgcagctcgacgtggcggatttcgcaacaaccatctggcagcagatggaggaactggggatggcacccgcgctgcagcccacgcagggggcaatgccggcctttgcgtccgcgtttcagcgcagggcgggtggagtcctcgtagcgagccaccttcaatcatttttggaagtctcgtaccgggtgctgagacatcttgcgcagccgtgataataggctgccttctgcggggcttgccttctggccatgcccttcttctctcccttgcacctgtacctcttccataaagtaggaaatggtctttgaataaagcctgagtaggaaggcggccgctcgagcatgcatctaga

SEQ ID NO: 248780 - DNA, 777 bp, Artificial Sequence
  derived and/or modified sequence
gggaaataagagagaaaagaagagtaagaagaaatataagagccaccatggccggtcccgcgacccaaagccccatgaaacttatggccctgcagttgctgctttggcactcggccctctggacagtccaagaagcgactcctctcggacctgcctcatcgttgccgcagtcattccttttgaagtgtctggagcaggtgcgaaagattcagggcgatggagccgcactccaagagaagctctgcgcgacatacaaactttgccatcccgaggagctcgtactgctcgggcacagcttggggattccctgggctcctctctcgtcctgtccgtcgcaggctttgcagttggcagggtgcctttcccagctccactccggtttgttcttgtatcagggactgctgcaagcccttgagggaatctcgccagaattgggcccgacgctggacacgttgcagctcgacgtggcggatttcgcaacaaccatctggcagcagatggaggaactggggatggcacccgcgctgcagcccacgcagggggcaatgccggcctttgcgtccgcgtttcagcgcagggcgggtggagtcctcgtagcgagccaccttcaatcatttttggaagtctcgtaccgggtgctgagacatcttgcgcagccgtgataataggctgccttctgcggggcttgccttctggccatgcccttcttctctcccttgcacctgtacctcttccataaagtaggaaatggtctttgaataaagcctgagtaggaag

SEQ ID NO: 248781 - DNA, 825 bp, Artificial Sequence
  derived and/or modified sequence
taatacgactcactatagggaaataagagagaaaagaagagtaagaagaaatataagagccaccatggccggtcccgcgacccaaagccccatgaaacttatggccctgcagttgctgctttggcactcggccctctggacagtccaagaagcgactcctctcggacctgcctcatcgttgccgcagtcattccttttgaagtgtctggagcaggtgcgaaagattcagggcgatggagccgcactccaagagaagctctgcgcgacatacaaactttgccatcccgaggagctcgtactgctcgggcacagcttggggattccctgggctcctctctcgtcctgtccgtcgcaggctttgcagttggcagggtgcctttcccagctccactccggtttgttcttgtatcagggactgctgcaagcccttgagggaatctcgccagaattgggcccgacgctggacacgttgcagctcgacgtggcggatttcgcaacaaccatctggcagcagatggaggaactggggatggcacccgcgctgcagcccacgcagggggcaatgccggcctttgcgtccgcgtttcagcgcagggcgggtggagtcctcgtagcgagccaccttcaatcatttttggaagtctcgtaccgggtgctgagacatcttgcgcagccgtgataataggctgccttctgcggggcttgccttctggccatgcccttcttctctcccttgcacctgtacctctaacccatggaattcagttctcatggtctttgaataaagcctgagtaggaaggcggccgctcgagcatgcatctaga

SEQ ID NO: 248782 - DNA, 783 bp, Artificial Sequence
  derived and/or modified sequence
gggaaataagagagaaaagaagagtaagaagaaatataagagccaccatggccggtcccgcgacccaaagccccatgaaacttatggccctgcagttgctgctttggcactcggccctctggacagtccaagaagcgactcctctcggacctgcctcatcgttgccgcagtcattccttttgaagtgtctggagcaggtgcgaaagattcagggcgatggagccgcactccaagagaagctctgcgcgacatacaaactttgccatcccgaggagctcgtactgctcgggcacagcttggggattccctgggctcctctctcgtcctgtccgtcgcaggctttgcagttggcagggtgcctttcccagctccactccggtttgttcttgtatcagggactgctgcaagcccttgagggaatctcgccagaattgggcccgacgctggacacgttgcagctcgacgtggcggatttcgcaacaaccatctggcagcagatggaggaactggggatggcacccgcgctgcagcccacgcagggggcaatgccggcctttgcgtccgcgtttcagcgcagggcgggtggagtcctcgtagcgagccaccttcaatcatttttggaagtctcgtaccgggtgctgagacatcttgcgcagccgtgataataggctgccttctgcggggcttgccttctggccatgcccttcttctctcccttgcacctgtacctctaacccatggaattcagttctcatggtctttgaataaagcctgagtaggaag

SEQ ID NO: 248783 - DNA, 810 bp, Artificial Sequence
  derived and/or modified sequence
taatacgactcactatagggaaataagagagaaaagaagagtaagaagaaatataagagccaccatggccggtcccgcgacccaaagccccatgaaacttatggccctgcagttgctgctttggcactcggccctctggacagtccaagaagcgactcctctcggacctgcctcatcgttgccgcagtcattccttttgaagtgtctggagcaggtgcgaaagattcagggcgatggagccgcactccaagagaagctctgcgcgacatacaaactttgccatcccgaggagctcgtactgctcgggcacagcttggggattccctgggctcctctctcgtcctgtccgtcgcaggctttgcagttggcagggtgcctttcccagctccactccggtttgttcttgtatcagggactgctgcaagcccttgagggaatctcgccagaattgggcccgacgctggacacgttgcagctcgacgtggcggatttcgcaacaaccatctggcagcagatggaggaactggggatggcacccgcgctgcagcccacgcagggggcaatgccggcctttgcgtccgcgtttcagcgcagggcgggtggagtcctcgtagcgagccaccttcaatcatttttggaagtctcgtaccgggtgctgagacatcttgcgcagccgtgataataggctgccttctgcggggcttgccttctggccatgcccttcttctctcccttgcacctgtacctctagttctctggtctttgaataaagcctgagtaggaaggcggccgctcgagcatgcatctaga

SEQ ID NO: 248784 - DNA, 768 bp, Artificial Sequence
  derived and/or modified sequence
gggaaataagagagaaaagaagagtaagaagaaatataagagccaccatggccggtcccgcgacccaaagccccatgaaacttatggccctgcagttgctgctttggcactcggccctctggacagtccaagaagcgactcctctcggacctgcctcatcgttgccgcagtcattccttttgaagtgtctggagcaggtgcgaaagattcagggcgatggagccgcactccaagagaagctctgcgcgacatacaaactttgccatcccgaggagctcgtactgctcgggcacagcttggggattccctgggctcctctctcgtcctgtccgtcgcaggctttgcagttggcagggtgcctttcccagctccactccggtttgttcttgtatcagggactgctgcaagcccttgagggaatctcgccagaattgggcccgacgctggacacgttgcagctcgacgtggcggatttcgcaacaaccatctggcagcagatggaggaactggggatggcacccgcgctgcagcccacgcagggggcaatgccggcctttgcgtccgcgtttcagcgcagggcgggtggagtcctcgtagcgagccaccttcaatcatttttggaagtctcgtaccgggtgctgagacatcttgcgcagccgtgataataggctgccttctgcggggcttgccttctggccatgcccttcttctctcccttgcacctgtacctctagttctctggtctttgaataaagcctgagtaggaag

SEQ ID NO: 248785 - DNA, 818 bp, Artificial Sequence
  derived and/or modified sequence
taatacgactcactatagggaaataagagagaaaagaagagtaagaagaaatataagagccaccatggccggtcccgcgacccaaagccccatgaaacttatggccctgcagttgctgctttggcactcggccctctggacagtccaagaagcgactcctctcggacctgcctcatcgttgccgcagtcattccttttgaagtgtctggagcaggtgcgaaagattcagggcgatggagccgcactccaagagaagctctgcgcgacatacaaactttgccatcccgaggagctcgtactgctcgggcacagcttggggattccctgggctcctctctcgtcctgtccgtcgcaggctttgcagttggcagggtgcctttcccagctccactccggtttgttcttgtatcagggactgctgcaagcccttgagggaatctcgccagaattgggcccgacgctggacacgttgcagctcgacgtggcggatttcgcaacaaccatctggcagcagatggaggaactggggatggcacccgcgctgcagcccacgcagggggcaatgccggcctttgcgtccgcgtttcagcgcagggcgggtggagtcctcgtagcgagccaccttcaatcatttttggaagtctcgtaccgggtgctgagacatcttgcgcagccgtgataataggctgccttctgcggggcttgccttctggccatgcccttcttctctcccttgcacctgtacctctaacccatggaattcatggtctttgaataaagcctgagtaggaaggcggccgctcgagcatgcatctaga

SEQ ID NO: 248786 - DNA, 776 bp, Artificial Sequence
  derived and/or modified sequence
gggaaataagagagaaaagaagagtaagaagaaatataagagccaccatggccggtcccgcgacccaaagccccatgaaacttatggccctgcagttgctgctttggcactcggccctctggacagtccaagaagcgactcctctcggacctgcctcatcgttgccgcagtcattccttttgaagtgtctggagcaggtgcgaaagattcagggcgatggagccgcactccaagagaagctctgcgcgacatacaaactttgccatcccgaggagctcgtactgctcgggcacagcttggggattccctgggctcctctctcgtcctgtccgtcgcaggctttgcagttggcagggtgcctttcccagctccactccggtttgttcttgtatcagggactgctgcaagcccttgagggaatctcgccagaattgggcccgacgctggacacgttgcagctcgacgtggcggatttcgcaacaaccatctggcagcagatggaggaactggggatggcacccgcgctgcagcccacgcagggggcaatgccggcctttgcgtccgcgtttcagcgcagggcgggtggagtcctcgtagcgagccaccttcaatcatttttggaagtctcgtaccgggtgctgagacatcttgcgcagccgtgataataggctgccttctgcggggcttgccttctggccatgcccttcttctctcccttgcacctgtacctctaacccatggaattcatggtctttgaataaagcctgagtaggaag

SEQ ID NO: 248787 - DNA, 1436 bp, Artificial Sequence
  derived and/or modified sequence
taatacgactcactatagggaaataagagagaaaagaagagtaagaagaaatataagagccacctcgtgaggatctatttccggtgaattcctcgagactagttctagagcggccgcggatcccgcccctctccctcccccccccctaacgttactggccgaagccgcttggaataaggccggtgtgcgtttgtctatatgttattttccaccatattgccgtcttttggcaatgtgagggcccggaaacctggccctgtcttcttgacgagcattcctaggggtctttcccctctcgccaaaggaatgcaaggtctgttgaatgtcgtgaaggaagcagttcctctggaagcttcttgaagacaaacaacgtctgtagcgaccctttgcaggcagcggaaccccccacctggcgacaggtgcctctgcggccaaaagccacgtgtataagatacacctgcaaaggcggcacaaccccagtgccacgttgtgagttggatagttgtggaaagagtcaaatggctcacctcaagcgtattcaacaaggggctgaaggatgcccagaaggtaccccattgtatgggatctgatctggggcctcggtgcacatgctttacatgtgtttagtcgaggttaaaaaacgtctaggccccccgaaccacggggacgtggttttcctttgaaaaacacgatgataatatggccggtcccgcgacccaaagccccatgaaacttatggccctgcagttgctgctttggcactcggccctctggacagtccaagaagcgactcctctcggacctgcctcatcgttgccgcagtcattccttttgaagtgtctggagcaggtgcgaaagattcagggcgatggagccgcactccaagagaagctctgcgcgacatacaaactttgccatcccgaggagctcgtactgctcgggcacagcttggggattccctgggctcctctctcgtcctgtccgtcgcaggctttgcagttggcagggtgcctttcccagctccactccggtttgttcttgtatcagggactgctgcaagcccttgagggaatctcgccagaattgggcccgacgctggacacgttgcagctcgacgtggcggatttcgcaacaaccatctggcagcagatggaggaactggggatggcacccgcgctgcagcccacgcagggggcaatgccggcctttgcgtccgcgtttcagcgcagggcgggtggagtcctcgtagcgagccaccttcaatcatttttggaagtctcgtaccgggtgctgagacatcttgcgcagccgtgataataggctggagcctcggtggccatgcttcttgccccttgggcctccccccagcccctcctccccttcctgcacccgtacccccgtggtctttgaataaagtctgagtgggcggctctaga

SEQ ID NO: 248788 - DNA, 1413 bp, Artificial Sequence
  derived and/or modified sequence
gggaaataagagagaaaagaagagtaagaagaaatataagagccacctcgtgaggatctatttccggtgaattcctcgagactagttctagagcggccgcggatcccgcccctctccctcccccccccctaacgttactggccgaagccgcttggaataaggccggtgtgcgtttgtctatatgttattttccaccatattgccgtcttttggcaatgtgagggcccggaaacctggccctgtcttcttgacgagcattcctaggggtctttcccctctcgccaaaggaatgcaaggtctgttgaatgtcgtgaaggaagcagttcctctggaagcttcttgaagacaaacaacgtctgtagcgaccctttgcaggcagcggaaccccccacctggcgacaggtgcctctgcggccaaaagccacgtgtataagatacacctgcaaaggcggcacaaccccagtgccacgttgtgagttggatagttgtggaaagagtcaaatggctcacctcaagcgtattcaacaaggggctgaaggatgcccagaaggtaccccattgtatgggatctgatctggggcctcggtgcacatgctttacatgtgtttagtcgaggttaaaaaacgtctaggccccccgaaccacggggacgtggttttcctttgaaaaacacgatgataatatggccggtcccgcgacccaaagccccatgaaacttatggccctgcagttgctgctttggcactcggccctctggacagtccaagaagcgactcctctcggacctgcctcatcgttgccgcagtcattccttttgaagtgtctggagcaggtgcgaaagattcagggcgatggagccgcactccaagagaagctctgcgcgacatacaaactttgccatcccgaggagctcgtactgctcgggcacagcttggggattccctgggctcctctctcgtcctgtccgtcgcaggctttgcagttggcagggtgcctttcccagctccactccggtttgttcttgtatcagggactgctgcaagcccttgagggaatctcgccagaattgggcccgacgctggacacgttgcagctcgacgtggcggatttcgcaacaaccatctggcagcagatggaggaactggggatggcacccgcgctgcagcccacgcagggggcaatgccggcctttgcgtccgcgtttcagcgcagggcgggtggagtcctcgtagcgagccaccttcaatcatttttggaagtctcgtaccgggtgctgagacatcttgcgcagccgtgataataggctggagcctcggtggccatgcttcttgccccttgggcctccccccagcccctcctccccttcctgcacccgtacccccgtggtctttgaataaagtctgagtgggcggc

SEQ ID NO: 248789 - DNA, 1430 bp, Artificial Sequence
  derived and/or modified sequence
taatacgactcactatagggaaataagagagaaaagaagagtaagaagaaatataagatcgtgaggatctatttccggtgaattcctcgagactagttctagagcggccgcggatcccgcccctctccctcccccccccctaacgttactggccgaagccgcttggaataaggccggtgtgcgtttgtctatatgttattttccaccatattgccgtcttttggcaatgtgagggcccggaaacctggccctgtcttcttgacgagcattcctaggggtctttcccctctcgccaaaggaatgcaaggtctgttgaatgtcgtgaaggaagcagttcctctggaagcttcttgaagacaaacaacgtctgtagcgaccctttgcaggcagcggaaccccccacctggcgacaggtgcctctgcggccaaaagccacgtgtataagatacacctgcaaaggcggcacaaccccagtgccacgttgtgagttggatagttgtggaaagagtcaaatggctcacctcaagcgtattcaacaaggggctgaaggatgcccagaaggtaccccattgtatgggatctgatctggggcctcggtgcacatgctttacatgtgtttagtcgaggttaaaaaacgtctaggccccccgaaccacggggacgtggttttcctttgaaaaacacgatgataatatggccggtcccgcgacccaaagccccatgaaacttatggccctgcagttgctgctttggcactcggccctctggacagtccaagaagcgactcctctcggacctgcctcatcgttgccgcagtcattccttttgaagtgtctggagcaggtgcgaaagattcagggcgatggagccgcactccaagagaagctctgcgcgacatacaaactttgccatcccgaggagctcgtactgctcgggcacagcttggggattccctgggctcctctctcgtcctgtccgtcgcaggctttgcagttggcagggtgcctttcccagctccactccggtttgttcttgtatcagggactgctgcaagcccttgagggaatctcgccagaattgggcccgacgctggacacgttgcagctcgacgtggcggatttcgcaacaaccatctggcagcagatggaggaactggggatggcacccgcgctgcagcccacgcagggggcaatgccggcctttgcgtccgcgtttcagcgcagggcgggtggagtcctcgtagcgagccaccttcaatcatttttggaagtctcgtaccgggtgctgagacatcttgcgcagccgtgataataggctggagcctcggtggccatgcttcttgccccttgggcctccccccagcccctcctccccttcctgcacccgtacccccgtggtctttgaataaagtctgagtgggcggctctaga

SEQ ID NO: 248790 - DNA, 1407 bp, Artificial Sequence
  derived and/or modified sequence
gggaaataagagagaaaagaagagtaagaagaaatataagatcgtgaggatctatttccggtgaattcctcgagactagttctagagcggccgcggatcccgcccctctccctcccccccccctaacgttactggccgaagccgcttggaataaggccggtgtgcgtttgtctatatgttattttccaccatattgccgtcttttggcaatgtgagggcccggaaacctggccctgtcttcttgacgagcattcctaggggtctttcccctctcgccaaaggaatgcaaggtctgttgaatgtcgtgaaggaagcagttcctctggaagcttcttgaagacaaacaacgtctgtagcgaccctttgcaggcagcggaaccccccacctggcgacaggtgcctctgcggccaaaagccacgtgtataagatacacctgcaaaggcggcacaaccccagtgccacgttgtgagttggatagttgtggaaagagtcaaatggctcacctcaagcgtattcaacaaggggctgaaggatgcccagaaggtaccccattgtatgggatctgatctggggcctcggtgcacatgctttacatgtgtttagtcgaggttaaaaaacgtctaggccccccgaaccacggggacgtggttttcctttgaaaaacacgatgataatatggccggtcccgcgacccaaagccccatgaaacttatggccctgcagttgctgctttggcactcggccctctggacagtccaagaagcgactcctctcggacctgcctcatcgttgccgcagtcattccttttgaagtgtctggagcaggtgcgaaagattcagggcgatggagccgcactccaagagaagctctgcgcgacatacaaactttgccatcccgaggagctcgtactgctcgggcacagcttggggattccctgggctcctctctcgtcctgtccgtcgcaggctttgcagttggcagggtgcctttcccagctccactccggtttgttcttgtatcagggactgctgcaagcccttgagggaatctcgccagaattgggcccgacgctggacacgttgcagctcgacgtggcggatttcgcaacaaccatctggcagcagatggaggaactggggatggcacccgcgctgcagcccacgcagggggcaatgccggcctttgcgtccgcgtttcagcgcagggcgggtggagtcctcgtagcgagccaccttcaatcatttttggaagtctcgtaccgggtgctgagacatcttgcgcagccgtgataataggctggagcctcggtggccatgcttcttgccccttgggcctccccccagcccctcctccccttcctgcacccgtacccccgtggtctttgaataaagtctgagtgggcggc

SEQ ID NO: 248791 - DNA, 795 bp, Artificial Sequence
  derived and/or modified sequence
taatacgactcactatagggaaataagagagaaaagaagagtaagaagaaatataagaatggccggtcccgcgacccaaagccccatgaaacttatggccctgcagttgctgctttggcactcggccctctggacagtccaagaagcgactcctctcggacctgcctcatcgttgccgcagtcattccttttgaagtgtctggagcaggtgcgaaagattcagggcgatggagccgcactccaagagaagctctgcgcgacatacaaactttgccatcccgaggagctcgtactgctcgggcacagcttggggattccctgggctcctctctcgtcctgtccgtcgcaggctttgcagttggcagggtgcctttcccagctccactccggtttgttcttgtatcagggactgctgcaagcccttgagggaatctcgccagaattgggcccgacgctggacacgttgcagctcgacgtggcggatttcgcaacaaccatctggcagcagatggaggaactggggatggcacccgcgctgcagcccacgcagggggcaatgccggcctttgcgtccgcgtttcagcgcagggcgggtggagtcctcgtagcgagccaccttcaatcatttttggaagtctcgtaccgggtgctgagacatcttgcgcagccgtgataataggctggagcctcggtggccatgcttcttgccccttgggcctccccccagcccctcctccccttcctgcacccgtacccccgtggtctttgaataaagtctgagtgggcggctctaga

SEQ ID NO: 248792 - DNA, 772 bp, Artificial Sequence
  derived and/or modified sequence
gggaaataagagagaaaagaagagtaagaagaaatataagaatggccggtcccgcgacccaaagccccatgaaacttatggccctgcagttgctgctttggcactcggccctctggacagtccaagaagcgactcctctcggacctgcctcatcgttgccgcagtcattccttttgaagtgtctggagcaggtgcgaaagattcagggcgatggagccgcactccaagagaagctctgcgcgacatacaaactttgccatcccgaggagctcgtactgctcgggcacagcttggggattccctgggctcctctctcgtcctgtccgtcgcaggctttgcagttggcagggtgcctttcccagctccactccggtttgttcttgtatcagggactgctgcaagcccttgagggaatctcgccagaattgggcccgacgctggacacgttgcagctcgacgtggcggatttcgcaacaaccatctggcagcagatggaggaactggggatggcacccgcgctgcagcccacgcagggggcaatgccggcctttgcgtccgcgtttcagcgcagggcgggtggagtcctcgtagcgagccaccttcaatcatttttggaagtctcgtaccgggtgctgagacatcttgcgcagccgtgataataggctggagcctcggtggccatgcttcttgccccttgggcctccccccagcccctcctccccttcctgcacccgtacccccgtggtctttgaataaagtctgagtgggcggc

SEQ ID NO: 248793 - DNA, 1518 bp, Artificial Sequence
  derived and/or modified sequence
taatacgactcactatagggaaataagagagaaaagaagagtaagaagaaatataagagccacctcgtgaggatctatttccggtgaattcctcgagactagttctagagcggccgcggatcccgcccctctccctcccccccccctaacgttactggccgaagccgcttggaataaggccggtgtgcgtttgtctatatgttattttccaccatattgccgtcttttggcaatgtgagggcccggaaacctggccctgtcttcttgacgagcattcctaggggtctttcccctctcgccaaaggaatgcaaggtctgttgaatgtcgtgaaggaagcagttcctctggaagcttcttgaagacaaacaacgtctgtagcgaccctttgcaggcagcggaaccccccacctggcgacaggtgcctctgcggccaaaagccacgtgtataagatacacctgcaaaggcggcacaaccccagtgccacgttgtgagttggatagttgtggaaagagtcaaatggctcacctcaagcgtattcaacaaggggctgaaggatgcccagaaggtaccccattgtatgggatctgatctggggcctcggtgcacatgctttacatgtgtttagtcgaggttaaaaaacgtctaggccccccgaaccacggggacgtggttttcctttgaaaaacacgatgataatatggccggtcccgcgacccaaagccccatgaaacttatggccctgcagttgctgctttggcactcggccctctggacagtccaagaagcgactcctctcggacctgcctcatcgttgccgcagtcattccttttgaagtgtctggagcaggtgcgaaagattcagggcgatggagccgcactccaagagaagctctgcgcgacatacaaactttgccatcccgaggagctcgtactgctcgggcacagcttggggattccctgggctcctctctcgtcctgtccgtcgcaggctttgcagttggcagggtgcctttcccagctccactccggtttgttcttgtatcagggactgctgcaagcccttgagggaatctcgccagaattgggcccgacgctggacacgttgcagctcgacgtggcggatttcgcaacaaccatctggcagcagatggaggaactggggatggcacccgcgctgcagcccacgcagggggcaatgccggcctttgcgtccgcgtttcagcgcagggcgggtggagtcctcgtagcgagccaccttcaatcatttttggaagtctcgtaccgggtgctgagacatcttgcgcagccgtgataataggctggagcctcggtggccatgcttcttgccccttgggcctccccccagcccctcctccccttcctgcacccgtacccccgtggtctttgaataaagtctgagtgggcggcaaaaaaaaaaaaaaaaaaaaaaaaaaaaaaaaaaaaaaaaaaaaaaaaaaaaaaaaaaaaaaaaaaaaaaaaaaaaaaaaggcgcgcc

SEQ ID NO: 248794 - DNA, 1493 bp, Artificial Sequence
  derived and/or modified sequence
gggaaataagagagaaaagaagagtaagaagaaatataagagccacctcgtgaggatctatttccggtgaattcctcgagactagttctagagcggccgcggatcccgcccctctccctcccccccccctaacgttactggccgaagccgcttggaataaggccggtgtgcgtttgtctatatgttattttccaccatattgccgtcttttggcaatgtgagggcccggaaacctggccctgtcttcttgacgagcattcctaggggtctttcccctctcgccaaaggaatgcaaggtctgttgaatgtcgtgaaggaagcagttcctctggaagcttcttgaagacaaacaacgtctgtagcgaccctttgcaggcagcggaaccccccacctggcgacaggtgcctctgcggccaaaagccacgtgtataagatacacctgcaaaggcggcacaaccccagtgccacgttgtgagttggatagttgtggaaagagtcaaatggctcacctcaagcgtattcaacaaggggctgaaggatgcccagaaggtaccccattgtatgggatctgatctggggcctcggtgcacatgctttacatgtgtttagtcgaggttaaaaaacgtctaggccccccgaaccacggggacgtggttttcctttgaaaaacacgatgataatatggccggtcccgcgacccaaagccccatgaaacttatggccctgcagttgctgctttggcactcggccctctggacagtccaagaagcgactcctctcggacctgcctcatcgttgccgcagtcattccttttgaagtgtctggagcaggtgcgaaagattcagggcgatggagccgcactccaagagaagctctgcgcgacatacaaactttgccatcccgaggagctcgtactgctcgggcacagcttggggattccctgggctcctctctcgtcctgtccgtcgcaggctttgcagttggcagggtgcctttcccagctccactccggtttgttcttgtatcagggactgctgcaagcccttgagggaatctcgccagaattgggcccgacgctggacacgttgcagctcgacgtggcggatttcgcaacaaccatctggcagcagatggaggaactggggatggcacccgcgctgcagcccacgcagggggcaatgccggcctttgcgtccgcgtttcagcgcagggcgggtggagtcctcgtagcgagccaccttcaatcatttttggaagtctcgtaccgggtgctgagacatcttgcgcagccgtgataataggctggagcctcggtggccatgcttcttgccccttgggcctccccccagcccctcctccccttcctgcacccgtacccccgtggtctttgaataaagtctgagtgggcggcaaaaaaaaaaaaaaaaaaaaaaaaaaaaaaaaaaaaaaaaaaaaaaaaaaaaaaaaaaaaaaaaaaaaaaaaaaaaaaaa

SEQ ID NO: 248795 - DNA, 1512 bp, Artificial Sequence
  derived and/or modified sequence
taatacgactcactatagggaaataagagagaaaagaagagtaagaagaaatataagatcgtgaggatctatttccggtgaattcctcgagactagttctagagcggccgcggatcccgcccctctccctcccccccccctaacgttactggccgaagccgcttggaataaggccggtgtgcgtttgtctatatgttattttccaccatattgccgtcttttggcaatgtgagggcccggaaacctggccctgtcttcttgacgagcattcctaggggtctttcccctctcgccaaaggaatgcaaggtctgttgaatgtcgtgaaggaagcagttcctctggaagcttcttgaagacaaacaacgtctgtagcgaccctttgcaggcagcggaaccccccacctggcgacaggtgcctctgcggccaaaagccacgtgtataagatacacctgcaaaggcggcacaaccccagtgccacgttgtgagttggatagttgtggaaagagtcaaatggctcacctcaagcgtattcaacaaggggctgaaggatgcccagaaggtaccccattgtatgggatctgatctggggcctcggtgcacatgctttacatgtgtttagtcgaggttaaaaaacgtctaggccccccgaaccacggggacgtggttttcctttgaaaaacacgatgataatatggccggtcccgcgacccaaagccccatgaaacttatggccctgcagttgctgctttggcactcggccctctggacagtccaagaagcgactcctctcggacctgcctcatcgttgccgcagtcattccttttgaagtgtctggagcaggtgcgaaagattcagggcgatggagccgcactccaagagaagctctgcgcgacatacaaactttgccatcccgaggagctcgtactgctcgggcacagcttggggattccctgggctcctctctcgtcctgtccgtcgcaggctttgcagttggcagggtgcctttcccagctccactccggtttgttcttgtatcagggactgctgcaagcccttgagggaatctcgccagaattgggcccgacgctggacacgttgcagctcgacgtggcggatttcgcaacaaccatctggcagcagatggaggaactggggatggcacccgcgctgcagcccacgcagggggcaatgccggcctttgcgtccgcgtttcagcgcagggcgggtggagtcctcgtagcgagccaccttcaatcatttttggaagtctcgtaccgggtgctgagacatcttgcgcagccgtgataataggctggagcctcggtggccatgcttcttgccccttgggcctccccccagcccctcctccccttcctgcacccgtacccccgtggtctttgaataaagtctgagtgggcggcaaaaaaaaaaaaaaaaaaaaaaaaaaaaaaaaaaaaaaaaaaaaaaaaaaaaaaaaaaaaaaaaaaaaaaaaaaaaaaaaggcgcgcc

SEQ ID NO: 248796 - DNA, 1487 bp, Artificial Sequence
  derived and/or modified sequence
gggaaataagagagaaaagaagagtaagaagaaatataagatcgtgaggatctatttccggtgaattcctcgagactagttctagagcggccgcggatcccgcccctctccctcccccccccctaacgttactggccgaagccgcttggaataaggccggtgtgcgtttgtctatatgttattttccaccatattgccgtcttttggcaatgtgagggcccggaaacctggccctgtcttcttgacgagcattcctaggggtctttcccctctcgccaaaggaatgcaaggtctgttgaatgtcgtgaaggaagcagttcctctggaagcttcttgaagacaaacaacgtctgtagcgaccctttgcaggcagcggaaccccccacctggcgacaggtgcctctgcggccaaaagccacgtgtataagatacacctgcaaaggcggcacaaccccagtgccacgttgtgagttggatagttgtggaaagagtcaaatggctcacctcaagcgtattcaacaaggggctgaaggatgcccagaaggtaccccattgtatgggatctgatctggggcctcggtgcacatgctttacatgtgtttagtcgaggttaaaaaacgtctaggccccccgaaccacggggacgtggttttcctttgaaaaacacgatgataatatggccggtcccgcgacccaaagccccatgaaacttatggccctgcagttgctgctttggcactcggccctctggacagtccaagaagcgactcctctcggacctgcctcatcgttgccgcagtcattccttttgaagtgtctggagcaggtgcgaaagattcagggcgatggagccgcactccaagagaagctctgcgcgacatacaaactttgccatcccgaggagctcgtactgctcgggcacagcttggggattccctgggctcctctctcgtcctgtccgtcgcaggctttgcagttggcagggtgcctttcccagctccactccggtttgttcttgtatcagggactgctgcaagcccttgagggaatctcgccagaattgggcccgacgctggacacgttgcagctcgacgtggcggatttcgcaacaaccatctggcagcagatggaggaactggggatggcacccgcgctgcagcccacgcagggggcaatgccggcctttgcgtccgcgtttcagcgcagggcgggtggagtcctcgtagcgagccaccttcaatcatttttggaagtctcgtaccgggtgctgagacatcttgcgcagccgtgataataggctggagcctcggtggccatgcttcttgccccttgggcctccccccagcccctcctccccttcctgcacccgtacccccgtggtctttgaataaagtctgagtgggcggcaaaaaaaaaaaaaaaaaaaaaaaaaaaaaaaaaaaaaaaaaaaaaaaaaaaaaaaaaaaaaaaaaaaaaaaaaaaaaaaa

SEQ ID NO: 248797 - DNA, 883 bp, Artificial Sequence
  derived and/or modified sequence
taatacgactcactatagggaaataagagagaaaagaagagtaagaagaaatataagagccaccatggccggtcccgcgacccaaagccccatgaaacttatggccctgcagttgctgctttggcactcggccctctggacagtccaagaagcgactcctctcggacctgcctcatcgttgccgcagtcattccttttgaagtgtctggagcaggtgcgaaagattcagggcgatggagccgcactccaagagaagctctgcgcgacatacaaactttgccatcccgaggagctcgtactgctcgggcacagcttggggattccctgggctcctctctcgtcctgtccgtcgcaggctttgcagttggcagggtgcctttcccagctccactccggtttgttcttgtatcagggactgctgcaagcccttgagggaatctcgccagaattgggcccgacgctggacacgttgcagctcgacgtggcggatttcgcaacaaccatctggcagcagatggaggaactggggatggcacccgcgctgcagcccacgcagggggcaatgccggcctttgcgtccgcgtttcagcgcagggcgggtggagtcctcgtagcgagccaccttcaatcatttttggaagtctcgtaccgggtgctgagacatcttgcgcagccgtgataataggctggagcctcggtggccatgcttcttgccccttgggcctccccccagcccctcctccccttcctgcacccgtacccccgtggtctttgaataaagtctgagtgggcggcaaaaaaaaaaaaaaaaaaaaaaaaaaaaaaaaaaaaaaaaaaaaaaaaaaaaaaaaaaaaaaaaaaaaaaaaaaaaaaaaggcgcgcc

SEQ ID NO: 248798 - DNA, 858 bp, Artificial Sequence
  derived and/or modified sequence
gggaaataagagagaaaagaagagtaagaagaaatataagagccaccatggccggtcccgcgacccaaagccccatgaaacttatggccctgcagttgctgctttggcactcggccctctggacagtccaagaagcgactcctctcggacctgcctcatcgttgccgcagtcattccttttgaagtgtctggagcaggtgcgaaagattcagggcgatggagccgcactccaagagaagctctgcgcgacatacaaactttgccatcccgaggagctcgtactgctcgggcacagcttggggattccctgggctcctctctcgtcctgtccgtcgcaggctttgcagttggcagggtgcctttcccagctccactccggtttgttcttgtatcagggactgctgcaagcccttgagggaatctcgccagaattgggcccgacgctggacacgttgcagctcgacgtggcggatttcgcaacaaccatctggcagcagatggaggaactggggatggcacccgcgctgcagcccacgcagggggcaatgccggcctttgcgtccgcgtttcagcgcagggcgggtggagtcctcgtagcgagccaccttcaatcatttttggaagtctcgtaccgggtgctgagacatcttgcgcagccgtgataataggctggagcctcggtggccatgcttcttgccccttgggcctccccccagcccctcctccccttcctgcacccgtacccccgtggtctttgaataaagtctgagtgggcggcaaaaaaaaaaaaaaaaaaaaaaaaaaaaaaaaaaaaaaaaaaaaaaaaaaaaaaaaaaaaaaaaaaaaaaaaaaaaaaaa

SEQ ID NO: 248799 - DNA, 877 bp, Artificial Sequence
  derived and/or modified sequence
taatacgactcactatagggaaataagagagaaaagaagagtaagaagaaatataagaatggccggtcccgcgacccaaagccccatgaaacttatggccctgcagttgctgctttggcactcggccctctggacagtccaagaagcgactcctctcggacctgcctcatcgttgccgcagtcattccttttgaagtgtctggagcaggtgcgaaagattcagggcgatggagccgcactccaagagaagctctgcgcgacatacaaactttgccatcccgaggagctcgtactgctcgggcacagcttggggattccctgggctcctctctcgtcctgtccgtcgcaggctttgcagttggcagggtgcctttcccagctccactccggtttgttcttgtatcagggactgctgcaagcccttgagggaatctcgccagaattgggcccgacgctggacacgttgcagctcgacgtggcggatttcgcaacaaccatctggcagcagatggaggaactggggatggcacccgcgctgcagcccacgcagggggcaatgccggcctttgcgtccgcgtttcagcgcagggcgggtggagtcctcgtagcgagccaccttcaatcatttttggaagtctcgtaccgggtgctgagacatcttgcgcagccgtgataataggctggagcctcggtggccatgcttcttgccccttgggcctccccccagcccctcctccccttcctgcacccgtacccccgtggtctttgaataaagtctgagtgggcggcaaaaaaaaaaaaaaaaaaaaaaaaaaaaaaaaaaaaaaaaaaaaaaaaaaaaaaaaaaaaaaaaaaaaaaaaaaaaaaaaggcgcgcc

SEQ ID NO: 248800 - DNA, 852 bp, Artificial Sequence
  derived and/or modified sequence
gggaaataagagagaaaagaagagtaagaagaaatataagaatggccggtcccgcgacccaaagccccatgaaacttatggccctgcagttgctgctttggcactcggccctctggacagtccaagaagcgactcctctcggacctgcctcatcgttgccgcagtcattccttttgaagtgtctggagcaggtgcgaaagattcagggcgatggagccgcactccaagagaagctctgcgcgacatacaaactttgccatcccgaggagctcgtactgctcgggcacagcttggggattccctgggctcctctctcgtcctgtccgtcgcaggctttgcagttggcagggtgcctttcccagctccactccggtttgttcttgtatcagggactgctgcaagcccttgagggaatctcgccagaattgggcccgacgctggacacgttgcagctcgacgtggcggatttcgcaacaaccatctggcagcagatggaggaactggggatggcacccgcgctgcagcccacgcagggggcaatgccggcctttgcgtccgcgtttcagcgcagggcgggtggagtcctcgtagcgagccaccttcaatcatttttggaagtctcgtaccgggtgctgagacatcttgcgcagccgtgataataggctggagcctcggtggccatgcttcttgccccttgggcctccccccagcccctcctccccttcctgcacccgtacccccgtggtctttgaataaagtctgagtgggcggcaaaaaaaaaaaaaaaaaaaaaaaaaaaaaaaaaaaaaaaaaaaaaaaaaaaaaaaaaaaaaaaaaaaaaaaaaaaaaaaa

SEQ ID NO: 248801 - DNA, 823 bp, Artificial Sequence
  derived and/or modified sequence
taatacgactcactatagggaaataagagagaaaagaagagtaagaagaaatataagagccaccatggccggtcccgcgacccaaagccccatgaaacttatggccctgcagttgctgctttggcactcggccctctggacagtccaagaagcgactcctctcggacctgcctcatcgttgccgcagtcattccttttgaagtgtctggagcaggtgcgaaagattcagggcgatggagccgcactccaagagaagctctgcgcgacatacaaactttgccatcccgaggagctcgtactgctcgggcacagcttggggattccctgggctcctctctcgtcctgtccgtcgcaggctttgcagttggcagggtgcctttcccagctccactccggtttgttcttgtatcagggactgctgcaagcccttgagggaatctcgccagaattgggcccgacgctggacacgttgcagctcgacgtggcggatttcgcaacaaccatctggcagcagatggaggaactggggatggcacccgcgctgcagcccacgcagggggcaatgccggcctttgcgtccgcgtttcagcgcagggcgggtggagtcctcgtagcgagccaccttcaatcatttttggaagtctcgtaccgggtgctgagacatcttgcgcagccgtgataataggctggagcctcggtggccatgcttcttgccccttgggcctccccccagcccctcctccccttcctgcacccgtaccccccaaacaccattgtcacactccagtggtctttgaataaagtctgagtgggcggctctaga

SEQ ID NO: 248802 - DNA, 800 bp, Artificial Sequence
  derived and/or modified sequence
gggaaataagagagaaaagaagagtaagaagaaatataagagccaccatggccggtcccgcgacccaaagccccatgaaacttatggccctgcagttgctgctttggcactcggccctctggacagtccaagaagcgactcctctcggacctgcctcatcgttgccgcagtcattccttttgaagtgtctggagcaggtgcgaaagattcagggcgatggagccgcactccaagagaagctctgcgcgacatacaaactttgccatcccgaggagctcgtactgctcgggcacagcttggggattccctgggctcctctctcgtcctgtccgtcgcaggctttgcagttggcagggtgcctttcccagctccactccggtttgttcttgtatcagggactgctgcaagcccttgagggaatctcgccagaattgggcccgacgctggacacgttgcagctcgacgtggcggatttcgcaacaaccatctggcagcagatggaggaactggggatggcacccgcgctgcagcccacgcagggggcaatgccggcctttgcgtccgcgtttcagcgcagggcgggtggagtcctcgtagcgagccaccttcaatcatttttggaagtctcgtaccgggtgctgagacatcttgcgcagccgtgataataggctggagcctcggtggccatgcttcttgccccttgggcctccccccagcccctcctccccttcctgcacccgtaccccccaaacaccattgtcacactccagtggtctttgaataaagtctgagtgggcggc

SEQ ID NO: 248803 - DNA, 808 bp, Artificial Sequence
  derived and/or modified sequence
taatacgactcactatagggaaataagagagaaaagaagagtaagaagaaatataagagccaccatggccggtcccgcgacccaaagccccatgaaacttatggccctgcagttgctgctttggcactcggccctctggacagtccaagaagcgactcctctcggacctgcctcatcgttgccgcagtcattccttttgaagtgtctggagcaggtgcgaaagattcagggcgatggagccgcactccaagagaagctctgcgcgacatacaaactttgccatcccgaggagctcgtactgctcgggcacagcttggggattccctgggctcctctctcgtcctgtccgtcgcaggctttgcagttggcagggtgcctttcccagctccactccggtttgttcttgtatcagggactgctgcaagcccttgagggaatctcgccagaattgggcccgacgctggacacgttgcagctcgacgtggcggatttcgcaacaaccatctggcagcagatggaggaactggggatggcacccgcgctgcagcccacgcagggggcaatgccggcctttgcgtccgcgtttcagcgcagggcgggtggagtcctcgtagcgagccaccttcaatcatttttggaagtctcgtaccgggtgctgagacatcttgcgcagccgtgataataggctggagcctcggtggccatgcttcttgccccttgggcctccccccagcccctcctccccttcctgcacccgtacccccacactccgtggtctttgaataaagtctgagtgggcggctctaga

SEQ ID NO: 248804 - DNA, 785 bp, Artificial Sequence
  derived and/or modified sequence
gggaaataagagagaaaagaagagtaagaagaaatataagagccaccatggccggtcccgcgacccaaagccccatgaaacttatggccctgcagttgctgctttggcactcggccctctggacagtccaagaagcgactcctctcggacctgcctcatcgttgccgcagtcattccttttgaagtgtctggagcaggtgcgaaagattcagggcgatggagccgcactccaagagaagctctgcgcgacatacaaactttgccatcccgaggagctcgtactgctcgggcacagcttggggattccctgggctcctctctcgtcctgtccgtcgcaggctttgcagttggcagggtgcctttcccagctccactccggtttgttcttgtatcagggactgctgcaagcccttgagggaatctcgccagaattgggcccgacgctggacacgttgcagctcgacgtggcggatttcgcaacaaccatctggcagcagatggaggaactggggatggcacccgcgctgcagcccacgcagggggcaatgccggcctttgcgtccgcgtttcagcgcagggcgggtggagtcctcgtagcgagccaccttcaatcatttttggaagtctcgtaccgggtgctgagacatcttgcgcagccgtgataataggctggagcctcggtggccatgcttcttgccccttgggcctccccccagcccctcctccccttcctgcacccgtacccccacactccgtggtctttgaataaagtctgagtgggcggc

SEQ ID NO: 248805 - DNA, 816 bp, Artificial Sequence
  derived and/or modified sequence
taatacgactcactatagggaaataagagagaaaagaagagtaagaagaaatataagagccaccatggccggtcccgcgacccaaagccccatgaaacttatggccctgcagttgctgctttggcactcggccctctggacagtccaagaagcgactcctctcggacctgcctcatcgttgccgcagtcattccttttgaagtgtctggagcaggtgcgaaagattcagggcgatggagccgcactccaagagaagctctgcgcgacatacaaactttgccatcccgaggagctcgtactgctcgggcacagcttggggattccctgggctcctctctcgtcctgtccgtcgcaggctttgcagttggcagggtgcctttcccagctccactccggtttgttcttgtatcagggactgctgcaagcccttgagggaatctcgccagaattgggcccgacgctggacacgttgcagctcgacgtggcggatttcgcaacaaccatctggcagcagatggaggaactggggatggcacccgcgctgcagcccacgcagggggcaatgccggcctttgcgtccgcgtttcagcgcagggcgggtggagtcctcgtagcgagccaccttcaatcatttttggaagtctcgtaccgggtgctgagacatcttgcgcagccgtgataataggctggagcctcggtggccatgcttcttgccccttgggcctccccccagcccctcctccccttcctgcacccgtaccccccaaacaccattgtcagtggtctttgaataaagtctgagtgggcggctctaga

SEQ ID NO: 248806 - DNA, 793 bp, Artificial Sequence
  derived and/or modified sequence
gggaaataagagagaaaagaagagtaagaagaaatataagagccaccatggccggtcccgcgacccaaagccccatgaaacttatggccctgcagttgctgctttggcactcggccctctggacagtccaagaagcgactcctctcggacctgcctcatcgttgccgcagtcattccttttgaagtgtctggagcaggtgcgaaagattcagggcgatggagccgcactccaagagaagctctgcgcgacatacaaactttgccatcccgaggagctcgtactgctcgggcacagcttggggattccctgggctcctctctcgtcctgtccgtcgcaggctttgcagttggcagggtgcctttcccagctccactccggtttgttcttgtatcagggactgctgcaagcccttgagggaatctcgccagaattgggcccgacgctggacacgttgcagctcgacgtggcggatttcgcaacaaccatctggcagcagatggaggaactggggatggcacccgcgctgcagcccacgcagggggcaatgccggcctttgcgtccgcgtttcagcgcagggcgggtggagtcctcgtagcgagccaccttcaatcatttttggaagtctcgtaccgggtgctgagacatcttgcgcagccgtgataataggctggagcctcggtggccatgcttcttgccccttgggcctccccccagcccctcctccccttcctgcacccgtaccccccaaacaccattgtcagtggtctttgaataaagtctgagtgggcggc

SEQ ID NO: 248807 - DNA, 825 bp, Artificial Sequence
  derived and/or modified sequence
taatacgactcactatagggaaataagagagaaaagaagagtaagaagaaatataagagccaccatggccggtcccgcgacccaaagccccatgaaacttatggccctgcagttgctgctttggcactcggccctctggacagtccaagaagcgactcctctcggacctgcctcatcgttgccgcagtcattccttttgaagtgtctggagcaggtgcgaaagattcagggcgatggagccgcactccaagagaagctctgcgcgacatacaaactttgccatcccgaggagctcgtactgctcgggcacagcttggggattccctgggctcctctctcgtcctgtccgtcgcaggctttgcagttggcagggtgcctttcccagctccactccggtttgttcttgtatcagggactgctgcaagcccttgagggaatctcgccagaattgggcccgacgctggacacgttgcagctcgacgtggcggatttcgcaacaaccatctggcagcagatggaggaactggggatggcacccgcgctgcagcccacgcagggggcaatgccggcctttgcgtccgcgtttcagcgcagggcgggtggagtcctcgtagcgagccaccttcaatcatttttggaagtctcgtaccgggtgctgagacatcttgcgcagccgtgataataggctgccttctgcggggcttgccttctggccatgcccttcttctctcccttgcacctgtacctctcaaacaccattgtcacactccatggtctttgaataaagcctgagtaggaaggcggccgctcgagcatgcatctaga

SEQ ID NO: 248808 - DNA, 783 bp, Artificial Sequence
  derived and/or modified sequence
gggaaataagagagaaaagaagagtaagaagaaatataagagccaccatggccggtcccgcgacccaaagccccatgaaacttatggccctgcagttgctgctttggcactcggccctctggacagtccaagaagcgactcctctcggacctgcctcatcgttgccgcagtcattccttttgaagtgtctggagcaggtgcgaaagattcagggcgatggagccgcactccaagagaagctctgcgcgacatacaaactttgccatcccgaggagctcgtactgctcgggcacagcttggggattccctgggctcctctctcgtcctgtccgtcgcaggctttgcagttggcagggtgcctttcccagctccactccggtttgttcttgtatcagggactgctgcaagcccttgagggaatctcgccagaattgggcccgacgctggacacgttgcagctcgacgtggcggatttcgcaacaaccatctggcagcagatggaggaactggggatggcacccgcgctgcagcccacgcagggggcaatgccggcctttgcgtccgcgtttcagcgcagggcgggtggagtcctcgtagcgagccaccttcaatcatttttggaagtctcgtaccgggtgctgagacatcttgcgcagccgtgataataggctgccttctgcggggcttgccttctggccatgcccttcttctctcccttgcacctgtacctctcaaacaccattgtcacactccatggtctttgaataaagcctgagtaggaag

SEQ ID NO: 248809 - DNA, 810 bp, Artificial Sequence
  derived and/or modified sequence
taatacgactcactatagggaaataagagagaaaagaagagtaagaagaaatataagagccaccatggccggtcccgcgacccaaagccccatgaaacttatggccctgcagttgctgctttggcactcggccctctggacagtccaagaagcgactcctctcggacctgcctcatcgttgccgcagtcattccttttgaagtgtctggagcaggtgcgaaagattcagggcgatggagccgcactccaagagaagctctgcgcgacatacaaactttgccatcccgaggagctcgtactgctcgggcacagcttggggattccctgggctcctctctcgtcctgtccgtcgcaggctttgcagttggcagggtgcctttcccagctccactccggtttgttcttgtatcagggactgctgcaagcccttgagggaatctcgccagaattgggcccgacgctggacacgttgcagctcgacgtggcggatttcgcaacaaccatctggcagcagatggaggaactggggatggcacccgcgctgcagcccacgcagggggcaatgccggcctttgcgtccgcgtttcagcgcagggcgggtggagtcctcgtagcgagccaccttcaatcatttttggaagtctcgtaccgggtgctgagacatcttgcgcagccgtgataataggctgccttctgcggggcttgccttctggccatgcccttcttctctcccttgcacctgtacctctacactcctggtctttgaataaagcctgagtaggaaggcggccgctcgagcatgcatctaga

SEQ ID NO: 248810 - DNA, 768 bp, Artificial Sequence
  derived and/or modified sequence
gggaaataagagagaaaagaagagtaagaagaaatataagagccaccatggccggtcccgcgacccaaagccccatgaaacttatggccctgcagttgctgctttggcactcggccctctggacagtccaagaagcgactcctctcggacctgcctcatcgttgccgcagtcattccttttgaagtgtctggagcaggtgcgaaagattcagggcgatggagccgcactccaagagaagctctgcgcgacatacaaactttgccatcccgaggagctcgtactgctcgggcacagcttggggattccctgggctcctctctcgtcctgtccgtcgcaggctttgcagttggcagggtgcctttcccagctccactccggtttgttcttgtatcagggactgctgcaagcccttgagggaatctcgccagaattgggcccgacgctggacacgttgcagctcgacgtggcggatttcgcaacaaccatctggcagcagatggaggaactggggatggcacccgcgctgcagcccacgcagggggcaatgccggcctttgcgtccgcgtttcagcgcagggcgggtggagtcctcgtagcgagccaccttcaatcatttttggaagtctcgtaccgggtgctgagacatcttgcgcagccgtgataataggctgccttctgcggggcttgccttctggccatgcccttcttctctcccttgcacctgtacctctacactcctggtctttgaataaagcctgagtaggaag

SEQ ID NO: 248811 - DNA, 818 bp, Artificial Sequence
  derived and/or modified sequence
taatacgactcactatagggaaataagagagaaaagaagagtaagaagaaatataagagccaccatggccggtcccgcgacccaaagccccatgaaacttatggccctgcagttgctgctttggcactcggccctctggacagtccaagaagcgactcctctcggacctgcctcatcgttgccgcagtcattccttttgaagtgtctggagcaggtgcgaaagattcagggcgatggagccgcactccaagagaagctctgcgcgacatacaaactttgccatcccgaggagctcgtactgctcgggcacagcttggggattccctgggctcctctctcgtcctgtccgtcgcaggctttgcagttggcagggtgcctttcccagctccactccggtttgttcttgtatcagggactgctgcaagcccttgagggaatctcgccagaattgggcccgacgctggacacgttgcagctcgacgtggcggatttcgcaacaaccatctggcagcagatggaggaactggggatggcacccgcgctgcagcccacgcagggggcaatgccggcctttgcgtccgcgtttcagcgcagggcgggtggagtcctcgtagcgagccaccttcaatcatttttggaagtctcgtaccgggtgctgagacatcttgcgcagccgtgataataggctgccttctgcggggcttgccttctggccatgcccttcttctctcccttgcacctgtacctctcaaacaccattgtcatggtctttgaataaagcctgagtaggaaggcggccgctcgagcatgcatctaga

SEQ ID NO: 248812 - DNA, 776 bp, Artificial Sequence
  derived and/or modified sequence
gggaaataagagagaaaagaagagtaagaagaaatataagagccaccatggccggtcccgcgacccaaagccccatgaaacttatggccctgcagttgctgctttggcactcggccctctggacagtccaagaagcgactcctctcggacctgcctcatcgttgccgcagtcattccttttgaagtgtctggagcaggtgcgaaagattcagggcgatggagccgcactccaagagaagctctgcgcgacatacaaactttgccatcccgaggagctcgtactgctcgggcacagcttggggattccctgggctcctctctcgtcctgtccgtcgcaggctttgcagttggcagggtgcctttcccagctccactccggtttgttcttgtatcagggactgctgcaagcccttgagggaatctcgccagaattgggcccgacgctggacacgttgcagctcgacgtggcggatttcgcaacaaccatctggcagcagatggaggaactggggatggcacccgcgctgcagcccacgcagggggcaatgccggcctttgcgtccgcgtttcagcgcagggcgggtggagtcctcgtagcgagccaccttcaatcatttttggaagtctcgtaccgggtgctgagacatcttgcgcagccgtgataataggctgccttctgcggggcttgccttctggccatgcccttcttctctcccttgcacctgtacctctcaaacaccattgtcatggtctttgaataaagcctgagtaggaag

SEQ ID NO: 248813 - DNA, 778 bp, Artificial Sequence
  derived and/or modified sequence
gggaaataagagagaaaagaagagtaagaagaaatataagagccaccatggccggtcccgcgacccaaagccccatgaaacttatggccctgcagttgctgctttggcactcggccctctggacagtccaagaagcgactcctctcggacctgcctcatcgttgccgcagtcattccttttgaagtgtctggagcaggtgcgaaagattcagggcgatggagccgcactccaagagaagctctgcgcgacatacaaactttgccatcccgaggagctcgtactgctcgggcacagcttggggattccctgggctcctctctcgtcctgtccgtcgcaggctttgcagttggcagggtgcctttcccagctccactccggtttgttcttgtatcagggactgctgcaagcccttgagggaatctcgccagaattgggcccgacgctggacacgttgcagctcgacgtggcggatttcgcaacaaccatctggcagcagatggaggaactggggatggcacccgcgctgcagcccacgcagggggcaatgccggcctttgcgtccgcgtttcagcgcagggcgggtggagtcctcgtagcgagccaccttcaatcatttttggaagtctcgtaccgggtgctgagacatcttgcgcagccgtgataataggctggagcctcggtggccatgcttcttgccccttgggcctccccccagcccctcctccccttcctgcacccgtacccccgtggtctttgaataaagtctgagtgggcggc

SEQ ID NO: 248814 - DNA, 761 bp, Artificial Sequence
  derived and/or modified sequence
gggaaataagagagaaaagaagagtaagaagaaatataagagccaccatggccggtcccgcgacccaaagccccatgaaacttatggccctgcagttgctgctttggcactcggccctctggacagtccaagaagcgactcctctcggacctgcctcatcgttgccgcagtcattccttttgaagtgtctggagcaggtgcgaaagattcagggcgatggagccgcactccaagagaagctctgcgcgacatacaaactttgccatcccgaggagctcgtactgctcgggcacagcttggggattccctgggctcctctctcgtcctgtccgtcgcaggctttgcagttggcagggtgcctttcccagctccactccggtttgttcttgtatcagggactgctgcaagcccttgagggaatctcgccagaattgggcccgacgctggacacgttgcagctcgacgtggcggatttcgcaacaaccatctggcagcagatggaggaactggggatggcacccgcgctgcagcccacgcagggggcaatgccggcctttgcgtccgcgtttcagcgcagggcgggtggagtcctcgtagcgagccaccttcaatcatttttggaagtctcgtaccgggtgctgagacatcttgcgcagccgtgataataggctgccttctgcggggcttgccttctggccatgcccttcttctctcccttgcacctgtacctcttggtctttgaataaagcctgagtaggaag

SEQ ID NO: 248815 - DNA, 832 bp, Artificial Sequence
  derived and/or modified sequence
taatacgactcactatagggaaataagagagaaaagaagagtaagaagaaatataagagccaccatggccggtcccgcgacccaaagccccatgaaacttatggccctgcagttgctgctttggcactcggccctctggacagtccaagaagcgactcctctcggacctgcctcatcgttgccgcagtcattccttttgaagtgtctggagcaggtgcgaaagattcagggcgatggagccgcactccaagagaagctctgcgcgacatacaaactttgccatcccgaggagctcgtactgctcgggcacagcttggggattccctgggctcctctctcgtcctgtccgtcgcaggctttgcagttggcagggtgcctttcccagctccactccggtttgttcttgtatcagggactgctgcaagcccttgagggaatctcgccagaattgggcccgacgctggacacgttgcagctcgacgtggcggatttcgcaacaaccatctggcagcagatggaggaactggggatggcacccgcgctgcagcccacgcagggggcaatgccggcctttgcgtccgcgtttcagcgcagggcgggtggagtcctcgtagcgagccaccttcaatcatttttggaagtctcgtaccgggtgctgagacatcttgcgcagccgtgataataggattcgtcagtagggttgtaaaggtttttcttttcctgagaaaacaaccttttgttttctcaggttttgctttttggcctttccctagctttaaaaaaaaaaaagcaaaagtggtctttgaataaagtctgagtgggcggctctaga

SEQ ID NO: 248816 - DNA, 809 bp, Artificial Sequence
  derived and/or modified sequence
gggaaataagagagaaaagaagagtaagaagaaatataagagccaccatggccggtcccgcgacccaaagccccatgaaacttatggccctgcagttgctgctttggcactcggccctctggacagtccaagaagcgactcctctcggacctgcctcatcgttgccgcagtcattccttttgaagtgtctggagcaggtgcgaaagattcagggcgatggagccgcactccaagagaagctctgcgcgacatacaaactttgccatcccgaggagctcgtactgctcgggcacagcttggggattccctgggctcctctctcgtcctgtccgtcgcaggctttgcagttggcagggtgcctttcccagctccactccggtttgttcttgtatcagggactgctgcaagcccttgagggaatctcgccagaattgggcccgacgctggacacgttgcagctcgacgtggcggatttcgcaacaaccatctggcagcagatggaggaactggggatggcacccgcgctgcagcccacgcagggggcaatgccggcctttgcgtccgcgtttcagcgcagggcgggtggagtcctcgtagcgagccaccttcaatcatttttggaagtctcgtaccgggtgctgagacatcttgcgcagccgtgataataggattcgtcagtagggttgtaaaggtttttcttttcctgagaaaacaaccttttgttttctcaggttttgctttttggcctttccctagctttaaaaaaaaaaaagcaaaagtggtctttgaataaagtctgagtgggcggc

SEQ ID NO: 248817 - DNA, 834 bp, Artificial Sequence
  derived and/or modified sequence
taatacgactcactatagggaaataagagagaaaagaagagtaagaagaaatataagagccaccatggccggtcccgcgacccaaagccccatgaaacttatggccctgcagttgctgctttggcactcggccctctggacagtccaagaagcgactcctctcggacctgcctcatcgttgccgcagtcattccttttgaagtgtctggagcaggtgcgaaagattcagggcgatggagccgcactccaagagaagctctgcgcgacatacaaactttgccatcccgaggagctcgtactgctcgggcacagcttggggattccctgggctcctctctcgtcctgtccgtcgcaggctttgcagttggcagggtgcctttcccagctccactccggtttgttcttgtatcagggactgctgcaagcccttgagggaatctcgccagaattgggcccgacgctggacacgttgcagctcgacgtggcggatttcgcaacaaccatctggcagcagatggaggaactggggatggcacccgcgctgcagcccacgcagggggcaatgccggcctttgcgtccgcgtttcagcgcagggcgggtggagtcctcgtagcgagccaccttcaatcatttttggaagtctcgtaccgggtgctgagacatcttgcgcagccgtgataatagtgctcttcagtagggtcatgaaggtttttcttttcctgagaaaacaacacgtattgttttctcaggttttgctttttggcctttttctagcttaaaaaaaaaaaaagcaaaagtggtctttgaataaagtctgagtgggcggctctaga

SEQ ID NO: 248818 - DNA, 811 bp, Artificial Sequence
  derived and/or modified sequence
gggaaataagagagaaaagaagagtaagaagaaatataagagccaccatggccggtcccgcgacccaaagccccatgaaacttatggccctgcagttgctgctttggcactcggccctctggacagtccaagaagcgactcctctcggacctgcctcatcgttgccgcagtcattccttttgaagtgtctggagcaggtgcgaaagattcagggcgatggagccgcactccaagagaagctctgcgcgacatacaaactttgccatcccgaggagctcgtactgctcgggcacagcttggggattccctgggctcctctctcgtcctgtccgtcgcaggctttgcagttggcagggtgcctttcccagctccactccggtttgttcttgtatcagggactgctgcaagcccttgagggaatctcgccagaattgggcccgacgctggacacgttgcagctcgacgtggcggatttcgcaacaaccatctggcagcagatggaggaactggggatggcacccgcgctgcagcccacgcagggggcaatgccggcctttgcgtccgcgtttcagcgcagggcgggtggagtcctcgtagcgagccaccttcaatcatttttggaagtctcgtaccgggtgctgagacatcttgcgcagccgtgataatagtgctcttcagtagggtcatgaaggtttttcttttcctgagaaaacaacacgtattgttttctcaggttttgctttttggcctttttctagcttaaaaaaaaaaaaagcaaaagtggtctttgaataaagtctgagtgggcggc

SEQ ID NO: 248819 - DNA, 780 bp, Artificial Sequence
  derived and/or modified sequence
gggaaataagagagaaaagaagagtaagaagaaatataagagccaccatggccggtcccgcgacccaaagccccatgaaacttatggccctgcagttgctgctttggcactcggccctctggacagtccaagaagcgactcctctcggacctgcctcatcgttgccgcagtcattccttttgaagtgtctggagcaggtgcgaaagattcagggcgatggagccgcactccaagagaagctctgcgcgacatacaaactttgccatcccgaggagctcgtactgctcgggcacagcttggggattccctgggctcctctctcgtcctgtccgtcgcaggctttgcagttggcagggtgcctttcccagctccactccggtttgttcttgtatcagggactgctgcaagcccttgagggaatctcgccagaattgggcccgacgctggacacgttgcagctcgacgtggcggatttcgcaacaaccatctggcagcagatggaggaactggggatggcacccgcgctgcagcccacgcagggggcaatgccggcctttgcgtccgcgtttcagcgcagggcgggtggagtcctcgtagcgagccaccttcaatcatttttggaagtctcgtaccgggtgctgagacatcttgcgcagccgtgataagctgccttctgcggggcttgccttctggccatgcccttcttctctcccttgcacctgtacctcttccataaagtaggaacactacatggtctttgaataaagcctgagtaggaag

SEQ ID NO: 248820 - DNA, 765 bp, Artificial Sequence
  derived and/or modified sequence
gggaaataagagagaaaagaagagtaagaagaaatataagagccaccatggccggtcccgcgacccaaagccccatgaaacttatggccctgcagttgctgctttggcactcggccctctggacagtccaagaagcgactcctctcggacctgcctcatcgttgccgcagtcattccttttgaagtgtctggagcaggtgcgaaagattcagggcgatggagccgcactccaagagaagctctgcgcgacatacaaactttgccatcccgaggagctcgtactgctcgggcacagcttggggattccctgggctcctctctcgtcctgtccgtcgcaggctttgcagttggcagggtgcctttcccagctccactccggtttgttcttgtatcagggactgctgcaagcccttgagggaatctcgccagaattgggcccgacgctggacacgttgcagctcgacgtggcggatttcgcaacaaccatctggcagcagatggaggaactggggatggcacccgcgctgcagcccacgcagggggcaatgccggcctttgcgtccgcgtttcagcgcagggcgggtggagtcctcgtagcgagccaccttcaatcatttttggaagtctcgtaccgggtgctgagacatcttgcgcagccgtgataagctgccttctgcggggcttgccttctggccatgcccttcttctctcccttgcacctgtacctctacactactggtctttgaataaagcctgagtaggaag

SEQ ID NO: 248821 - DNA, 773 bp, Artificial Sequence
  derived and/or modified sequence
gggaaataagagagaaaagaagagtaagaagaaatataagagccaccatggccggtcccgcgacccaaagccccatgaaacttatggccctgcagttgctgctttggcactcggccctctggacagtccaagaagcgactcctctcggacctgcctcatcgttgccgcagtcattccttttgaagtgtctggagcaggtgcgaaagattcagggcgatggagccgcactccaagagaagctctgcgcgacatacaaactttgccatcccgaggagctcgtactgctcgggcacagcttggggattccctgggctcctctctcgtcctgtccgtcgcaggctttgcagttggcagggtgcctttcccagctccactccggtttgttcttgtatcagggactgctgcaagcccttgagggaatctcgccagaattgggcccgacgctggacacgttgcagctcgacgtggcggatttcgcaacaaccatctggcagcagatggaggaactggggatggcacccgcgctgcagcccacgcagggggcaatgccggcctttgcgtccgcgtttcagcgcagggcgggtggagtcctcgtagcgagccaccttcaatcatttttggaagtctcgtaccgggtgctgagacatcttgcgcagccgtgataagctgccttctgcggggcttgccttctggccatgcccttcttctctcccttgcacctgtacctcttccataaagtaggaatggtctttgaataaagcctgagtaggaag

SEQ ID NO: 248822 - DNA, 778 bp, Artificial Sequence
  derived and/or modified sequence
gggaaataagagagaaaagaagagtaagaagaaatataagagcctccatggccggtcccgcgacccaaagccccatgaaacttatggccctgcagttgctgctttggcactcggccctctggacagtccaagaagcgactcctctcggacctgcctcatcgttgccgcagtcattccttttgaagtgtctggagcaggtgcgaaagattcagggcgatggagccgcactccaagagaagctctgcgcgacatacaaactttgccatcccgaggagctcgtactgctcgggcacagcttggggattccctgggctcctctctcgtcctgtccgtcgcaggctttgcagttggcagggtgcctttcccagctccactccggtttgttcttgtatcagggactgctgcaagcccttgagggaatctcgccagaattgggcccgacgctggacacgttgcagctcgacgtggcggatttcgcaacaaccatctggcagcagatggaggaactggggatggcacccgcgctgcagcccacgcagggggcaatgccggcctttgcgtccgcgtttcagcgcagggcgggtggagtcctcgtagcgagccaccttcaatcatttttggaagtctcgtaccgggtgctgagacatcttgcgcagccgtgataataggctggagcctcggtggccatgcttcttgccccttgggcctccccccagcccctcctccccttcctgcacccgtacccccgtggtctttgaataaagtctgagtgggcggc

SEQ ID NO: 248823 - DNA, 778 bp, Artificial Sequence
  derived and/or modified sequence
gggaaataagagagaaaagaagagtaagaagaaatatatgagccaccatggccggtcccgcgacccaaagccccatgaaacttatggccctgcagttgctgctttggcactcggccctctggacagtccaagaagcgactcctctcggacctgcctcatcgttgccgcagtcattccttttgaagtgtctggagcaggtgcgaaagattcagggcgatggagccgcactccaagagaagctctgcgcgacatacaaactttgccatcccgaggagctcgtactgctcgggcacagcttggggattccctgggctcctctctcgtcctgtccgtcgcaggctttgcagttggcagggtgcctttcccagctccactccggtttgttcttgtatcagggactgctgcaagcccttgagggaatctcgccagaattgggcccgacgctggacacgttgcagctcgacgtggcggatttcgcaacaaccatctggcagcagatggaggaactggggatggcacccgcgctgcagcccacgcagggggcaatgccggcctttgcgtccgcgtttcagcgcagggcgggtggagtcctcgtagcgagccaccttcaatcatttttggaagtctcgtaccgggtgctgagacatcttgcgcagccgtgataataggctggagcctcggtggccatgcttcttgccccttgggcctccccccagcccctcctccccttcctgcacccgtacccccgtggtctttgaataaagtctgagtgggcggc

SEQ ID NO: 248824 - DNA, 769 bp, Artificial Sequence
  derived and/or modified sequence
gggaaataagagagaaaagaagagtaagaagaaatataatggccggtcccgcgacccaaagccccatgaaacttatggccctgcagttgctgctttggcactcggccctctggacagtccaagaagcgactcctctcggacctgcctcatcgttgccgcagtcattccttttgaagtgtctggagcaggtgcgaaagattcagggcgatggagccgcactccaagagaagctctgcgcgacatacaaactttgccatcccgaggagctcgtactgctcgggcacagcttggggattccctgggctcctctctcgtcctgtccgtcgcaggctttgcagttggcagggtgcctttcccagctccactccggtttgttcttgtatcagggactgctgcaagcccttgagggaatctcgccagaattgggcccgacgctggacacgttgcagctcgacgtggcggatttcgcaacaaccatctggcagcagatggaggaactggggatggcacccgcgctgcagcccacgcagggggcaatgccggcctttgcgtccgcgtttcagcgcagggcgggtggagtcctcgtagcgagccaccttcaatcatttttggaagtctcgtaccgggtgctgagacatcttgcgcagccgtgataataggctggagcctcggtggccatgcttcttgccccttgggcctccccccagcccctcctccccttcctgcacccgtacccccgtggtctttgaataaagtctgagtgggcggc

SEQ ID NO: 248825 - DNA, 893 bp, Artificial Sequence
  derived and/or modified sequence
gggaaattctgacatccggcggaattctgacatccggcggaattctgacatccggcggaattctgacatccggcggaattctgacatccggcggaagactcacaaccccagaaacagacattaagagagaaaagaagagtaagaagaaatataagagccaccatggccggtcccgcgacccaaagccccatgaaacttatggccctgcagttgctgctttggcactcggccctctggacagtccaagaagcgactcctctcggacctgcctcatcgttgccgcagtcattccttttgaagtgtctggagcaggtgcgaaagattcagggcgatggagccgcactccaagagaagctctgcgcgacatacaaactttgccatcccgaggagctcgtactgctcgggcacagcttggggattccctgggctcctctctcgtcctgtccgtcgcaggctttgcagttggcagggtgcctttcccagctccactccggtttgttcttgtatcagggactgctgcaagcccttgagggaatctcgccagaattgggcccgacgctggacacgttgcagctcgacgtggcggatttcgcaacaaccatctggcagcagatggaggaactggggatggcacccgcgctgcagcccacgcagggggcaatgccggcctttgcgtccgcgtttcagcgcagggcgggtggagtcctcgtagcgagccaccttcaatcatttttggaagtctcgtaccgggtgctgagacatcttgcgcagccgtgataataggctggagcctcggtggccatgcttcttgccccttgggcctccccccagcccctcctccccttcctgcacccgtacccccgtggtctttgaataaagtctgagtgggcggc

SEQ ID NO: 248826 - DNA, 612 bp, Artificial Sequence
  derived and/or modified sequence
atggcagggcccgcaacccaatcaccgatgaaactgatggccctccagcttctcctgtggcattcagccctgtggacagtacaggaggcaacacctctggggcccgcaagtagtctgccccagagttttctgttgaagtgtttggagcaagtgagaaaaattcaaggcgacggtgccgcccttcaggagaagctctgcgctacatacaaactgtgtcacccagaggaactcgtgctgctgggacactcgctgggaattccctgggccccactctcttcctgccctagtcaggcactgcagctggctggttgtctgtcacagttacactccggacttttcctctaccaggggcttctgcaggcactagagggcatatctcctgagcttggacccaccttagatacgttgcagcttgatgtggccgacttcgccacgactatctggcagcagatggaggagctgggtatggcgccagcattgcagccaacacagggcgccatgcctgcctttgcatctgcctttcagcggcgcgctggcggcgtgctagtagccagccacctccagagtttcctggaagttagctatcgggtgctgcgccatctggcccagcct

SEQ ID NO: 248827 - DNA, 612 bp, Artificial Sequence
  derived and/or modified sequence
atggctggaccggccacccaatcccccatgaagctgatggctctccagctgcttctttggcactcggcgctgtggaccgtccaggaggccactccgctgggaccggcctcctccttgccacagtccttcctcctgaaatgcctggaacaagtccgcaagatccagggagacggagccgccctccaagagaaactctgtgcaacctacaagttgtgccacccagaggaactggttctgctcggacactcgcttggcatcccatgggcgccattgagtagctgcccttcgcaggccctccagctcgcgggctgcttgagccagctgcattcggggctgttcctctaccaggggctgctgcaggctttggagggaatcagcccggaactgggaccgaccctggatactctccagctcgacgtcgctgatttcgctactactatttggcaacaaatggaggagctcggcatggcccccgccctgcaaccgactcaaggcgcgatgcccgcttttgcgagcgctttccagaggagggccggaggggtgctggtcgccagccacctgcagtcgttccttgaagtgtcataccgcgtgctgcgccacttggcacagccg

SEQ ID NO: 248828 - DNA, 612 bp, Artificial Sequence
  derived and/or modified sequence
atggccggcccggctacccaaagtcctatgaagctgatggcattacagttgcttctgtggcactcagcgctctggacggttcaagaagctaccccccttggtcccgcttctagtctaccccaatcctttcttttgaagtgcttggagcaagttagaaaaatccagggtgatggcgctgcattacaggagaagttgtgtgcaacttataaattgtgccatccagaggagctggtgctcttgggtcattcccttgggatcccatgggccccgctttcaagttgtccaagccaggctttgcaactcgctggctgcctttcacaattgcattcgggtttgtttttgtatcagggattgttgcaggctctggaaggtattagcccagagcttgggcctaccctcgacactctccaactagatgtagccgactttgcgacgaccatttggcaacaaatggaagagttgggtatggcccctgccttgcagcctacacaaggagctatgcctgcatttgcttcagcttttcagagacgtgccggtggtgtcttagtggcaagccacttgcaatctttcttggaagtgtcatatagggtgctcagacatttggcccaaccg

SEQ ID NO: 248829 - DNA, 612 bp, Artificial Sequence
  derived and/or modified sequence
atggcaggacctgcaacccagtcaccgatgaagctgatggccctccaactgcttctttggcactcagcgctttggactgtgcaggaagctacccctctcgggcctgcaagctcactgccacaatcgttcctgctcaagtgcctggaacaggtgaggaagatacaaggggatggggcagctcttcaggagaagctgtgcgcgacttacaaactttgtcatcctgaagaacttgtgctcttgggacacagcttgggaattccatgggccccactctcgagctgtcccagccaggctctgcaactggctggctgcctgtcccagttgcattcgggacttttcctttatcaaggacttctgcaagcactggagggaatttcccctgaactgggtcctactcttgatactcttcaacttgacgtggcagattttgccaccactatatggcagcagatggaagagctcggtatggcacctgcactccaaccaacccagggggcaatgcccgcatttgcctcagcatttcaaaggcgggccgggggcgtccttgtcgcctcacatttgcaaagttttttggaggtgtcctaccgagtgcttcgccacctcgctcaacct

SEQ ID NO: 248830 - DNA, 612 bp, Artificial Sequence
  derived and/or modified sequence
atggctggaccagccactcagagtcctatgaagcttatggccctgcagctgctgttgtggcactctgctttgtggaccgtgcaggaggcaacccctctgggaccagcctcaagcctgccacagagtttcctgctgaaatgcctggagcaggttagaaaaatacagggagacggcgctgcgctgcaagagaagctgtgcgctacatataagctgtgtcatccagaggagctggtcctgctcggccacagtcttggaatcccatgggcacccctgtcatcttgcccttcacaggctctgcagttggctggctgtctctctcagctgcacagtggtctgttcctgtaccagggccttctccaagctcttgagggaatctctcctgagcttggcccaacactggatacactccaattggatgtggccgattttgcaactaccatctggcaacaaatggaggagcttggaatggcacctgccctgcagcctacccagggcgcaatgccagccttcgcctccgcctttcagcgtagagctggtggcgttctggtggcttcgcatcttcagagcttcctggaggtgagctaccgggtgcttagacacctggctcagccg

SEQ ID NO: 248831 - DNA, 612 bp, Artificial Sequence
  derived and/or modified sequence
atggcaggccctgccactcagtctccaatgaagctcatggcactccagttactgctgtggcacagcgcgttatggaccgttcaggaggccacaccactcgggccagcttcatctttgccccagagtttcctgttaaagtgtctggaacaggttcgcaaaatacagggcgatggcgctgccctgcaggaaaagctgtgtgccacctataaactctgccaccccgaggaactggtgttgctgggccattcgctgggcataccctgggctccactgagctcttgccccagccaggccttgcagctcgccggatgtctgtcacagcttcacagcggacttttcctgtatcagggactgttacaggccctggaggggattagtcccgaattgggccccacgctcgacactctgcaactagacgtggccgactttgcgactactatttggcagcagatggaggagcttggcatggctcccgccctccaaccaacgcagggtgccatgcccgcctttgcatccgcattccagcgtagagctggcggtgtcctggtagcctcccatttgcagtctttcctggaagtctcttacagggtcttacggcatctcgcgcagccc

SEQ ID NO: 248832 - DNA, 612 bp, Artificial Sequence
  derived and/or modified sequence
atggccggccctgctacacaaagtcctatgaagctgatggccctccagctgctcctctggcatagcgctttgtggaccgtgcaagaagccaccccgttgggacctgcgtcctcactgcctcaatcttttctgcttaagtgcttagaacaggtccgaaaaatccagggagatggcgcagcactacaagaaaagctctgcgcaacttacaagctctgtcatcctgaagagctggtgctactcggacatagccttggtattccctgggctcccctttcttcctgccccagccaggcactgcagctggcagggtgtctcagccagcttcacagtggactcttcctgtatcagggcctcctgcaggctctcgaggggatttcacccgagctgggaccgaccttggacacattacagttggatgtggcagacttcgctacgacaatctggcagcaaatggaggagctggggatggcgcccgctttgcagcccacgcagggcgccatgcccgccttcgcatctgcatttcaacgtagggctggcggtgtgctagtggcttcccatctgcagtctttcctggaagtctcttacagggtactccgccatctggcacaacct

SEQ ID NO: 248833 - DNA, 612 bp, Artificial Sequence
  derived and/or modified sequence
atggcaggtccagccacccagtctcccatgaaactgatggctctgcagcttctgctatggcactcagccctgtggacggtgcaagaggccacccccctgggaccggctagcagtcttccccaatccttcctcctcaagtgccttgagcaggtgcggaaaatccagggagatggagccgctctgcaagaaaaactttgcgccacctacaagttatgtcatcctgaggaacttgtacttctgggacacagcctgggtattccatgggcccccctgtcaagttgcccttcccaagcccttcagcttgccggttgcctgtcacagctgcactccgggcttttcctctaccagggcctgcttcaggcgctggagggtatttcacccgagttggggccaaccctggatacactccagctcgatgtggcagattttgcgactaccatctggcagcagatggaagaattggggatggcccctgccctacaacccacgcagggcgccatgcctgcgttcgcaagtgcctttcagaggcgggctggaggcgtactcgtggccagtcacctccagtcattcctggaggtgagctaccgggtgttacgccacttggcccaacct

SEQ ID NO: 248834 - DNA, 612 bp, Artificial Sequence
  derived and/or modified sequence
atggcgggacccgctacccagtctccgatgaagctcatggctttgcagctcttactgtggcatagtgccctttggaccgtgcaagaagccaccccactgggccctgcaagctctctgccacaaagtttcctcctcaagtgcttagagcaggtacggaagattcaaggcgatggtgcagccctgcaggagaagctgtgcgctacttacaaactctgccaccctgaagaactcgtcctgctgggccattcacttggaattccctgggcgccactatctagttgtcctagccaagcactgcaactcgccggttgcctcagccagttgcattctggcctgtttctttatcagggattgcttcaggcacttgaagggatcagtccagagttaggcccaactctcgacaccttacagctcgatgtggccgactttgccaccactatctggcagcaaatggaggagctggggatggccccagcactgcagcctacccaaggggccatgcctgccttcgcttccgcttttcagcgcagagccgggggcgtgcttgtggcttcacacctgcagtcgtttctcgaggtctcctatagggtactgagacacctcgcacaaccc

SEQ ID NO: 248835 - DNA, 612 bp, Artificial Sequence
  derived and/or modified sequence
atggcgggtccggcgacgcaatcgccgatgaaactaatggcgctacaattattactatggcattcggcgttatggacggttcaagaagcgacgccgctaggtccggcgtcgtcgttaccgcaatcgtttctattaaaatgtttagaacaagttcgtaaaatacaaggtgatggtgcggcgttacaagaaaaattatgtgcgacgtataaactatgtcatccggaagaattagtactactaggtcattcgctaggtataccgtgggcgccgctatcgtcgtgtccgtcgcaagcgctacaattagcgggttgtttatcgcaattacattcgggtttatttttatatcaaggtttattacaagcgttagaaggtatatcgccggaattaggtccgacgttagatacgttacaactagatgttgcggattttgcgacgacgatatggcaacaaatggaagaattaggtatggcgccggcgctacaaccgacgcaaggtgcgatgccggcgtttgcgtcggcgtttcaacgtcgtgcgggtggtgttttagtagcgtcgcatttacaatcgtttttagaagtatcgtatcgtgtactacgtcatctagcgcaaccg

SEQ ID NO: 248836 - DNA, 612 bp, Artificial Sequence
  derived and/or modified sequence
atggccggacctgccacccagagcccgatgaaactgatggccctgcaactgctgctgtggcactcggctctgtggaccgtgcaagaggccactccactggggccggcgagcagcctcccgcaatcattcctgctcaagtgccttgagcaggtgcgcaagatccagggtgacggtgccgcactgcaggaaaagctgtgcgctacttacaagctgtgccaccccgaggagctcgtgctcctgggacattccctcggcatcccgtgggctccgttgtcgtcatgcccgtcgcaggctctccagctcgcgggctgtttgtcgcaactgcactctgggctgttcctctatcaaggactgttgcaggcccttgaggggatcagccccgaactgggtccgactctggacaccctgcagctcgatgtggccgattttgcaaccaccatctggcaacagatggaagagctgggaatggcaccagcgctccagccaacccagggcgccatgccggctttcgcctcggcgtttcaacggcgcgcgggcggagtgcttgtcgcttcgcatttgcagtccttccttgaagtgtcgtaccgggtgctgagacacctggcacaacct

SEQ ID NO: 248837 - DNA, 612 bp, Artificial Sequence
  derived and/or modified sequence
atggcaggtcccgctacacagagccccatgaaactgatggctttgcaactcctgctgtggcattcagccctgtggaccgttcaggaggctacccccctgggtcctgcttctagccttcctcaatcatttctgctcaagtgtctcgaacaagtaagaaagatccagggtgatggagctgccctgcaagaaaagctgtgtgccacttataaactttgccatcccgaagagctggtgttgctgggccattcccttggcataccctgggctccacttagttcatgcccttcacaagctctccagttggctggctgcctgtcacaacttcattcaggactctttttgtaccaaggcctgctgcaggccctggagggtatctcccctgagctgggccccacactggacacactgcagctggatgttgctgactttgccactaccatctggcagcagatggaagaactgggtatggctccagccctgcagcccactcagggcgctatgcctgcattcgctagtgccttccaaaggagagcaggcggtgtgctggtggcctctcatctgcaatcattcctggaagtgtcttaccgtgtgctgcgccatttggcccagccc

SEQ ID NO: 248838 - DNA, 612 bp, Artificial Sequence
  derived and/or modified sequence
atggctggccccgccacgcagagtccaatgaagttgatggcgctgcagttgctcctgtggcactccgccctttggactgtgcaggaggctacccctttggggccggcatcctctctcccgcagtcgtttctgcttaagtgtctcgaacaggtccgaaagattcagggggacggagccgccctgcaggagaaactctgtgccacctacaagctgtgtcaccctgaggagcttgtacttctgggccactcgctgggaatcccctgggcgcctctcagttcttgcccatcacaggcgttgcagttggcaggctgcctgagtcagctgcatagcggtctgttcctctaccaggggctgttgcaggccctggagggaatatcacctgaactcggccccacgctcgataccttgcagctcgatgttgctgacttcgcaaccacgatttggcaacagatggaggagctaggtatggcacctgctctccaaccaacccagggagcgatgccagctttcgctagcgcattccagagacgggctggcggggtcctggtggcatctcatctgcagtcatttctcgaagtaagttaccgcgtactcagacacctggcccagcct

SEQ ID NO: 248839 - DNA, 612 bp, Artificial Sequence
  derived and/or modified sequence
atggcaggtcctgcaacccaatcccccatgaagttgatggcgctgcaacttcttctgtggcactcagcactctggactgtgcaggaagcaactcctctcggtcctgcttccagccttccgcaatccttccttttgaaatgcctggaacaggtcaggaaaatccagggtgatggggcagcgctgcaagaaaagctgtgtgcaacgtacaagttgtgccaccccgaggagctcgtgcttttgggacattctcttgggattccttgggctccactctcatcgtgtccatcccaagcccttcagctggctggatgtctcagccagcttcactccggcctttttctgtaccaaggattgctccaggcgcttgaaggtatttcgccagaactgggtcccaccctggacaccctgcagcttgatgtcgcagattttgccaccactatctggcaacagatggaggaactgggaatggcaccagccctgcagcccacccaaggcgcaatgcctgcatttgcgtctgcgttccaacgaagagccggtggggtgcttgtcgcaagccatctgcaatcctttcttgaggtgtcttaccgcgtgcttcgccacctggcacagcct

SEQ ID NO: 248840 - DNA, 612 bp, Artificial Sequence
  derived and/or modified sequence
atggcaggacctgcaactcagtcacctatgaagctgatggcactgcaattgctcctttggcattccgccctgtggaccgtgcaggaagccactcctcttggacctgcatcaagcctgccacaatcctttctgctcaagtgtctcgaacaagtcaggaagattcaaggagatggagccgcattgcaggaaaagctgtgtgctacctataagctgtgccaccctgaagaacttgtccttcttggtcattcgttgggtatcccgtgggcaccactgtcgtcctgtccatcccaggccctgcaacttgctggatgtctctcccaattgcattcgggactttttctgtaccaggggctgcttcaggcacttgaaggtatttcacccgaacttggacctaccctggacacccttcaacttgatgtcgcagattttgcaaccaccatctggcaacagatggaagaacttggtatggccccagccctgcaacctacccagggggcaatgcccgcatttgcaagcgctttccaaagacgggcaggtggagtgctggtggcatcgcaccttcagtcctttttggaagtgagctaccgcgtcctgagacatctggcgcaaccc

SEQ ID NO: 248841 - DNA, 612 bp, Artificial Sequence
  derived and/or modified sequence
atggccggtcccgccactcagtcccctatgaagttaatggccttacaattgctgctttggcactcagctttgtggaccgtgcaggaggccacaccgctcgggccggcaagctctttgcctcagtcattcttattaaagtgtctggagcaggtgcggaaaatccagggagacggtgctgcccttcaggaaaaactgtgtgcgacttataagctgtgtcaccctgaggaacttgtcttgttaggccacagcttaggaatcccctgggctcctttaagcagttgtcccagccaggccttgcagttagcagggtgtctcagtcagctccactccggattattcctgtatcaggggctgctgcaggctctcgaagggatctcgcctgagcttgggcccacactcgatactctgcagctcgatgtggccgacttcgcgactactatctggcagcagatggaggaactgggcatggcacccgctctgcagcctactcagggggccatgcctgcctttgcttccgcctttcaaaggagagcgggtggtgtgcttgtggccagtcatcttcagagtttcctggaggttagctaccgagttctgagacacctcgcacagcca

SEQ ID NO: 248842 - DNA, 612 bp, Artificial Sequence
  derived and/or modified sequence
atggccggaccagccactcaaagccccatgaagttaatggcgttgcaactgctgctgtggcacagtgcgttgtggacagtccaagaagccacccccctaggaccagctagctccctccctcagtccttcctgttgaaatgtctcgagcaggtgcgcaaaatccagggagacggtgccgcccttcaggagaaactgtgcgctacgtacaagctttgtcatccagaagagcttgtcctgctgggtcattcgctcggtatcccctgggcccctttaagctcttgtccctctcaggcactccaactcgctggatgtttgtctcagctgcactccggattgttcctgtatcaaggactgttgcaagctctggaggggatctcgccggagctgggtccaaccctggacacactgcagctcgatgtagctgattttgctactaccatctggcaacagatggaggagctgggcatggctccggccctccagccaacacagggagcaatgccggcatttgcgtctgcgttccaacggagggcgggtggcgtgctcgtagcctcccacttgcaaagcttcctggaggtatcctatcgggtgctgcgtcatctggcacaacct

SEQ ID NO: 248843 - DNA, 612 bp, Artificial Sequence
  derived and/or modified sequence
atggcaggtcctgcgacccagagcccgatgaagctgatggccttgcagctcctgctctggcactctgcactgtggaccgttcaggaagctacgccgctcggacccgcttcctcactccctcagtctttcctcttgaagtgcttggaacaagtgagaaagatacaaggagatggagccgctcttcaggagaagctgtgcgcgacatacaagctttgccacccagaggagttggtccttcttggacattctctgggcatcccctgggcaccgttgtcttcatgcccctcccaggccttgcaactggcgggttgtttgtcccaactgcacagcggactgttcctctaccagggtctcttgcaggctttggaaggaatttctccggagctcggacctactttggatacgcttcaactcgatgtggccgacttcgccacaaccatatggcagcagatggaagaattgggaatggcaccagctctccagcctacccaaggcgctatgccagcgtttgcctctgctttccaaagacgcgcgggcggcgtcctggttgcttcccacctgcaatctttcctcgaggtgagctaccgcgtcctcagacacctggcacaaccc

SEQ ID NO: 248844 - DNA, 612 bp, Artificial Sequence
  derived and/or modified sequence
atggctgggccggccacccagtccccaatgaaactaatggccttgcaactcctgctgtggcattcagcgctgtggaccgtgcaggaagcaacccccctgggccctgcttcttctcttccgcagtcttttctgctgaagtgcctggaacaagtccggaagattcaaggagacggtgcggcactgcaggagaaattgtgcgccacatacaaactgtgtcatccagaggaattggttctcctgggccactctctgggaattccctgggctccactgtcctcatgcccaagccaggctctccagctagctggatgtctgtcacaactgcattctggactgttcctgtaccaaggtcttctgcaggctctcgaaggaattagtcccgagctggggcctacgctggatactctgcagcttgacgtcgctgatttcgccactacaatttggcagcagatggaagagttagggatggctccagccctgcagcctacccagggcgccatgcccgcttttgcatctgcatttcagagaagagctgggggcgtactggtggctagccacctgcagagctttcttgaggtcagctacagagtgctgcggcacctggcacagccc

SEQ ID NO: 248845 - DNA, 612 bp, Artificial Sequence
  derived and/or modified sequence
atggccggccctgctacccaatctcccatgaagctgatggccttgcagctgctcctgtggcacagcgctctgtggaccgtccaggaggcgacacccctaggtcccgccagtagccttccacaatctttcctcctcaaatgcttggaacaggtgaggaagatccagggtgatggagccgccctccaggagaagctatgtgctacatataagctctgtcacccagaggagttggtccttctggggcatagcctaggaataccatgggctcccctgagttcctgcccttctcaggccctgcagctggctggttgcctcagtcagctacactcaggactgtttctataccagggcctgctgcaggcactcgagggcatcagtcccgagctgggtcccacactggacacgcttcagctcgatgtggccgactttgctactacaatatggcagcagatggaggaattaggcatggctcccgccctccagcctacccaaggcgccatgcctgcctttgcaagcgcatttcagcggcgcgccggtggtgtgttagtggcaagccaccttcagtcttttctggaagtttcttatcgcgttctgaggcatctcgctcagcct

SEQ ID NO: 248846 - DNA, 612 bp, Artificial Sequence
  derived and/or modified sequence
atggcgggacccgccacccagtcccctatgaagctcatggctctgcaattgctgctctggcactctgctctctggaccgtccaggaagcgactcccctcggaccggcgtcatcgctgccacagtcatttctgctgaagtgcctggagcaagtcagaaagatccagggagacggagcggctcttcaggagaaactgtgtgcgacctacaagctgtgccacccggaagaactggtgctgctgggtcactcactgggcatcccgtgggcaccactgtcatcatgcccgtcgcaggctctgcagcttgcgggatgcctgtcccagctgcattctggcctgttcctctatcagggactcttgcaggcccttgaggggatctcgccagaactgggtccgaccttggacaccttgcagctggatgtggcggatttcgcgaccaccatttggcagcagatggaggaactgggaatggcacccgccctccagccaacccaaggtgccatgccggcattcgccagcgcctttcaacgccgggctggaggagtcctggtcgccagccatctccagagcttcctggaagtgtcctaccgggtgcttaggcacctggcacagccc

SEQ ID NO: 248847 - DNA, 612 bp, Artificial Sequence
  derived and/or modified sequence
atggctggtccagcgactcaatcaccgatgaagctcatggcactgcaactacttctctggcattcggcgctgtggacggttcaagaggctaccccgttgggtccggcttcttccctcccacagagtttcctacttaagtgtctcgagcaagttcgcaaaatccaaggcgatggggccgcgctgcaggagaagttatgtgcaacctacaagttatgccatccagaggaactcgttctcctcggccattccctgggcatcccctgggcgcctttatccagctgcccaagtcaggcgctacaattagcaggctgcctgtcacagttacatagtggcctcttcctttaccagggattacttcaggcgctggaaggcataagtcctgagctcggccccactctggatactcttcaattagatgtggcagattttgccaccacgatttggcaacagatggaagaattgggtatggctcctgctctccagcccacacagggggcaatgccggcctttgcctccgctttccagaggcgagcgggtggagtcctggtcgcctcccatctgcaaagctttctggaagtatcttacagagtgttacggcatctggcccaacca

SEQ ID NO: 248848 - DNA, 612 bp, Artificial Sequence
  derived and/or modified sequence
atggccggaccagccacccagtcgcctatgaagctcatggcattgcagcttctgctttggcatagcgcactgtggaccgtgcaggaggcgaccccgttggggccagctagctcgctgccgcaatctttcctgcttaaatgcttggaacaggtgcgcaagatccagggcgacggagcagctctccaggaaaaactttgcgccacttacaagctgtgccacccagaggagctggtgctgctgggacattcactgggtatcccgtgggccccgctttcctcatgcccgtcgcaggcgctccaacttgcagggtgtctctcacagttgcactcgggtctgtttctctaccagggactgctgcaggcgctcgagggaatctctccggaactgggaccgacgctggacacccttcaactcgatgtcgctgatttcgccactactatttggcaacagatggaagaactcggcatggcacccgccctccagcccacccaaggcgcaatgcctgcattcgcctcggctttccaacgcagggctggcggtgtactcgtggcctctcacctgcaatcctttctggaggtgtcctaccgagtcctgagacaccttgctcaacct

SEQ ID NO: 248849 - DNA, 612 bp, Artificial Sequence
  derived and/or modified sequence
atggccggtcctgccacccagagccccatgaagctgatggcattgcagcttttgctttggcattccgcgttgtggaccgtgcaagaagcaaccccactcgggccagcatcttcgttgccacagtcattcctgctcaaatgtcttgaacaggtgcggaagatccaaggagatggagcagcacttcaagagaaactttgcgccacctacaagctgtgccatcctgaagagcttgtgctgcttggacattcactgggcattccatgggcacccctcagctcctgcccatcgcaggcactgcaactcgctggatgtctttcgcagctgcattcgggtctgttcctttaccaaggactcctccaggctctggagggaatcagcccggagctgggaccaaccctggataccctccagctcgacgtcgcagactttgccaccactatttggcaacagatggaggaactcggaatggcacccgccctgcaaccaacccagggagcaatgccagcttttgcaagcgcatttcaaagacgagcaggaggcgtcctcgtggcgtcgcatcttcagtcgttcctcgaagtgagctacagagtgctgcgtcatctggcgcagcct

SEQ ID NO: 248850 - DNA, 612 bp, Artificial Sequence
  derived and/or modified sequence
atggctggccccgcaacccagagccctatgaagctgatggcgctccagctgctcctctggcacagtgccttgtggaccgtgcaggaagccacaccactggggcccgcgtcctcactgcctcagagtttcctgctcaagtgtctcgagcaggtgcgtaagatacagggtgatggggctgcccttcaagagaagctttgcgccacatataagctctgccatccagaggagctggtcctgttggggcacagcttgggtattccctgggctcccctgtcaagctgcccctcgcaggctttgcaactggccgggtgcctgtctcagctgcacagcggcctttttctgtatcagggcctcttacaggcactggagggaatcagtccagaactggggcctacgctggacacccttcagctggatgtggccgattttgctactacaatatggcagcagatggaagagctgggcatggcccccgccctccagccgacccagggtgcaatgccggcattcgcaagcgcattccaaagaagggcgggcggggttttagtggcaagccatctgcagtccttccttgaagtgtcctatcgcgtgctcaggcatctcgctcaacct

SEQ ID NO: 248851 - DNA, 612 bp, Artificial Sequence
  derived and/or modified sequence
atggccgggcctgctacccaatccccaatgaagctgatggcactccaactgctgctctggcattcggcgctgtggaccgtccaagaggcaacccctctcggacctgcgagcagccttccacagagttttctccttaagtgtttggagcaagtcaggaagatccagggggatggagccgcactgcaagagaaactttgcgcaacctacaaactgtgtcatcctgaagagctggtgcttctcggacactcgcttgggattccctgggcacccctgtctagctgtccatcccaggcgctgcagctcgctggatgtctcagccagctccattcaggtctgtttctttaccagggactgcttcaggcccttgaaggaatctcacccgaacttggacccacgcttgatactctccaactcgatgtcgccgacttcgcaacgacgatttggcaacaaatggaagaacttggtatggccccggcgttgcaaccgactcaaggtgcaatgccagcatttgcgtctgcattccagaggagagccgggggcgtgctggtggcttcgcatcttcaatcttttctcgaagtttcctaccgcgtgcttcgtcacctggcgcagcct

SEQ ID NO: 248852 - DNA, 612 bp, Artificial Sequence
  derived and/or modified sequence
atggctggacctgctactcagagtccgatgaagctgatggccctgcagctgcttctgtggcactccgctctctggaccgtccaagaggccacaccacttgggccagcctcctccctgccgcaatcttttttgctgaagtgcctggagcaggtgcgcaaaatccagggggatggcgctgcactccaggagaaactttgtgctacttacaagctgtgccatcctgaggagctcgtccttctcggccattctctcgggattccgtgggctcctttgtcctcctgcccttcccaagcactccagctggctggttgcctgtctcaactgcacagcggactgttcctctatcaaggtctgctccaggccttggagggtatttcacctgaactcggccctacgctggacacactgcagctggatgtggctgacttcgcaacaacaatctggcagcaaatggaggaactgggcatggcacccgctctccagccaacgcagggggcaatgcctgcattcgccagcgcgttccagaggcgggccggcggcgtactggtggcttcccacttgcagagctttcttgaggtgtcctatagggtgctccggcacttggcccagccc

SEQ ID NO: 248853 - DNA, 612 bp, Artificial Sequence
  derived and/or modified sequence
atggccggccccgcaacccaatcacccatgaaacttatggcacttcagttacttttgtggcattctgcgctgtggaccgtgcaggaggccaccccgcttggtcctgcatctagtctgccccagtcctttttactgaaatgcctggagcaggtgcgaaaaatacagggggatggtgccgcacttcaggaaaagctgtgcgctacgtataaattgtgtcatccagaggagctagttctgttgggacattccctgggcatcccgtgggcacccctgtcctcctgcccttcacaggccctgcagcttgcagggtgcctgagtcagctgcattccggcctctttctctatcagggtttactccaggccctggagggaatcagccccgagttggggccgaccctggatacgctccagctcgacgtcgccgacttcgctactaccatttggcagcagatggaagaactggggatggctccagccctgcagccaacacagggtgctatgcccgcgtttgccagtgcgttccagagacgcgctgggggagtactagtagcaagccacctccagtcgttccttgaggtctcttacagggtgttgcggcatcttgctcagcct

SEQ ID NO: 248854 - DNA, 612 bp, Artificial Sequence
  derived and/or modified sequence
atggctggtcccgccacacagtcgcctatgaaactgatggcactacagctgttactgtggcactcagccctttggacggttcaagaagccacgcccctcggccccgcatcttcgcttccacaatcttttctgcttaagtgcctggaacaggtacgaaagattcaaggagatggcgccgccctccaggagaagttgtgcgccacgtacaagttatgccaccccgaggaattggtgcttctgggacattcgctcggtataccatgggcgccgctctccagctgcccctcccaagcactccagctggccggctgcttgagtcagctgcacagcggtttgttcctataccagggattgctccaagcacttgaggggatttcgccggaactaggcccgaccctggatacgttgcaactcgatgtggctgattttgcaacgacgatctggcagcagatggaggagttgggcatggccccggccctgcagccgacacagggcgcgatgcccgccttcgcatccgccttccagcgacgcgctggaggcgtcctggtcgcctcgcatctgcagagcttcctggaggtcagctacagagttcttcgacatctggcccagccg

SEQ ID NO: 248855 - DNA, 612 bp, Artificial Sequence
  derived and/or modified sequence
atggccggaccagccacccaaagccccatgaagctcatggcgttacaactcctcctctggcactccgctttgtggacggtgcaagaggcgactccactgggaccagcatcatcgctcccacaatcgtttcttttaaagtgcctcgaacaagttcgaaaaatccaaggcgatggtgcagctttgcaagagaagctctgtgcgacatataagctttgccatccggaagaacttgtgttgctgggtcatagcctgggaattccgtgggcgcctctatcatcgtgcccatcacaggccctgcagctcgcaggatgtctttcacaactacattcgggattgtttttgtaccaaggtttgctacaagcgctagaagggatttccccagagctcggaccaacccttgacacattgcaacttgatgtggctgattttgccacaaccatctggcagcagatggaggagcttggtatggctccagcactacagccaactcaaggtgcgatgccagcgttcgcatcagcttttcaaagacgagcaggaggcgttttggtggcttcgcatctacaatcatttttggaagtcagctatcgagtcttgaggcatcttgctcagcca

SEQ ID NO: 248856 - DNA, 612 bp, Artificial Sequence
  derived and/or modified sequence
atggcaggccctgcaactcaatctccaatgaagctcatggcccttcagctgctgttgtggcactcggcactttggaccgtgcaagaggcaacccccctcggaccagcgtcgtcgctgcctcagtcgtttctgctgaagtgtcttgaacaagtgagaaagatccaaggagacggtgccgccctgcaggaaaagctgtgtgccacttacaagctctgccatccagaagaactggtgcttcttggccattctcttggtattccgtgggcgcccctttcgtcatgtccttcccaagcactccaacttgcagggtgtctctcgcaactgcattccggactgtttctctaccagggccttcttcaggcactggagggaatcagccctgaactgggacctaccctggacactctgcagctcgatgtcgcggatttcgccacgactatatggcaacaaatggaggaactcgggatggctcctgcgcttcaacctactcagggggcaatgcctgccttcgcatcggcatttcaacgcagggcaggtggtgtgcttgtcgcaagccatcttcaatcttttctggaagtgtcatatcgggtgttgagacaccttgctcagcca

SEQ ID NO: 248857 - DNA, 612 bp, Artificial Sequence
  derived and/or modified sequence
atggctggacccgcgacacagtcccctatgaaactgatggccctccagcttttactgtggcactctgccctgtggactgtgcaggaagcgactccactgggaccagcttcatcactccctcagagtttcctattgaaatgcctagaacaggtgcgaaagatccagggagatggggccgctctccaggaaaaactttgtgcaacttacaaactgtgtcatcccgaggaattagttttacttgggcactccctgggaattccttgggccccactgtcctcttgtccaagtcaggcacttcaattggcaggatgtctttcccagctccactcaggactttttctctaccaggggttgttgcaggcactggaagggatctcccccgagctggggcccactttggacacactgcagctcgatgtcgctgactttgctactacaatatggcagcagatggaggaactggggatggcccccgccctccagccaacacaaggggctatgcctgctttcgcctcagcttttcagcggcgggcagggggggttcttgtggccagtcaccttcagtccttcttagaagtctcctaccgcgtactccgccacttagcacagcca

SEQ ID NO: 248858 - DNA, 612 bp, Artificial Sequence
  derived and/or modified sequence
atggctgggcctgccacccagtcaccgatgaagctgatggcccttcagctcctcctgtggcactctgctctgtggaccgttcaggaggcaaccccactgggtccagcatcttctctcccacagtcgtttcttctgaaatgtctggagcaggtccggaaaatccaaggagatggcgccgccctgcaggagaagctgtgcgccacttataagctctgtcaccccgaggagctggtgctactgggccactcccttgggatcccgtgggctcccctttcgagctgtccgagccaagccctccagttggctggctgtctctcccagcttcatagcggtctgttcctctaccaggggctgctgcaggctctcgaaggaatctctcccgagctcggtccaactctggacaccctgcagctggacgttgccgacttcgccaccactatctggcagcagatggaagagctgggcatggccccagccctgcagcccactcagggagcgatgcctgcctttgcttctgcctttcagagacgcgccggcggcgtgctggtggcatctcatctccaatccttcctggaagtatcctaccgggtgctccggcacctggctcagccg

SEQ ID NO: 248859 - DNA, 612 bp, Artificial Sequence
  derived and/or modified sequence
atggccggacctgctacgcagtccccaatgaagctcatggcactgcagctgttgttgtggcacagcgctctttggaccgtgcaggaggcaacacctctcgggcccgcttcatccctgccacagagttttctgctgaagtgtctggaacaggtaaggaaaatccagggagatggcgccgccctccaggagaaattgtgcgcgacttacaagctgtgccaccccgaggagctggtgcttcttggacactctctcggtataccctgggctccattgtcctcttgtcctagccaggccctccagctcgccggctgcctgagtcagttgcactccggtctgtttttgtaccagggactcctgcaggccctggaggggattagcccagagttgggtccgacactcgacaccctgcagttggacgtcgccgatttcgccacgacaatctggcaacagatggaagaactgggtatggcgccagctctccagcccacgcaaggtgctatgccagctttcgccagtgcttttcaacgccgcgctggtggggtgctggtggcaagtcacctgcagagtttccttgaggtgagttacagagtgcttcgacatctcgctcaacca

SEQ ID NO: 248860 - DNA, 612 bp, Artificial Sequence
  derived and/or modified sequence
atggccggacctgctacccagtcccccatgaaactcatggccctgcagttattactctggcactcggccttgtggaccgtccaagaggcaaccccactcggccctgcctcatcgttaccccaatcttttctcctcaagtgtctagaacaggttcgtaaaattcagggagacggggccgctctgcaagagaaactgtgtgcgacttataagctgtgtcacccagaggaactcgtgctgctgggacattcactcgggataccttgggcaccattgtcgagttgtcccagccaggcactgcagcttgctggctgcctgagccagctgcactctggactttttctctatcaagggctgctgcaggcactggagggcatcagccctgagttaggtcctacgctcgacactttgcagctggatgtggctgactttgcaacgacaatatggcagcagatggaggagctgggcatggccccagctttacagccaacccagggggcaatgcctgccttcgcctcagcttttcagcggagggctggaggggtcctggttgctagccatctccagtccttcctggaggtgagttatcgggtgttacgccatctcgctcagcca

SEQ ID NO: 248861 - DNA, 612 bp, Artificial Sequence
  derived and/or modified sequence
atggcaggcccggccacccaatccccgatgaagttgatggcactgcaactgctcctttggcactcggcactttggactgtgcaagaagctacccctcttggcccagcatcgtcgctccctcaatcctttcttcttaaatgcctggagcaggtccgtaagattcaaggagatggagcagcccttcaagaaaagctgtgtgctacctacaagctgtgtcatcccgaagagctcgtgctgctcggacattcgctgggcatcccttgggcacccctctcttcatgccctagccaggcgctgcagctggccggttgtttgtcccaattgcactcgggtttgtttctgtaccaggggctgcttcaggcgttggaaggaatcagccctgagctcggtcctaccctcgatactcttcaactcgatgtggcagactttgcaaccactatatggcaacagatggaggaactggggatggcgcctgccctccagcctactcaaggggcaatgcctgcatttgcctcggcatttcagagaagagctggcggggttctggtggcatcgcatcttcagagcttccttgaagtgagctacagggtgcttcgccatctggcccaacca

SEQ ID NO: 248862 - DNA, 612 bp, Artificial Sequence
  derived and/or modified sequence
atggcggggccagcaacccagagcccaatgaagctcatggcgctccaactgctgctttggcattccgcactctggacagtacaggaggcaactccccttggccctgcttcctctctgccccagtcgttcctgctcaagtgtttggaacaggttaggaaaattcagggagacggtgccgctctgcaggagaaactttgcgccacctacaagctctgccatcccgaggaattggtcctgctcgggcacagcctgggtataccctgggcacctttgtctagctgccccagtcaggcactgcagctggctggatgcctctctcagctgcactcgggactttttctctatcagggcttgctccaggcccttgaaggcatctctcctgagctgggacctactctggacaccctgcagctggatgtcgcggacttcgcaacgaccatctggcaacagatggaggagctgggaatggcacctgcacttcagccaacacaaggagctatgcccgcatttgcgtcggcctttcagaggagagcgggaggggtgctggtagctagccatctccaaagtttccttgaggtgtcttacagagtgttaagacacctggcacagcca

SEQ ID NO: 248863 - DNA, 612 bp, Artificial Sequence
  derived and/or modified sequence
atggccgggcccgccacacagtctcctatgaagctgatggcgctgcagctcctgctttggcacagcgcgctctggaccgttcaggaggcaactccactgggtcctgcgtcttctttgccccagtccttcctgctcaagtgcttggagcaggtccggaaaattcagggagatggcgctgccctacaagaaaaattatgtgcgacatataagctgtgccaccctgaggagctggtgctgttaggccactccctgggcatcccctgggcgccgttgtcctcctgccccagccaagccctccaactcgcaggttgtctctctcagttgcactctgggctgtttctttaccagggactgctccaggccctggaggggatctcgcctgagctgggtcccaccctggacacattgcaattggatgttgctgattttgccacaacaatctggcagcagatggaagaactgggcatggcccctgcactgcagccaactcagggcgcaatgcccgcgttcgcctccgcctttcagagaagggccggaggggtccttgtcgcctcccatttacagtccttcctggaggtgtcttacagggtcctcagacatcttgcacaaccc

SEQ ID NO: 248864 - DNA, 612 bp, Artificial Sequence
  derived and/or modified sequence
atggcaggcccggcgacccagtctccgatgaaactcatggcactgcagctccttctgtggcattccgctctgtggactgtgcaggaagccaccccgctgggaccagcctcctcactcccacaatcgtttctgctcaagtgcctcgaacaggtgagaaaaatccaaggtgacggcgctgccctgcaggaaaaactgtgcgcaacgtacaaactctgccaccctgaggaacttgtgctgctgggacactcgttggggattccgtgggctccactcagctcctgcccttcccaggccctgcaactggcaggatgcctgagccagctgcactcggggctgttcctgtaccagggcctgctgcaagcgcttgagggtatcagcccggagctggggccgactctcgacaccctccaactggacgtggccgacttcgcaactactatctggcagcaaatggaagagctcggaatggccccggccctgcagcctacgcagggggcgatgccggcgttcgccagcgcgttccaaaggagggccggaggtgtgctggtggccagccacttgcaatctttcttggaagtgtcctaccgcgttctccggcatctggcacagcct

SEQ ID NO: 248865 - DNA, 612 bp, Artificial Sequence
  derived and/or modified sequence
atggcgggcccagcaacccagtctcccatgaagctgatggcactccagttgctcctctggcacagtgccctgtggacagtgcaggaggctacccctctgggccccgcttccagtctgccgcagagtttcctgctgaaatgtctagagcaggtcaggaagattcagggggacggtgcggcgctccaggagaagttgtgtgctacatacaaattgtgtcatccagaggagttggtgctcctcgggcactcgctgggcattccctgggcccctctgagctcgtgtcctagtcaggcactgcagctcgctgggtgccttagtcaacttcattctggcctattcctttaccaggggctgctgcaggcactggagggcatatccccagagcttggccctaccctggatacactgcaactggatgtggccgactttgcaactaccatttggcagcagatggaggaactggggatggcccccgccctacaaccaacccagggcgccatgccagcgttcgcctccgcctttcagcgcagagcaggcggcgtgttggtcgccagccatctgcaatccttccttgaggttagttatagagtgctgcgccacttagctcagcct

SEQ ID NO: 248866 - DNA, 612 bp, Artificial Sequence
  derived and/or modified sequence
atggcagggccggcgactcagtcgccgatgaagctcatggccctgcagctgttgctttggcactcagctctgtggaccgtgcaagaggcaactccactgggccctgcctcctcgctcccccaatcgttcctgctcaagtgccttgaacaagtgcgcaaaatacagggtgatggtgctgctctgcaggaaaaactgtgtgccacctacaagctgtgccacccggaggagctggtcttgctgggacattcgctgggcatcccgtgggcgccactctcgagctgtccttcccaagcgctgcagttggcaggttgcctgagccagcttcactcgggactgttcctgtaccagggcttgctccaggccttggagggaatctcgccggaactcggcccaactctcgatactctccaactggacgtcgccgacttcgccacgacgatctggcagcagatggaagaactcggtatggccccagctctgcagcctacccaaggcgctatgcccgcattcgcttcggccttccagagaagggctggcggagtgctggtggcgtcccacctccagtctttcctcgaagtgagctaccgcgtgctccggcacctggcacagccg

SEQ ID NO: 248867 - DNA, 612 bp, Artificial Sequence
  derived and/or modified sequence
atggccgggccggccacccaatcacctatgaagctgatggctcttcagctccttctgtggcacagcgcgctctggactgtgcaagaggcgacgcctctgggaccggcgtcctctctgccacagtccttcctgctgaaatgcctggaacaggtccgcaaaatccagggcgatggtgctgcgctgcaagagaagttgtgcgccacttacaagctgtgccacccagaggagctggtgcttctggggcattcgctgggaatcccgtgggctccactgtcaagctgtccgtcccaggccctccagctcgccggctgcctttcgcagttgcacagcggtctgttcctctaccaaggattgctgcaggccttggaaggaatctcgcccgaactgggacccactctcgacacgctccagctggatgttgcagacttcgccaccaccatttggcagcagatggaagaactcggaatggcacctgcgctccagccgactcagggtgcgatgccggctttcgcctcggcatttcaacgcagggccggaggagtcctcgtggcatctcatttgcaatcctttctggaagtgagctacagggtgctccgtcacttggcgcaaccg

SEQ ID NO: 248868 - DNA, 603 bp, Artificial Sequence
  derived and/or modified sequence
atgagccccgagcccgccctgagccccgccctgcagctgctgctgtggcacagcgccctgtggaccgtgcaggaggccacccccctgggccccgccagcagcctgccccagagcttcctgctgaagtgcctggagcaggtgagaaagatccagggcgacggcgccgccctgcaggagaagctgtgcgccacctacaagctgtgccaccccgaggagctggtgctgctgggccacagcctgggcatcccctgggcccccctgagcagctgccccagccaggccctgcagctggccggctgcctgagccagctgcacagcggcctgttcctgtaccagggcctgctgcaggccctggagggcatcagccccgagctgggccccaccctggacaccctgcagctggacgtggccgacttcgccaccaccatctggcagcagatggaggagctgggcatggcccccgccctgcagcccacccagggcgccatgcccgccttcgccagcgccttccagagaagagccggcggcgtgctggtggccagccacctgcagagcttcctggaggtgagctacagagtgctgagacacctggcccagccctag

SEQ ID NO: 248869 - DNA, 615 bp, Artificial Sequence
  derived and/or modified sequence
atggccggccccgccacccagagccccatgaagctgatggccctgcagctgctgctgtggcacagcgccctgtggaccgtgcaggaggccacccccctgggccccgccagcagcctgccccagagcttcctgctgaagtgcctggagcaggtgagaaagatccagggcgacggcgccgccctgcaggagaagctgtgcgccacctacaagctgtgccaccccgaggagctggtgctgctgggccacagcctgggcatcccctgggcccccctgagcagctgccccagccaggccctgcagctggccggctgcctgagccagctgcacagcggcctgttcctgtaccagggcctgctgcaggccctggagggcatcagccccgagctgggccccaccctggacaccctgcagctggacgtggccgacttcgccaccaccatctggcagcagatggaggagctgggcatggcccccgccctgcagcccacccagggcgccatgcccgccttcgccagcgccttccagagaagagccggcggcgtgctggtggccagccacctgcagagcttcctggaggtgagctacagagtgctgagacacctggcccagccctag

SEQ ID NO: 248870 - DNA, 603 bp, Artificial Sequence
  derived and/or modified sequence
atgtccccagagccggccctatcacctgctctgcagctgctgttatggcactccgcactgtggacggtccaggaggccacgcccttgggtcccgcatcctccctcccgcagtctttcctcctcaaatgtctggagcaggtccggaaaatccagggagatggcgctgctctgcaggagaagctttgcgcaacctacaagctgtgccaccccgaggagctggtgctgctcggacacagtctcggtattccctgggcacctttgtccagctgcccaagccaggcccttcaactggctgggtgcctgtcccagctgcatagtgggctgttcttgtatcagggcctgctgcaagctctcgaggggattagtcctgagctgggacctactctggatacattgcagctggacgtggcggattttgcaactaccatctggcagcaaatggaagagctgggcatggctcctgcattgcagcctacccaaggggcgatgcctgccttcgctagcgcctttcaaaggagagctggtggcgtcctggtagcctcccatttgcaatcctttttagaagtttcctaccgcgttctgcggcatctggcgcagccttag

SEQ ID NO: 248871 - DNA, 615 bp, Artificial Sequence
  derived and/or modified sequence
atggcaggtccagcaacacagtcgcctatgaagctaatggccctgcagctactgctgtggcatagtgccctctggacggtgcaagaggccacgcctctgggcccagcctcctccttgccccagagctttctgctgaaatgcctggaacaggtgcgcaaaattcagggcgacggggccgcactgcaggagaagctatgcgctacctataagctgtgtcatcccgaagagttggtgttgctcgggcactctctaggaatcccttgggccccactctcttcatgtccctctcaggccctgcaactggccggatgcctcagccagctccactcagggctcttcctataccagggcctgctccaggctttagaaggcatttcccctgagctgggtccgacacttgataccctccagctggatgtggcggacttcgcaaccaccatctggcagcagatggaggagctcggcatggccccggccttgcagccaacgcagggtgcgatgcctgccttcgctagtgcgttccagcgacgggccgggggcgtcctggtggcctctcaccttcaatccttcctcgaggtgtcataccgtgtactcagacacctggcacagccctag

SEQ ID NO: 248872 - DNA, 603 bp, Artificial Sequence
  derived and/or modified sequence
atgagccctgagcccgccctgagccctgccctgcagctgctgctgtggcacagcgccctgtggacagtgcaggaggccacccccctgggccctgccagcagcctgccccagagcttcctgctgaagtgcctggagcaggtgaggaagatccagggagatggagctgccctgcaggagaagctgtgtgccacctacaagctgtgccaccctgaggagctggtgctgctgggccacagcctgggcatcccctgggcccccctgagcagctgccccagccaggccctgcagctggccggctgcctgagccagctgcacagcggcctcttcctgtaccagggcctgctgcaggccctggagggcatcagccctgagctgggccccaccctggacaccctgcagctggatgtggccgactttgccaccaccatctggcagcagatggaggagctgggcatggccccagccctgcagcccacccagggcgccatgcctgcctttgccagcgccttccagaggcgggccggcggcgtgctggtggccagccacctgcagagcttcctggaggtgtcctacagagtgctgcggcacctggcccagccctag

SEQ ID NO: 248873 - DNA, 615 bp, Artificial Sequence
  derived and/or modified sequence
atggccggccctgccacccagagccccatgaagctgatggccctgcagctgctgctgtggcacagcgccctgtggacagtgcaggaggccacccccctgggccctgccagcagcctgccccagagcttcctgctgaagtgcctggagcaggtgaggaagatccagggagatggagctgccctgcaggagaagctgtgtgccacctacaagctgtgccaccctgaggagctggtgctgctgggccacagcctgggcatcccctgggcccccctgagcagctgccccagccaggccctgcagctggccggctgcctgagccagctgcacagcggcctcttcctgtaccagggcctgctgcaggccctggagggcatcagccctgagctgggccccaccctggacaccctgcagctggatgtggccgactttgccaccaccatctggcagcagatggaggagctgggcatggccccagccctgcagcccacccagggcgccatgcctgcctttgccagcgccttccagaggcgggccggcggcgtgctggtggccagccacctgcagagcttcctggaggtgtcctacagagtgctgcggcacctggcccagccctag

SEQ ID NO: 248874 - DNA, 1673 bp, Artificial Sequence
  derived and/or modified sequence
agcctgcagcccagccccacccagacccatggctggacctgccacccagagccccatgaagctgatgggtgagtgtcttggcccaggatgggagagccgcctgccctggcatgggagggaggctggtgtgacagaggggctggggatccccgttctgggaatggggattaaaggcacccagtgtccccgagagggcctcaggtggtagggaacagcatgtctcctgagcccgctctgtccccagccctgcagctgctgctgtggcacagtgcactctggacagtgcaggaagccacccccctgggccctgccagctccctgccccagagcttcctgctcaagtgcttagagcaagtgaggaagatccagggcgatggcgcagcgctccaggagaagctgtgtgccacctacaagctgtgccaccccgaggagctggtgctgctcggacactctctgggcatcccctgggctcccctgagcagctgccccagccaggccctgcagctggcaggctgcttgagccaactccatagcggccttttcctctaccaggggctcctgcaggccctggaagggatctcccccgagttgggtcccaccttggacacactgcagctggacgtcgccgactttgccaccaccatctggcagcagatggaagaactgggaatggcccctgccctgcagcccacccagggtgccatgccggccttcgcctctgctttccagcgccgggcaggaggggtcctggttgcctcccatctgcagagcttcctggaggtgtcgtaccgcgttctacgccaccttgcccagccctgagccaagccctccccatcccatgtatttatctctatttaatatttatgtctatttaagcctcatatttaaagacagggaagagcagaacggagccccaggcctctgtgtccttccctgcatttctgagtttcattctcctgcctgtagcagtgagaaaaagctcctgtcctcccatcccctggactgggaggtagataggtaaataccaagtatttattactatgactgctccccagccctggctctgcaatgggcactgggatgagccgctgtgagcccctggtcctgagggtccccacctgggacccttgagagtatcaggtctcccacgtgggagacaagaaatccctgtttaatatttaaacagcagtgttccccatctgggtccttgcacccctcactctggcctcagccgactgcacagcggcccctgcatccccttggctgtgaggcccctggacaagcagaggtggccagagctgggaggcatggccctggggtcccacgaatttgctggggaatctcgtttttcttcttaagacttttgggacatggtttgactcccgaacatcaccgacgcgtctcctgtttttctgggtggcctcgggacacctgccctgcccccacgagggtcaggactgtgactctttttagggccaggcaggtgcctggacatttgccttgctggacggggactggggatgtgggagggagcagacaggaggaatcatgtcaggcctgtgtgtgaaaggaagctccactgtcaccctccacctcttcaccccccactcaccagtgtcccctccactgtcacattgtaactgaacttcaggataataaagtgtttgcctcca

SEQ ID NO: 248875 - DNA, 1583 bp, Artificial Sequence
  derived and/or modified sequence
agtcgtggccccaggtaatttcctcccaggcctccatggggttatgtataaaggcccccctagagctgggccccaaaacagcccggagcctgcagcccagccccacccagacccatggctggacctgccacccagagccccatgaagctgatggccctgcagctgctgctgtggcacagtgcactctggacagtgcaggaagccacccccctgggccctgccagctccctgccccagagcttcctgctcaagtgcttagagcaagtgaggaagatccagggcgatggcgcagcgctccaggagaagctgtgtgccacctacaagctgtgccaccccgaggagctggtgctgctcggacactctctgggcatcccctgggctcccctgagcagctgccccagccaggccctgcagctggcaggctgcttgagccaactccatagcggccttttcctctaccaggggctcctgcaggccctggaagggatctcccccgagttgggtcccaccttggacacactgcagctggacgtcgccgactttgccaccaccatctggcagcagatggaagaactgggaatggcccctgccctgcagcccacccagggtgccatgccggccttcgcctctgctttccagcgccgggcaggaggggtcctggttgcctcccatctgcagagcttcctggaggtgtcgtaccgcgttctacgccaccttgcccagccctgagccaagccctccccatcccatgtatttatctctatttaatatttatgtctatttaagcctcatatttaaagacagggaagagcagaacggagccccaggcctctgtgtccttccctgcatttctgagtttcattctcctgcctgtagcagtgagaaaaagctcctgtcctcccatcccctggactgggaggtagataggtaaataccaagtatttattactatgactgctccccagccctggctctgcaatgggcactgggatgagccgctgtgagcccctggtcctgagggtccccacctgggacccttgagagtatcaggtctcccacgtgggagacaagaaatccctgtttaatatttaaacagcagtgttccccatctgggtccttgcacccctcactctggcctcagccgactgcacagcggcccctgcatccccttggctgtgaggcccctggacaagcagaggtggccagagctgggaggcatggccctggggtcccacgaatttgctggggaatctcgtttttcttcttaagacttttgggacatggtttgactcccgaacatcaccgacgcgtctcctgtttttctgggtggcctcgggacacctgccctgcccccacgagggtcaggactgtgactctttttagggccaggcaggtgcctggacatttgccttgctggacggggactggggatgtgggagggagcagacaggaggaatcatgtcaggcctgtgtgtgaaaggaagctccactgtcaccctccacctcttcaccccccactcaccagtgtcccctccactgtcacattgtaactgaacttcaggataataaagtgtttgcctcca

SEQ ID NO: 248876 - DNA, 603 bp, Artificial Sequence
  derived and/or modified sequence
atgagccccgagcccgccctgagccccgccctgcagctgctgctgtggcatagcgcgctttggactgttcaggaagccaccccgctgggtccagctagttcgctcccgcagtcatttttgttgaaatgcctggaacaggtgagaaaaatacagggcgacggcgctgctctccaggagaagctgtgcgccacctacaagctctgtcatccggaggaactcgtgctgttgggacacagtttgggaatcccctgggcacccctctcaagctgtccttcacaggccctgcagctagctgggtgcttgagccagctgcactcaggtctgtttctgtaccaaggcctactgcaggccttagaaggtatcagccccgaattgggacccacgctggacacactgcaactggatgtggctgacttcgccacaacgatctggcaacagatggaggagttgggtatggcccccgcattacagccaacccagggagctatgcctgccttcgccagcgccttccagcgccgtgccgggggcgtgctggtggcaagtcacctgcagagctttctggaggtgtcttatagggtgctccgtcacctggctcaaccatag

SEQ ID NO: 248877 - DNA, 615 bp, Artificial Sequence
  derived and/or modified sequence
atggccggccccgccacccagagccccatgaagctgatggccctgcagctcctgctgtggcattcagctctttggacagttcaggaagctactcctctcggaccagccagttccctgccgcagtcatttctacttaaatgcctcgagcaggtacgcaagattcagggtgacggcgccgccttacaggagaaattatgcgccacctataaactgtgccaccctgaggagctagtgctgctggggcactctctggggatcccctgggctccattgtccagctgcccatctcaggctctccagctggccgggtgtctgtcccaactgcactcgggtttgtttctgtaccagggactgctacaggctctggagggaatttctcctgaacttggtccaaccctggataccctgcagttggacgtcgcggactttgcaaccacaatctggcagcagatggaggagctgggaatggcacccgcattgcagccaacccagggcgctatgcccgcttttgcgtctgcattccagaggcgtgccggcggagtcttggtggcttctcacctgcagagcttcttggaggtgtcgtatagagtcctccgccatcttgcccagccatag

SEQ ID NO: 248878 - DNA, 603 bp, Artificial Sequence
  derived and/or modified sequence
atgtcgcccgaacctgccctttctcctgcgctccaactgctgctgtggcattctgccctctggaccgtccaggaggcaacccccctgggccctgcctccagcctccctcaaagttttctccttaagtgtctcgaacaggttagaaagatccaaggggatggggctgctcttcaagaaaaactgtgcgcgacttacaagctgtgtcatcccgaggagctggtcctgctgggacacagcctgggtattccctgggccccactatcttcttgtccttcccaggctttgcaattagctggttgtctgagccaactgcattctggcctttttttgtaccaaggactcttacaggcactcgaggggatttccccagagcttggcccaaccctggatactcttcaattggatgtcgccgattttgccacaaccatttggcagcagatggaagaacttggtatggctcccgctctgcagccaacacaaggcgcaatgcctgctttcgcctccgcctttcagcggagagctgggggagtactggtggcttctcatctccaatcatttctcgaggttagttatcgggtcctgcggcacctggcacagccttag

SEQ ID NO: 248879 - DNA, 615 bp, Artificial Sequence
  derived and/or modified sequence
atggctggacccgcaactcagtcgccaatgaaactgatggccctgcagctgctgctgtggcactctgcactttggaccgtccaggaggctacaccccttggtcctgcctctagtctgccccagagtttcttacttaagtgtctggagcaagtgcgcaaaatccaaggagatggagcggcactgcaggaaaagttgtgcgccacctataaactatgccatccagaggaactggtgctgctcgggcatagcttgggtattccctgggctccactgtctagctgccccagccaggccctgcagctcgcaggttgcctgtcacaactacactcagggctatttctgtaccaaggactcctccaagctctggaggggatatcccccgagcttggtcccaccctagacacactgcaactggatgtggctgatttcgcaacaacgatctggcagcagatggaagaactgggcatggcaccagccttacagcctacccagggcgcaatgcctgcattcgcctccgcgtttcagcgtagggccggaggtgtcttggttgccagtcatctgcagtctttcctagaagtgtcttacagagtcctgaggcatttggcgcaaccatag

SEQ ID NO: 248880 - DNA, 603 bp, Artificial Sequence
  derived and/or modified sequence
atgtcccctgaaccagccctcagccctgcactacaactgcttttgtggcacagcgctctctggacagttcaggaggcaacacccctgggacccgcatcctctttaccacaatcttttctgctgaagtgcctggaacaagtgcgcaaaatccaaggcgatggcgctgccttgcaggagaaactgtgtgcaacttacaagttgtgccaccccgaagagctcgttttattgggacactctctgggtattccatgggcgcccctctcaagctgtccttcccaggccctgcaactagctggatgcctttcccagttacactcagggttgtttttgtatcaggggttgctccaggcactggaggggatatcacctgagctcggcccgaccctcgacacgcttcagctggacgtcgccgacttcgccactacaatctggcagcagatggaagagcttggcatggcgcctgcactccagcctactcagggggctatgcctgctttcgcttcagcctttcaaaggagagcaggaggagttttagtggcttcccaccttcagagcttcctcgaggtcagctaccgggttctgcggcatctggctcaaccatag

SEQ ID NO: 248881 - DNA, 615 bp, Artificial Sequence
  derived and/or modified sequence
atggcaggacctgctactcaaagcccaatgaaacttatggcccttcagctattattgtggcactccgcgctctggaccgttcaggaggccacccctctcggccctgcaagctccctccctcagagtttcctacttaagtgcttagagcaagtccgcaaaattcagggcgatggagctgccttacaggaaaaactgtgcgccacctacaaattatgtcatccggaggagctggtacttctcgggcattccctgggaattccatgggctccactcagctcttgtccaagtcaagcattgcaattagctgggtgcctttctcagctgcattcaggcctgtttctctatcaagggttgttacaggctctagagggcattagcccagagctgggacctaccctcgacacactgcaacttgatgttgccgatttcgcaacaacgatctggcagcaaatggaggaactgggcatggccccagctctgcagccaacccaaggagcaatgcctgccttcgcaagcgccttccaacgcagagctggcggcgtgttggtggcttcccacctccagtcctttctagaagtatcttaccgggtcttgagacatctggcccagccctag

SEQ ID NO: 248882 - DNA, 603 bp, Artificial Sequence
  derived and/or modified sequence
atgtcccccgaaccagccctctcccctgctctgcaactcctcttgtggcattctgctctgtggaccgttcaagaggccactcccctcggtcccgcttcctcacttcctcaaagcttccttctcaagtgtctagaacaggtgcgcaaaattcaaggggatggcgctgcgctgcaggaaaagctgtgtgcaacatacaagctctgtcaccccgaagaactcgtgctgcttgggcattcattgggaatcccttgggcccctctgtctagctgtccctctcaggccctccagcttgctggctgtctctcacaacttcactccggactcttcctctaccaggggctgctccaggccctcgaaggaatctcacccgaactgggaccaacactggatactctgcagcttgatgtcgccgactttgcaaccaccatttggcagcagatggaggaattgggtatggctcccgccctgcaacctacccaaggcgcaatgccagcgttcgcctctgcatttcagcgcagggccggcggcgtcctcgtagcgtctcatctccagtcctttctagaagttagttatcgcgtcctgcggcatctggctcagccgtag

SEQ ID NO: 248883 - DNA, 615 bp, Artificial Sequence
  derived and/or modified sequence
atggcaggacctgctactcaaagcccaatgaaacttatggcccttcagctattattgtggcactccgcgctctggaccgttcaggaggccacccctctcggccctgcaagctccctccctcagagtttcctacttaagtgcttagagcaagtccgcaaaattcagggcgatggagctgccttacaggaaaaactgtgcgccacctacaaattatgtcatccggaggagctggtacttctcgggcattccctgggaattccatgggctccactcagctcttgtccaagtcaagcattgcaactcgccgggtgcctgagccaactgcactccggcttatttctgtatcagggtcttctccaggcactcgaaggtatttcccctgaactcggccccactctagataccctgcagctcgatgtcgctgatttcgctaccacaatttggcagcaaatggaggaactggggatggctcctgccctgcagcctacacagggagctatgcctgcatttgccagtgcattccaaaggagggccgggggcgtgctggtggcatcacatttgcagtccttcctggaagttagctatcgggttctccggcaccttgctcagccatag

SEQ ID NO: 248884 - DNA, 525 bp, Artificial Sequence
  derived and/or modified sequence
atggcccctctcggaccaactggtccgctgcctcagagctttctgctcaagtgtctggaacagatgcgcaaggtgcaggccgacggcacagctctccaggagacactgtgcgcaacacaccagctgtgtcaccccgaagaactggtcctgctgggccacgccctgggcattccacagcctcccctctcctcttgttccagtcaggccctgcagctgatggggtgtctccggcagcttcactctggcctgttcctctaccagggactgctgcaggccctggcaggaatttctcctgagcttgcccctacgcttgacactctgcagttggacaccaccgattttgccattaatatctggcagcagatggaggatctgggaatggcacctgcagttccaccaacccagggcacaatgcctgcctttacgagtgcattccagcgacgcgctggcggggtgctggtggcctctaatctccagagttttctcgaactggcatacagggcactcaggcatttcgctaaaccg

SEQ ID NO: 248885 - DNA, 525 bp, Artificial Sequence
  derived and/or modified sequence
atggctcctctgggtccaactggtccgctcccccaatctttcctgcttaagtgcctggagcagatgagaaaggtccaagccgatggcaccgccttgcaggaaaccctttgtgcgactcatcaattgtgccatccagaagagttggttctgctgggacacgccctgggcattccgcaaccccccctcagctcctgctcatcccaggcgctccagttgatgggctgtctgaggcagttgcattccggcctcttcctgtaccaaggcctgctccaggccctggcgggtatttcccctgagctggctccaaccctcgataccctacaacttgacacgactgacttcgctatcaatatctggcaacagatggaggacctcggcatggcccctgctgtcccccctactcaaggtactatgcccgccttcacgtctgcgttccagaggcgtgctgggggcgtccttgtcgctagcaacttgcaaagcttcctggagcttgcgtaccgggcgctgcggcattttgctaagcca

SEQ ID NO: 248886 - DNA, 525 bp, Artificial Sequence
  derived and/or modified sequence
atggccccccttggccccaccggtccattgccccaatccttccttttgaaatgcctcgaacaaatgagaaaggtgcaggccgatggtaccgctctgcaggagaccctctgcgctacacaccaattgtgccaccccgaggagctggtgctgctgggccatgcactgggaatccctcagcctcccctctcttcatgctccagccaagctcttcagcttatgggttgcttgaggcagctgcattctggtttgttcttgtaccaaggcttgttgcaggcactggctggaatctccccagagctggcccccaccctggacactctgcagttggacacaactgatttcgctatcaatatttggcagcagatggaggatcttggcatggctccagcagttccacccacccagggaaccatgcccgctttcacctcagcattccagcgtagagcaggcggtgtgcttgtagctagcaatctccaatcctttctggaactggcttatagggccctccgccacttcgctaagcca

SEQ ID NO: 248887 - DNA, 525 bp, Artificial Sequence
  derived and/or modified sequence
atggcaccgctgggtcccacgggaccgctgccacaatcgtttctgctcaagtgcctcgagcaaatgcgaaaagtccaggctgatggcacggcactccaggaaaccctgtgtgcgactcatcagctgtgtcacccagaagagctcgtgctcctcggacacgcactcgggatcccccagccccctctgtcgtcatgctcaagccaggctctgcagctcatggggtgcttgaggcagctgcactctgggttgttcttgtaccaaggcctgctccaagcactcgctggaatatcccctgaactggccccgactctggacaccctccaattggacaccactgacttcgcgatcaacatctggcagcagatggaagatcttggcatggccccggccgtgccgccaacccaggggaccatgccagccttcacttcggccttccagcggcgcgccggaggagttctggtggcaagcaatctccaatcgtttcttgagcttgcgtaccgcgcgctgcggcatttcgctaagcca

SEQ ID NO: 248888 - DNA, 525 bp, Artificial Sequence
  derived and/or modified sequence
atggcgccgctaggtccgacgggtccgttaccgcaatcgtttttactaaaatgtttagaacaaatgcgaaaagtacaagcggatggtacggcgttacaagaaacgttatgtgcgacgcatcaattatgtcatccggaagaattagttttactaggtcatgcgttaggtataccgcaaccgccgttatcgtcgtgttcgtcgcaagcgttacaactaatgggttgtttacgacaactacattcgggtctatttctatatcaaggtctactacaagcgttagcgggtatatcgccggaactagcgccgacgttagatacgctacaactagatacgacggattttgcgataaatatatggcaacaaatggaagatctaggtatggcgccggcggttccgccgacgcaaggtacgatgccggcgtttacgtcggcgtttcaacgtcgagcgggtggtgttttagtagcgtcgaatttacaatcgtttttagaactagcgtatcgtgcgttacgtcattttgcgaaaccg

SEQ ID NO: 248889 - DNA, 525 bp, Artificial Sequence
  derived and/or modified sequence
atggccccactgggtcctacggggcccctgccccagtccttcctgctgaaatgtctcgaacagatgcgtaaggtccaagcggacggaaccgcactgcaagaaaccctgtgcgctacccaccaactttgccaccctgaagagctggtgcttctcggacatgccctcggaatcccacagccgccgctgtcaagctgctcgagtcaggccctgcaactcatgggctgcttgaggcagctccattcaggcctgttcctctaccagggcctgctgcaggccctcgcaggcattagcccagagctcgcgcctacccttgacacgttgcaactggacacgaccgattttgctataaacatctggcaacagatggaggatctcggaatggccccagccgtgcctcccactcagggaactatgccagcctttacctccgccttccagcgccgggcgggtggagtcctggtggcctcgaatctgcaatcgttcctcgaacttgcatacagagcgctccgccacttcgcgaagcct

SEQ ID NO: 248890 - DNA, 525 bp, Artificial Sequence
  derived and/or modified sequence
atggctccactgggacctacggggccactcccacagagctttctgctgaaatgtttggagcagatgaggaaagtgcaagccgacgggactgctctgcaggaaacactgtgtgccacccatcagctgtgtcaccccgaggaactggtgttgttgggccacgctctgggcattccgcagccgcccctgtcatcctgctcctctcaggccctgcagttgatgggttgtctgcgacagcttcactcgggcctgttcctctaccagggcctactgcaggccctcgctggaatatcacctgagctggccccaaccctcgacaccctccagctggacactaccgatttcgccattaatatatggcagcagatggaggatttagggatggccccagcggtgccacccacgcaagggaccatgcctgcattcacatccgccttccagcgccgtgcagggggcgtgctggtggcaagtaatctccagtccttcttagagttggcatatcgagccctccgtcacttcgccaagccc

SEQ ID NO: 248891 - DNA, 525 bp, Artificial Sequence
  derived and/or modified sequence
atggccccactgggacctactggaccattgccccagagctttcttcttaaatgtctggagcagatgagaaaggtgcaggctgatggtactgcattgcaagaaactctttgcgcgacccaccagctctgccatccagaggaactggtgctcctcggacatgccctgggaatcccacaaccaccactgagctcatgttcatcgcaggctctgcagctgatgggctgcctgagacagctgcatagcggactgttcctgtaccagggcctcctgcaggccctggccggaatcagcccagaactggccccaaccctcgacaccctccagctcgacactaccgacttcgccatcaacatctggcagcagatggaggacttgggaatggcgccagcggtgccgccgacccaggggactatgcctgccttcacctcagccttccagagacgcgccggcggagtccttgtcgcttccaacctgcaatcgttcctggaactcgcgtaccgggctctgcgccacttcgcgaagccg

SEQ ID NO: 248892 - DNA, 525 bp, Artificial Sequence
  derived and/or modified sequence
atggcccccctcggtcccaccggccccctgccacagtctttcctgctgaagtgtttggagcagatgcggaaagtgcaagcagacggcaccgcgctgcaggagactctgtgcgccacccatcagctgtgtcaccctgaggaactggtactcttaggccacgcgcttgggataccccagccacctctgtcctcttgcagctcccaggcccttcaacttatgggttgccttagacagctgcatagtgggttgttcttgtatcagggtcttctgcaggctttggcggggatttctcccgagctggcccctaccctggacaccctgcagctagatacaacagacttcgctatcaacatctggcagcagatggaggatctgggtatggccccagccgtgcctccaacccaggggactatgcctgcttttacaagcgctttccagagacgggccggaggcgtgctagttgcctccaacctgcagtctttcctcgagcttgcctaccgcgcactgagacacttcgccaaacct

SEQ ID NO: 248893 - DNA, 525 bp, Artificial Sequence
  derived and/or modified sequence
atggcaccgctgggtccaacgggcccacttcctcagtcgttcttgcttaagtgcctggaacagatgcggaaagtccaagcagacggaaccgcactgcaggaaacgctttgcgctacccatcaactgtgtcaccctgaagaacttgtcctccttggccatgcactcggtattcctcaacctcccctctcgagctgcagcagccaggctttgcaactgatgggttgccttaggcagttgcatagcgggctgtttctgtaccagggcctccttcaagccctggcgggaatctccccggaacttgcccccactctcgatactctgcagcttgatacgacggatttcgcgatcaatatctggcaacagatggaggatctgggtatggcaccagctgtccctcccactcaagggaccatgcctgcatttacctcggcctttcaacgtagggcgggaggcgtgctcgtggcatcaaatctccagagcttcctggagcttgcatacagagcccttcgccacttcgccaagccg

SEQ ID NO: 248894 - DNA, 525 bp, Artificial Sequence
  derived and/or modified sequence
atggcaccccttggacctacgggtccacttccacagtctttcttgctgaagtgtctcgaacagatgcgcaaggtgcaggcagatggcactgccctgcaagaaactctgtgtgcaacccaccaactctgccatcccgaagaacttgtcctccttggacacgcactgggaatcccacagcctcctctcagctcctgctcctcccaggcacttcagcttatgggttgcctcagacagcttcattcagggctctttctgtatcaaggccttcttcaagctctggcaggcatcagccctgagctggcacctaccctggatactcttcagctggatactaccgattttgcgattaacatatggcagcaaatggaagatctgggtatggctcccgcagtcccacctacccaaggtacgatgcctgcatttacttcggcctttcaaaggcgtgcaggtggcgtcctcgtcgccagcaaccttcaatcattccttgagttggcatacagagcgcttagacattttgcaaaacct

SEQ ID NO: 248895 - DNA, 525 bp, Artificial Sequence
  derived and/or modified sequence
atggcccctctggggccaactggcccactgccacagtcgttcctcctgaaatgcctggaacagatgaggaaggtgcaggcggatggtaccgcactgcaggaaaccctgtgtgcaacgcaccagctctgccaccccgaagagttggtgctcctcggacatgcgctcggaataccccaaccgcccctctcatcatgctcaagccaagcacttcagctgatgggatgcctcagacaactccactccggactgttcctgtaccagggccttttgcaagcactcgcgggtatctctcctgaattggctccaactctggacactctgcagttggatactaccgactttgccatcaacatttggcaacagatggaggacctcgggatggcgccggccgtcccgccgacccaaggaaccatgccggccttcacttctgccttccagagacgggccggtggcgtgctggtagcttcgaatctgcagtcgtttctggagctggcctaccgagcgctgcggcatttcgccaagccg

SEQ ID NO: 248896 - DNA, 525 bp, Artificial Sequence
  derived and/or modified sequence
atggcccccctgggccctaccgggcccctgccgcagtcattcctgctgaagtgtctggagcagatgagaaaagtgcaggccgatgggaccgcgctgcaagagaccctctgcgccacccaccagctgtgccatcccgaggagttggtgttgctcggccatgctctgggcataccacagccaccgctgtcatcttgctcttcgcaagctctccaacttatggggtgtttgagacagttacacagtggcctgtttttgtaccagggactgctccaggccttggctggaattagccccgagcttgctcctacccttgacacactccagctggacactacagactttgcgattaacatttggcaacagatggaggacctgggcatggcacccgcagtaccccccactcaaggaacgatgcccgccttcacctccgcattccagcgtcgggccgggggggtccttgtagctagcaatctccaatcgttcctagagctcgcatatcgggctctccgccattttgcaaagccc

SEQ ID NO: 248897 - DNA, 525 bp, Artificial Sequence
  derived and/or modified sequence
atggcaccgctcgggcctactggccccctgccccaaagtttcctcctgaagtgcctagaacagatgagaaaagtgcaggccgatggcaccgcactgcaggagaccctgtgtgctacccaccagctctgccatcctgaagagcttgtcctgttgggccatgccttaggcataccgcagccaccgctgagttcgtgcagtagccaggctttacagctgatggggtgcctgcgacaactgcactcgggacttttcctgtaccaagggctcctccaggcactggctgggatctcccccgagttggccccgaccctggatactctgcagctcgacactactgactttgctataaatatttggcagcagatggaagatcttggtatggcaccagcagtaccgcccactcaaggtactatgcctgccttcacatccgccttccagagacgagctggtggagtcttagtggccagcaacctgcagtcgtttctggaattggcctatagggcgctgaggcattttgccaagccc

SEQ ID NO: 248898 - DNA, 525 bp, Artificial Sequence
  derived and/or modified sequence
atggcccccctgggacccactggtccactgccgcaatcctttctcctcaagtgcctcgaacaaatgcgcaaggttcaagcggatggaacggcgttgcaggaaaccctgtgcgccacccatcagctctgtcaccccgaagaactggtcttgcttgggcatgctcttggtatcccccaacctcctctctcgtcatgctcgagccaggcactgcagctcatgggatgcttgcggcaactgcattccggcttgttcctgtaccagggcctgctgcaggcccttgcaggcatcagcccggaattggcccctacgcttgacaccctgcaacttgacaccaccgactttgcgatcaacatctggcagcagatggaggacctgggcatggcgccagctgtgccaccaactcaaggtaccatgcctgccttcacctcggccttccagcgacgggcgggaggagtcctggtcgcatctaatctgcaatcgttcctcgaactggcctaccgggcccttcgccacttcgctaagcca

SEQ ID NO: 248899 - DNA, 525 bp, Artificial Sequence
  derived and/or modified sequence
atggcgcctctcggtccgactggcccgttgccgcaatccttccttttgaagtgcctcgaacaaatgcgcaaagtgcaggctgatggtactgccctccaggaaaccctgtgcgctacccaccagctgtgtcacccggaggaactggtccttctcggccacgccctggggatcccgcaaccaccgctgtcgtcctgctcgtcgcaagccctgcagctgatggggtgccttaggcaattgcattccggcctcttcctctaccagggattgctgcaggcattggcgggaatctcaccagaactggcaccgactctcgataccttgcagctggacactacggacttcgcgatcaatatctggcaacagatggaggacctcggaatggcccctgccgttcctccaactcagggaaccatgccggcattcacgtcagcttttcagagacgggcgggaggggtgctggtggcgtcaaatctgcagtcgttcctggaactggcatacagagccctgcgccacttcgcgaagccc

SEQ ID NO: 248900 - DNA, 525 bp, Artificial Sequence
  derived and/or modified sequence
atggcgccgctgggaccgactggtccactcccacagtcgttcctgctgaaatgcctggagcagatgcgcaaagtgcaggctgacggaacggcgcttcaggaaactctgtgcgccacgcaccaactttgccatccagaagagctggtcctgctcgggcacgccctgggcatcccgcagcccccgctctcgtcctgttcctcccaagctcttcaactgatggggtgtctgcgccaactccattcgggactttttctgtaccaaggactcctccaggcgctggccgggatctctcccgaactggcccctactctcgatacgctgcagctggacactacggacttcgccatcaacatctggcagcaaatggaagatctcggcatggccccagcggtcccaccgactcagggtaccatgccggctttcacctcagcgttccagcgccgcgccggtggcgtcctcgtggcgtccaatctgcagtcattcttggagctggcttacagggccctccggcacttcgccaagcca

SEQ ID NO: 248901 - DNA, 525 bp, Artificial Sequence
  derived and/or modified sequence
atggccccacttggcccgacaggtcccctaccgcagagcttcctgctaaagtgcctggagcagatgcgcaaagtgcaggcggatggcaccgccctgcaggaaacgttgtgtgccacacaccaactctgccatcctgaagaactagtactgttgggtcatgcgctagggatcccacagccacctctttcttcctgcagcagtcaggccttacagctgatgggttgtctgcgacagctacatagcggcttgttcctgtatcagggactcttacaggccctggccgggatttctcctgagttggccccaacactggataccctgcagttagatactaccgacttcgccataaatatctggcagcagatggaagacctaggaatggcccccgccgtgccgccgactcaggggacgatgcccgcctttacaagcgcctttcagcgacgcgcgggcggtgtcctagtggcgtctaacctgcagtccttcttggaactggcgtatcgagcgttgcggcactttgctaagccg

SEQ ID NO: 248902 - DNA, 525 bp, Artificial Sequence
  derived and/or modified sequence
atggctccgcttgggcctactggacccctgcctcaatctttcctcctgaagtgtcttgaacagatgagaaaggtccaggcggatggaacagccctgcaggagaccctgtgcgctacccaccagctgtgccatcctgaggagctggtgctcctgggccacgctctgggaattccacaaccgcctctgagctcttgttcttcacaggcattacagctgatgggatgtcttaggcagctccactcgggattattcctgtaccagggtcttctgcaagccctggccggcatatctccggagctggcccccacactagacacccttcaacttgacacgaccgatttcgccatcaatatttggcagcagatggaagatctgggaatggccccggcggtgcccccaacccaggggacgatgccagcctttaccagtgcttttcagaggcgcgcagggggagtcctcgtagccagcaacttgcagagctttctggaactggcctacagggcccttaggcactttgccaagccc

SEQ ID NO: 248903 - DNA, 525 bp, Artificial Sequence
  derived and/or modified sequence
atggcccccttgggccccactggccccctgcctcagtcgttcctgttaaagtgtctggagcagatgcggaaagtgcaagccgatggaacagctttgcaggaaaccctctgcgcaactcaccagctgtgccatccagaggaactggtcctgctagggcatgccctggggatacctcagccccctctctcctcttgtagttcccaggccctgcagctgatgggctgcctgcggcagttgcacagtggtctgttcttataccagggactgctgcaggccttggccggaatcagcccagagctggcccccacactagatacccttcagttagatacgacggacttcgcaattaacatctggcagcagatggaggacctgggtatggctccagccgttccacccacacagggcaccatgccggcttttactagcgccttccagagacgcgctggaggggtgttagttgcatcgaacctacaatcttttctggagctcgcatatcgggcgcttcgccattttgcgaagccg

SEQ ID NO: 248904 - DNA, 525 bp, Artificial Sequence
  derived and/or modified sequence
atggccccactgggaccgacggggccgcttccacagtcctttctgctcaagtgcctcgagcagatgcggaaagtgcaggcggatggaactgcattgcaggaaaccctctgcgctactcatcagctgtgccaccccgaagaactggtgctgctcggccacgcccttggaatcccacagcctccgttgagctcgtgttcctcccaggctctgcaacttatgggctgcctccgccaactgcactcaggactgttcctgtaccaagggctgctgcaagcactggctggaatttcgcctgaactggcaccgactttggataccctccagctcgacaccactgacttcgcgatcaatatctggcaacagatggaggacctcggcatggcaccggccgtcccaccgactcaaggaaccatgcctgccttcacctcggccttccagcggagagcgggtggtgtcctggtggcgagcaacctgcagtcatttctggagctcgcgtacagggccttgcgccatttcgccaagccc

SEQ ID NO: 248905 - DNA, 525 bp, Artificial Sequence
  derived and/or modified sequence
atggctcccctgggaccaaccggccccctaccccagtcctttttgcttaaatgcctcgaacagatgcgcaaagttcaggcggatgggactgcacttcaggaaacgctgtgcgccacccatcagctctgccatcctgaggaactcgtcttattgggacacgccctcgggatcccccagccaccattaagcagttgcagttcgcaggccttacagctgatgggctgtctcagacagctccatagcggattgttcctataccaggggctgttacaagcccttgctggaatctctcctgagttggcgccaaccctggatacattgcagctggatacgacagacttcgcgatcaatatttggcagcagatggaggacttagggatggcccctgccgttcctcccacccagggaacaatgcccgcgttcacatcggctttccagcgtcgggccggaggagtattggtagcttcgaacctccaatcttttttagagctcgcatacagggcgctgcgacatttcgctaaaccg

SEQ ID NO: 248906 - DNA, 525 bp, Artificial Sequence
  derived and/or modified sequence
atggcaccattgggacctacaggacccctcccccaatcttttctccttaaatgcctcgagcagatgcgcaaggtgcaggccgacggcaccgccctccaggaaaccctgtgtgctacacaccagctgtgccatccagaggaactagtgttgctgggacacgctttggggattccgcaaccccccctcagctcctgtagtagccaggctctgcagctgatggggtgcctgaggcagttgcattccgggttgtttctttaccaggggctgttgcaagcactggccgggatctcccctgagctcgctcccaccctcgatactcttcagctcgacacaactgattttgccattaatatttggcagcagatggaagatttgggaatggctccggccgtcccaccaactcaagggacaatgccggcatttacgtctgctttccagaggagggcgggaggagtcttggtggcctctaacctgcagtcatttctcgagttagcctatcgggctctgcggcactttgccaagcct

SEQ ID NO: 248907 - DNA, 525 bp, Artificial Sequence
  derived and/or modified sequence
atggctcctctgggacccaccggacctttgccacaatcttttcttctgaagtgtctagaacagatgcgaaaagtccaggctgatggcaccgctctgcaggaaaccctttgcgctacacaccagctgtgtcaccctgaggagctggttctgctgggccatgccctgggcatcccccagcccccgctatcctcctgcagctctcaggccctacagctgatggggtgtctgaggcagcttcacagcgggctttttctgtaccaggggttactccaggcactggcaggaatcagtcccgaattggcacccactctggatacactgcagctcgatacaacggactttgccatcaacatctggcagcagatggaggatctcggcatggctccagccgtgccccccacgcagggcaccatgcctgccttcactagcgcatttcagaggcgagctggtggggtgttggtggcgagcaatttgcagtcatttctagagctggcctacagggcactgcgacactttgctaagcca

SEQ ID NO: 248908 - DNA, 525 bp, Artificial Sequence
  derived and/or modified sequence
atggcacccttgggcccaacaggacctctaccccagtcgttcctcctgaaatgcttagagcagatgcggaaggttcaagccgacggtacagcgctgcaagagacgctgtgcgcaacccaccagctgtgtcaccccgaggaactggtgttgctcggacacgccctgggcatacctcagccacccctctcatcctgctcgtctcaagcgctccagttgatgggctgcctgagacagctgcattctggcttattcctgtaccagggacttcttcaggccctggcaggcatatccccagagctggctccaactttagatacactccagttggacacgaccgactttgctattaacatatggcagcagatggaggatctaggtatggcccccgccgtcccccctacccaggggaccatgccggctttcacgtccgcttttcaacggcgcgccggaggcgttctggtggcctctaacctgcagtcctttctcgaactggcctaccgtgcactgaggcactttgctaaacca

SEQ ID NO: 248909 - DNA, 525 bp, Artificial Sequence
  derived and/or modified sequence
atggctcctttaggacctacaggaccactgcctcaatcttttctgctgaagtgtttggagcagatgagaaaagtccaggcagacggtaccgctttgcaagaaaccctgtgcgcaacccatcagttgtgtcatcctgaggaacttgttctccttgggcacgccctgggcatcccgcagccacccttatccagttgctcttcgcaggccctgcagttaatgggatgtctcaggcaacttcatagcggcctgtttttatatcagggactgctgcaggctctggcaggtatatctcctgaactggcccctaccctggacactttgcagctggataccacagacttcgcaataaacatctggcaacaaatggaggacctgggaatggcacccgctgtcccacctacacagggaacgatgccggcgttcacatctgcattccaaagacgggccggcggcgtgctggtggcgtcaaatcttcagagcttcctcgaattggcctacagagctctcaggcactttgccaaaccc

SEQ ID NO: 248910 - DNA, 525 bp, Artificial Sequence
  derived and/or modified sequence
atggcacccctgggtcctaccggacctctccctcaaagtttcttgttgaaatgtcttgaacagatgcggaaagtgcaggccgacgggaccgccctccaggaaaccttgtgtgccactcatcagctctgtcaccccgaagagctggtgctcctcgggcatgctctcggcattccacagcccccccttagcagctgcagctcccaggccctccagttaatgggttgtctcagacagctccactctggactatttctataccaggggttgcttcaggccctggcaggcatatcgcccgagttagccccgacgctggacactttacagttggataccactgactttgccatcaatatatggcagcaaatggaggatctcggaatggccccggccgtgccacctacgcaaggcactatgcccgctttcacatccgccttccaacgccgtgccgggggggtgttagtagcatcaaacctgcagtcctttttggagctagcttatcgggccttgcgtcacttcgctaagccg

SEQ ID NO: 248911 - DNA, 525 bp, Artificial Sequence
  derived and/or modified sequence
atggccccactcggaccgactggcccgcttcctcagtcctttctccttaaatgtctcgagcagatgcggaaggtccaggcggatggtacggcgctgcaagaaaccctgtgtgcgacccatcaactttgtcatcctgaggaactggtgctcctggggcatgccttgggaattcctcagcccccactgagttcgtgctcctcccaagccctgcaactcatggggtgtttgagacagctccactctggtcttttcttgtaccagggactccttcaagcccttgccggtatctcgccggaacttgcacctactctcgacactctgcaactggacaccactgatttcgcaattaacatctggcagcaaatggaggatctcggaatggcacctgccgtcccacccacccaaggaacgatgccggcatttacctcggcatttcagcgacgcgcaggcggcgtgcttgttgcttctaatctgcagagctttcttgaactggcgtaccgtgcattgcgacatttcgcgaagccg

SEQ ID NO: 248912 - DNA, 525 bp, Artificial Sequence
  derived and/or modified sequence
atggctcccctggggcctaccggaccgcttccacagagctttttattgaaatgtctggagcagatgaggaaggtgcaggccgacggaactgccctgcaggaaacactgtgcgctacacaccagctgtgccacccagaagagctggttcttctggggcacgcccttggcattcctcagcctccactcagttcctgtagcagccaggctctgcagcttatggggtgtctgcggcagcttcattctggtctatttctctaccagggcctccttcaggctcttgccggtatcagtcccgaattagcccccaccctcgatacattacaacttgatacaactgacttcgcaattaacatatggcagcagatggaagatcttggaatggctccagcagtgccacctacacaaggtaccatgcccgcttttacctctgcctttcagcgcagagccgggggcgtccttgtggcctccaacctgcaatcctttttggaattggcctatcgggcgttaagacatttcgctaagccc

SEQ ID NO: 248913 - DNA, 525 bp, Artificial Sequence
  derived and/or modified sequence
atggcgcctcttggaccgaccggaccgctgccgcaatcatttctcctcaagtgcctcgaacagatgagaaaagtgcaggccgacggaactgctctccaagaaaccctgtgcgcgacgcatcagctctgccacccagaagagctggtgctgctgggccacgctctcggaatcccgcagccgccactctcctcgtgctcgtcgcaagccctgcagctcatgggatgcttgcgccagctgcacagcggactgtttctctaccagggactcctgcaagcgctggctggcatctccccggaactggcgccgaccctcgacaccctgcaactcgacactactgatttcgccatcaatatctggcaacagatggaggacctgggaatggcgccagccgtcccacctacccaggggactatgccggctttcacctcggccttccagcggcgggcaggaggagtgcttgtggcgagtaacctgcaatcattcctggagctggcataccgggctctgcgacacttcgcgaagccg

SEQ ID NO: 248914 - DNA, 525 bp, Artificial Sequence
  derived and/or modified sequence
atggcgcccttaggtcccaccggccctctgcctcagagctttctcttaaagtgcctggaacagatgcgaaaggtgcaagcagatggaacagccttgcaggaaactttatgtgccacgcaccagttatgtcatcccgaagagctggtgttgttaggccatgctcttggaatcccccagcccccgctaagttcatgttctagtcaggccctgcagcttatgggctgcctgaggcagctgcatagtggactgttcctctatcagggactcttgcaggctctcgcgggaattagtccagagctcgcccctactctggatactttgcagctggacactactgacttcgccattaacatttggcaacaaatggaggatcttggaatggcgcccgccgtaccaccgacacaaggcaccatgccagccttcacgagtgctttccagcggcgtgccggcggagttctggttgcctctaacctccagtccttcctggagctggcgtatagagctttgcgtcacttcgcaaagcct

SEQ ID NO: 248915 - DNA, 525 bp, Artificial Sequence
  derived and/or modified sequence
atggcgccgttgggccctactggacctctgcctcaatcctttctgctgaagtgcttggagcaaatgagaaaggtccaggctgacgggaccgctttgcaggaaacattgtgtgccacccaccaactctgtcatccagaagagctagtactgttaggtcatgcactgggtataccacagcccccactgtctagttgtagtagccaggcgcttcagctgatgggctgtcttaggcagctccacagcgggctcttcttgtaccagggcctacttcaggcgttggctgggatcagccctgaattggcaccaaccttggatactctgcagctggatactactgactttgccataaacatctggcagcagatggaagacttaggtatggcaccagcagtcccacctacacaaggaaccatgcccgcttttaccagcgcttttcagaggcgagcgggaggggtccttgtagcatctaatttgcagagtttccttgaattagcttaccgggcgttgagacacttcgccaagccg

SEQ ID NO: 248916 - DNA, 525 bp, Artificial Sequence
  derived and/or modified sequence
atggcccctctgggccctacaggacccctcccgcagtcctttcttctgaaatgcctcgaacagatgagaaaagttcaggctgacgggacagccctccaggagaccttgtgcgccacccaccagctgtgtcatccagaggagcttgtcctgcttggtcacgcgctgggaattcctcagccacctctgtcctcatgcagctcccaggctcttcaactgatggggtgtcttagacagcttcattccggactgtttttgtatcaaggattactgcaggcactcgccggaatctctccggagttggctccgacacttgataccctgcaacttgacacaaccgacttcgctatcaatatttggcaacagatggaggacttgggcatggcccctgcagtgcctcctacccaaggtacaatgccagcatttacaagtgcatttcagagaagagctggaggagtactcgtcgcaagcaaccttcagtccttcctcgaactggcatacagggctctgaggcatttcgcaaaacct

SEQ ID NO: 248917 - DNA, 525 bp, Artificial Sequence
  derived and/or modified sequence
atggctcctctgggacctactggacctcttccacagtcgtttctcctgaaatgcctggagcaaatgcggaaagtgcaagcggacggtaccgcccttcaagaaaccctgtgtgccacgcatcagctgtgtcatcccgaagaattggtcctgcttggacatgcactcggtattcctcaacctccacttagctcatgcagcagccaggccctgcaactcatggggtgccttcggcagctgcatagcggtctgtttctgtaccaaggtcttttgcaggcacttgctggcatttcgcctgagcttgccccgactctggacactcttcagctggacaccaccgattttgcgattaacatctggcaacagatggaggatcttggaatggctccagcagtcccaccaactcagggcactatgcccgcctttacttccgcgtttcagcggcgagcagggggagtgttggttgcgagcaatctgcaatcatttcttgaactggcgtaccgtgcactccgtcacttcgccaagccc

SEQ ID NO: 248918 - DNA, 525 bp, Artificial Sequence
  derived and/or modified sequence
atggccccactcggcccgactggaccgctgccgcagagctttctgctgaagtgcctcgagcagatgcgaaaagtgcaagccgacggaactgcattgcaggaaactctgtgcgcaacccaccagctttgtcatccagaagaacttgttctgctgggacatgctctggggatcccgcagccacccctctcgtcatgctcgtctcaggcactgcagttgatgggatgcctcagacagctccactccggactgttcctgtatcaggggttgctgcaggctctggccggcattagcccagagctcgcgccgaccctcgacacgctgcaactcgacactacggatttcgctatcaatatctggcagcagatggaagatctcgggatggctccggcggtccctccgacccaaggaaccatgccagctttcaccagtgcgttccaacgtcgggcgggtggcgtgctggtggccagcaacctccagtcgttcctcgagctggcgtaccgcgccctgcggcattttgcaaagccg

SEQ ID NO: 248919 - DNA, 525 bp, Artificial Sequence
  derived and/or modified sequence
atggctccacttggcccgaccggaccgctgccgcagtccttcctgctgaaatgccttgaacaaatgagaaaggtgcaggcggatggcactgccctccaggagactctgtgtgcaacccaccaattgtgccacccggaggaacttgtcctccttggacatgcactgggaatcccgcagccaccgctctcttcatgctcgagtcaggccttgcagttgatgggatgtctgcgacagctccactcaggactgttcctgtaccagggtctgctgcaggcgttggctggaatttcgccagaactcgcacctacgctggatacgctccagctggatactaccgatttcgcgatcaacatttggcagcagatggaggacttggggatggcgccagcggtccctccgactcaggggaccatgccggcattcacgtccgccttccagcgcagagctggaggggtgctggtggcctcaaatctgcaatcgtttcttgaactggcctaccgggccctgcggcattttgccaaacca

SEQ ID NO: 248920 - DNA, 525 bp, Artificial Sequence
  derived and/or modified sequence
atggcacctctcggacccactggacccctgccacagagctttctcctgaaatgtcttgaacaaatgcgcaaggtgcaggcagatggaaccgcactccaggagactctttgtgctacccaccagctttgccacccagaagaactggtgctgcttgggcatgcgctcggcatcccacaaccgccccttagttcatgttcgagccaagcactccagctgatgggatgccttcggcagcttcattcgggcctctttttgtaccagggcctcctccaggcactggccggcatttctccagaactggcgcctacccttgatactctgcaattggacactaccgactttgccattaacatctggcaacaaatggaggatctgggaatggcccctgcagtgccccctacccaaggaacgatgcctgcattcacctcggccttccagcgaagggcaggtggagttctggtagcatcaaatcttcaatcatttctggagcttgcctatagggctcttagacatttcgcaaagcct

SEQ ID NO: 248921 - DNA, 525 bp, Artificial Sequence
  derived and/or modified sequence
atggccccactcggaccgactggaccactcccgcaatcgttcctcctcaagtgccttgaacagatgagaaaagtccaagcggacggcactgctctgcaggagactctctgcgcgactcatcaactgtgccatcctgaggaactggtgctgctgggccatgccttggggatcccgcagccgcctttgtcctcatgctcatcgcaagctctgcaactcatgggctgcctgagacagcttcacagcggcctttttctctatcagggactgctgcaagcgctcgctggaatctcgccggagctggccccaacgctggataccctgcagctggataccaccgattttgccatcaatatctggcagcagatggaggacctgggaatggcgccagccgtcccgccgacccagggtactatgccggccttcactagcgctttccagagaagggcaggaggggtcctggtggcatcaaacctgcagtcgttccttgaactcgcctaccgcgccctgagacacttcgccaaaccg

SEQ ID NO: 248922 - DNA, 525 bp, Artificial Sequence
  derived and/or modified sequence
atggctccgcttggacccaccggccctctgcctcagtctttcctgctgaagtgcctggaacagatgcggaaggtccaggcagacggcaccgctctgcaagagacactctgtgccacgcaccaactctgccatccagaggagctcgtgcttctgggccatgcattgggaattcctcaaccacctctctctagctgtagttcacaggccctgcagttgatggggtgtctgcgccaactgcactctgggctgtttctgtaccagggacttcttcaggccctggccggcatatccccagaactggctccaacacttgatacgttgcagctggacactaccgatttcgctatcaatatctggcagcaaatggaggaccttgggatggcccctgcggtgccgccaacccagggaacaatgcccgccttcacctccgcttttcaacgcagggctggcggtgttttggtggcatctaatctgcagtccttcctggaactggcttatcgggccttgagacatttcgcaaagcct

SEQ ID NO: 248923 - DNA, 525 bp, Artificial Sequence
  derived and/or modified sequence
atggcgccccttgggcctaccggtcctctcccccagtcttttctgctgaaatgtctcgagcaaatgaggaaagtgcaagctgacggtaccgcattgcaggagaccctgtgtgctactcatcagctctgccaccctgaggaacttgtgctgctgggacatgctctgggaataccacaaccgcctctgagttcatgctcaagccaggctttgcagctcatgggctgcctgaggcagctgcatagcggcttgttcctataccagggtctactgcaggccctcgcaggaatttcccccgaactcgctcctactctcgatactctccagttggataccactgatttcgcaatcaacatttggcagcagatggaagatctggggatggcgcccgccgttccgccgacacagggaactatgccggctttcacttccgcttttcaaagaagggccggtggtgtgctcgtagccagcaaccttcagagctttctagaactcgcatatcgagctcttcgacactttgccaaaccc

SEQ ID NO: 248924 - DNA, 525 bp, Artificial Sequence
  derived and/or modified sequence
atggcgcccctcggtccgactggtccccttccacaatccttcctccttaagtgccttgagcaaatgagaaaagtacaagcggatggcactgctttgcaagaaaccctgtgcgctacccatcaactttgtcacccagaagagcttgtgctgctgggccatgctctcgggatccctcaacccccactgagctcctgctcctcgcaagcgcttcaactcatgggttgtttgagacagctgcactccgggctgtttctgtaccaaggccttctccaggcactggcaggcatttcacctgagttggcaccaactctggatactctgcagctcgataccaccgacttcgcgatcaacatttggcaacagatggaggaccttggtatggcccctgccgtgccgccaacgcagggaaccatgcccgcctttacctcggcctttcagcgacgcgccgggggcgtcctggtggcatcaaatctgcagtcttttcttgaacttgcatacagggcactccgtcattttgcaaagcca

SEQ ID NO: 248925 - DNA, 525 bp, Artificial Sequence
  derived and/or modified sequence
atggctccccttggacctacaggacccctgcctcagagcttcctgctgaagtgcctggagcagatgaggaaagtccaggcagatggtactgctctccaagaaactctgtgcgctacacaccagctgtgtcaccccgaggaactggtactcctcggacacgctttgggtattccccagccacccctttccagctgtagctcacaggcattgcagctcatgggttgcctcagacaactgcatagcggcttgttcctctaccagggcctcctgcaagctttggcaggaatatcccctgagttggccccaactcttgatactctgcagctcgacacaaccgactttgctatcaacatttggcagcagatggaagacctgggcatggctcccgcggtgccaccgacacaaggaaccatgcccgccttcactagcgctttccagagaagagccggcggcgtgctggtggcgtctaacctgcaatcttttctggagctggcttacagagcactccgccatttcgcgaagcct

SEQ ID NO: 248926 - DNA, 525 bp, Artificial Sequence
  derived and/or modified sequence
atggcgccgctaggcccaaccggaccgctgccccagagttttttgctgaaatgcctggagcagatgcgtaaggtgcaggccgacggcaccgcgctgcaggagacactgtgcgcaacgcatcaactatgccaccccgaggaactggtgctgctgggacacgcactcggcataccccagccaccgctgagcagctgtagcagtcaggctctgcagctgatgggctgccttcggcaactgcactcaggactgtttctgtatcagggactgctgcaagctctggccggcatatccccggagctcgctcctactttggacacgctgcaactcgacaccactgactttgcaatcaacatctggcagcaaatggaggacctggggatggccccggctgtgccacccacgcaagggaccatgccggcattcacaagtgcctttcagcgacgcgccggaggcgtcttggtagctagtaatttgcaaagcttcctagagctagcctaccgtgcactgcgacatttcgccaagcct

SEQ ID NO: 248927 - DNA, 525 bp, Artificial Sequence
  derived and/or modified sequence
atggcgccactgggcccaaccggccccctgccacagagcttccttctcaagtgcctggaacagatgcgtaaggtgcaagcagacggaaccgccctgcaggaaaccctgtgtgccactcatcagctgtgccaccccgaagagctcgtccttctcgggcatgcactgggcatcccccagcccccactgtcgtcgtgctcatcccaggcactccagctgatgggctgcctgcggcaacttcactcgggtctgttcctctaccaagggctcctgcaagctctggcaggcatcagcccggaacttgccccgacgctggatactttgcaattggataccacggactttgccataaacatctggcagcagatggaggacctcggaatggctccggcagtcccccctactcaagggaccatgcctgcgttcaccagcgcttttcagcgccgcgctggaggagtgctcgtcgcctctaacctccagtccttcttggagctggcgtacagggccttgcggcatttcgccaaaccg

SEQ ID NO: 248928 - DNA, 525 bp, Artificial Sequence
  derived and/or modified sequence
atggctccgctagggcctactgggccccttccacagtcattccttctgaaatgtttagagcagatgaggaaagtacaggctgatgggactgccctccaggagactctgtgtgccactcaccaactgtgtcatcctgaggagctcgtgctcctcgggcatgcactagggatacctcagcccccgctgtcttcttgttcatcccaggctctgcaactgatggggtgcctgcgacagctgcactctggactcttcttgtaccaggggctacttcaggccttggctggaatctcacccgaactcgctccaactcttgacacacttcagctcgatactactgactttgctatcaacatatggcagcagatggaagacctagggatggctcctgctgtgccccccacacagggaacaatgccagcctttactagtgctttccagaggcgagctgggggagtcttagttgcaagtaatctccagtcatttcttgaactcgcttatagggcattgcgacatttcgctaaaccc

SEQ ID NO: 248929 - DNA, 525 bp, Artificial Sequence
  derived and/or modified sequence
atggctcctttaggccctactggtccactgccacagtctttccttctaaagtgtcttgaacaaatgagaaaagttcaagctgatgggaccgcgcttcaagaaaccctttgtgctacccatcaactgtgccatcctgaggagcttgtgttacttgggcatgctttaggaatccctcaacctcccttatcctcttgctcatctcaagcattacagcttatgggatgtttaagacagcttcattcaggcctattcctttatcagggattgcttcaagcattggcgggaatatcgccagaattggccccgacactcgacaccttacaattggatacgaccgacttcgctattaatatctggcaacagatggaagatctcggcatggcacctgccgtaccccctactcagggtacgatgcctgcattcacctctgctttccaacggagagcaggtggtgtgcttgttgcgtcaaatctacagtcctttcttgaacttgcatacagagccctcaggcatttcgccaaacca

SEQ ID NO: 248930 - DNA, 525 bp, Artificial Sequence
  derived and/or modified sequence
atggcacctctgggacctaccggacccctgccacagtcgttcctgctgaagtgccttgaacaaatgagaaaggtgcaggcagacggcaccgcactgcaggaaactttgtgtgcaactcatcaactgtgccacccagaggagctggtgctgcttggccacgcccttggaattccacaacctccactctcatcttgctcaagccaagctctgcaacttatgggttgtctcagacaacttcactcgggactgtttctgtaccagggtctgcttcaagccctggcaggaatctcgcctgagttggccccgactcttgacacccttcagctcgacactacggatttcgcgattaacatttggcaacaaatggaagatctgggcatggcaccggccgtgccccctactcagggtaccatgccagcattcacttcagcatttcagaggcgggcaggcggagtcctggtcgcaagcaatcttcagtcctttctcgaactggcatacagagcactgcgacatttcgcgaaaccg

SEQ ID NO: 248931 - DNA, 525 bp, Artificial Sequence
  derived and/or modified sequence
atggcgcccctcggaccgaccggcccgcttccgcagagcttcctgctgaagtgccttgaacaaatgcgcaaagtccaggccgatggcaccgccctgcaagaaaccctgtgcgcaacccaccagctgtgtcatccggaggaactggtccttctgggtcacgccctgggtatcccccaaccacctctgtcctcctgctcatcacaggccctgcagctcatgggctgtctgagacagctgcattcaggcctcttcttgtaccaaggcttgctgcaagcactcgctggcatcagcccagagctggcaccgacgttggacactctccagctggataccactgatttcgctatcaacatctggcagcagatggaggacctcggcatggcaccggcggtgccaccgacgcaggggactatgccggccttcacctcagctttccaacgccgcgcgggaggagtgctcgtcgcgtcaaacctccagtccttcctggagctcgcttacagagcgctccggcacttcgcgaaacca

SEQ ID NO: 248932 - DNA, 525 bp, Artificial Sequence
  derived and/or modified sequence
atggctcctttaggaccgacggggccattacctcaatctttcttactgaagtgtctggaacagatgcgtaaggtacaggccgacggtaccgctctacaggaaacactgtgtgctacacatcagctgtgccacccggaagaattggtcctcctcggacacgccctggggattcctcaaccccccctatcgtcatgctcatcgcaagccctacaacttatgggttgcctgcgccagttgcacagcggtttgttcctatatcaaggcttgctgcaggcactcgccggcatatctcctgagctcgctcccactctggataccttacagttggacacaactgactttgcaataaatatctggcagcagatggaggacctgggtatggcaccagccgttccccccacgcaagggacaatgcctgctttcaccagcgcattccaaaggcgggccggcggcgtgttggtcgcgagcaacctgcagagcttcctcgaattggcctaccgggcgcttagacatttcgccaagccc

SEQ ID NO: 248933 - DNA, 525 bp, Artificial Sequence
  derived and/or modified sequence
atggcgcccctgggacccacgggtccacttccccagtcctttttgctgaaatgcttagagcagatgagaaaagttcaagccgacggaacggctctgcaggagaccctgtgtgcgactcaccaactgtgtcaccctgaagaactagtcctgctagggcatgctttgggcatcccccagccaccactgagttcctgttcctctcaagctctgcagcttatgggctgcctcaggcagctgcattccggcctttttctataccagggcctcctgcaggctcttgccggcattagcccagagttggctcccacactggatactctgcagctcgatacaacggattttgccatcaatatttggcaacaaatggaggatctcgggatggctcccgctgtgcctcccacccaggggactatgcccgcctttacctccgcctttcagaggcgcgctggaggtgttcttgtggcctctaacctccaatcctttctggaactggcgtatcgagcactgaggcactttgcgaaaccg

SEQ ID NO: 248934 - DNA, 525 bp, Artificial Sequence
  derived and/or modified sequence
atggctcccttaggtcccaccggccccctcccccagtctttcttgctcaaatgcctagaacaaatgcgaaaggttcaggcagacggaacagctttacaagagaccctctgcgctactcatcagctgtgccaccccgaggagttagtcctgctgggacacgctctggggatcccacagccacctctgtccagttgctcgtcccaggcccttcagcttatgggatgtctccgtcaactgcactccgggctctttctctaccagggtctgctccaggccctggctggcatcagccctgaactcgctccgactctagataccctccagttggacactacggacttcgccattaatatctggcagcaaatggaggatttaggcatggcgcccgcagtgccacctacccagggaacgatgcccgcttttaccagtgctttccaaagaagggccgggggagttcttgtggctagtaaccttcagagcttcctggagctcgcgtatagggccttacgacacttcgccaaaccg

SEQ ID NO: 248935 - DNA, 525 bp, Artificial Sequence
  derived and/or modified sequence
atggcaccattgggtcctacgggaccactgcctcagagcttcctcctgaagtgtctggaacagatgcggaaggttcaagcagatggaactgcactgcaggaaaccctttgtgctacccatcaactttgtcaccctgaagaactggtcctgctcggccatgctcttggaatcccgcaaccacctctgtcgtcatgtagctcacaggctctgcaactgatgggatgtctgcgacaattgcattccggtctgtttttgtaccaaggtctgcttcaagcactcgcaggtattagcccagaactcgcaccgaccctcgataccctgcaacttgatacgactgactttgcaattaacatttggcagcagatggaggatcttggaatggcccccgcagtcccaccaacccagggtaccatgccagccttcacttcagcctttcaaaggcgtgcagggggcgtcctggtggcgtccaacctgcagtcgttcctcgaacttgcataccgagcacttaggcattttgccaaacca

SEQ ID NO: 248936 - DNA, 525 bp, Artificial Sequence
  derived and/or modified sequence
atggcaccactgggacctaccggacccttaccacaaagcttcttacttaagtgcctcgaacagatgcgaaaagtccaggctgatggcactgccctgcaggagacactctgcgcgactcatcagctgtgccaccccgaagagctggtcctgttgggccacgctttgggcatccctcagcctcctctttctagttgtagctcccaggctctccagttgatgggctgtttgcggcagttgcattctgggctgttcctatatcagggactgctgcaggccttagcaggaatttccccggaacttgcccctacactggacacactccagctggataccaccgatttcgcgattaatatatggcagcaaatggaagacctggggatggctcccgctgtccccccaacgcaggggacgatgcccgcgtttacaagcgctttccagagaagggccggaggggtgctagtggcctccaacctacagtctttcctggagctggcatacagagcactgagacatttcgcaaagcct

SEQ ID NO: 248937 - DNA, 525 bp, Artificial Sequence
  derived and/or modified sequence
atggccccactcggacccaccgggcccttgccccaatccttcctactaaagtgtctagaacagatgagaaaggtgcaagcggatggcacagcactgcaggagactttgtgcgccactcatcagctctgtcatcctgaggagctagtgctgctcgggcatgcactgggtatacctcagcctccactatcttcttgttcaagccaggcgctacagctgatggggtgcttgagacaattgcatagcggcctgttcctgtatcagggcctgctgcaggccttggctggcatatcccccgaactcgcaccgaccctcgacacactgcagttggataccaccgacttcgcaatcaatatttggcagcagatggaggatcttggcatggcacctgccgtgcccccaacccaaggtacaatgcctgcctttacctcagcctttcaacggcgcgccggaggagttttggttgcctccaatctgcagtcctttctggagctcgcgtacagggccctgcggcattttgctaaacca

SEQ ID NO: 248938 - DNA, 525 bp, Artificial Sequence
  derived and/or modified sequence
atggcccccttaggacccacggggccactgccacagtcatttctcttgaagtgtttggaacagatgaggaaagtccaggccgacgggactgcactgcaggaaacactctgtgctactcaccagctctgtcaccccgaagaacttgtgcttctggggcatgccttggggatacctcagcctcctctttcctcgtgctcatctcaggcattacagctgatggggtgcctcagacagctacactccgggctgtttctctatcagggattactccaggctctcgctggaatctctcccgaactagcacccactcttgatacactccaactcgatactacagatttcgctataaatatatggcagcagatggaagatcttgggatggcacctgcggtacctcctacacaagggacaatgcctgcttttacatctgccttccagaggcgggccggaggagtcctggtggcatctaaccttcaatcattcctagaactcgcctatcgcgcactcagacactttgctaaaccc

SEQ ID NO: 248939 - DNA, 525 bp, Artificial Sequence
  derived and/or modified sequence
atggcaccattgggccccactggaccacttcctcagagcttcctgctgaagtgtctcgaacaaatgagaaaagtgcaggctgatgggactgcccttcaggaaaccctctgtgcaactcaccagctttgtcaccccgaagaactggtgcttcttggccacgctcttggtattccccagcctcctttgtcgtcttgcagctcacaggcactgcaacttatggggtgcctccgccaactgcattcagggctttttctttaccaaggtcttttgcaggcactcgcgggaataagcccagaactggcacctacgcttgatacgcttcaactggacactacggactttgcgattaacatttggcaacaaatggaggatctggggatggcacctgcagtgcctccaactcagggtactatgccggcctttacctcagctttccagcggcgggcaggaggggtcctggtcgcgtccaacctgcaaagttttctggagctcgcctacagagcccttcgacactttgcaaagcct

SEQ ID NO: 248940 - DNA, 525 bp, Artificial Sequence
  derived and/or modified sequence
atggctccactggggccaacgggtcctctcccacaatcgtttcttcttaagtgcctcgagcaaatgagaaaagtgcaagcagacggtactgcattgcaagaaactctctgtgccactcatcaactttgtcatcctgaggagttggtgcttctgggccatgcactgggtatcccccaaccacctctgtcctcctgttcatcgcaagcacttcaactgatggggtgtctccgacagctccatagcggcctttttctttaccaaggactcctgcaggcgcttgccggcatctccccggaactcgctcctaccctcgacaccctgcaattggataccaccgactttgctataaacatctggcagcaaatggaagatctgggcatggctcctgcagtgccacctacccagggaaccatgccggcatttacgtcggcattccaaaggcgtgcgggtggagtgctggtggcatctaaccttcaatcgtttctggaactggcttaccgcgcactcaggcatttcgcaaagcca

SEQ ID NO: 248941 - DNA, 525 bp, Artificial Sequence
  derived and/or modified sequence
atggcccccctgggccccaccggaccattgcctcagtcttttttactcaaatgtcttgaacagatgagaaaggtgcaagcggacggtaccgctctgcaagaaactctttgcgccactcatcaattgtgtcaccctgaggaattagtcctgcttggccacgcgttgggcatccctcagcctcccctgtcatcctgctccagccaggctctgcagctaatgggatgcctacggcagctgcattctggcctgttcctgtaccaaggcctcctccaggcattggccggaatctcaccagagctagcccccaccctggacacactacagttggatacaaccgacttcgctatcaatatctggcagcagatggaagacctcggcatggccccggcagttccgcctactcaggggacgatgcctgcttttacaagcgccttccagcggcgggcaggaggcgttctggttgcctcaaatttgcagtcttttttggaactcgcctaccgggcgcttcgccactttgcgaagcct

SEQ ID NO: 248942 - DNA, 525 bp, Artificial Sequence
  derived and/or modified sequence
atggcacctctgggaccgacgggccccctccctcagtcattcctgctgaaatgcctggagcaaatgcgcaaagtgcaagccgatggtaccgcccttcaagagacgctgtgcgcaacccatcagctctgtcaccccgaagagctggtgcttcttggtcatgccctcggaatacctcagccaccattgtccagttgttcgtcgcaagccctgcaactgatgggctgtttgagacaattgcactctgggctttttctctaccaaggcctgctccaggcgcttgcgggtatctcccccgagctggcacctactctcgatacccttcaactggataccaccgatttcgcaattaacatttggcaacaaatggaggacctcggaatggcacctgcagtccctccgactcaaggtaccatgcctgcatttacttcggcatttcagaggcgagcgggcggtgtgctggtcgcctccaacctgcagtcattcttggaactcgcgtaccgcgctctccgccactttgcaaagcct

SEQ ID NO: 248943 - DNA, 525 bp, Artificial Sequence
  derived and/or modified sequence
atggcccctttgggaccaactggtccgctgcctcagagcttccttttaaaatgcttggagcagatgaggaaagtgcaggctgacggtacagcactccaagagaccttatgcgccacgcatcaactctgccaccccgaagaattagtgctccttggtcatgccttgggaattcctcaaccgccgctatcttcgtgctcttcgcaggcgcttcagcttatgggatgcctccgccagctacattccgggctcttcctctatcaaggtttgctacaagcactggctggtatttcacccgagttggcacccaccctggataccctccagcttgatacaaccgatttcgcaatcaacatctggcaacaaatggaggacttgggcatggcgcccgcagttcccccgactcagggcacaatgccagcctttacaagcgcattccagagaagggccggcggcgtgctagttgcatccaacctccagtcgtttttggagctcgcttaccgcgcgttgaggcattttgcaaaacct

SEQ ID NO: 248944 - DNA, 525 bp, Artificial Sequence
  derived and/or modified sequence
atggctccgcttggaccaactggacccctgccgcaatctttcctgcttaaatgtcttgaacaaatgcgaaaggtccaggctgacggcacggcgctccaagaaaccctgtgcgcaacccaccaactgtgccatcctgaggaactcgtccttcttgggcacgcactgggtattccgcagccgccgctctcctcgtgctcgtcacaggctctccagttgatgggttgcctccgccagctccatagtggcctgttcctctaccagggacttctgcaggcgctggctgggatctcgccggagctcgcgccgactctcgatactttgcagctcgataccacggactttgcaatcaacatttggcagcaaatggaggacctgggaatggcacctgccgtgccgccaacgcaaggtactatgccagccttcacctcggcgttccaaagaagggccggaggggtgctggtagcttcaaatctccaatcattcctcgaattggcgtaccgcgccctgcgccactttgccaagccg

SEQ ID NO: 248945 - DNA, 525 bp, Artificial Sequence
  derived and/or modified sequence
atggcacccctgggaccaactggcccgttgcctcagagcttcctgttgaagtgcctcgagcagatgcgcaaggtccaggcagatggaactgccctgcaagaaactctctgtgcgactcaccagttgtgccatccagaagaactcgtcctgctgggacatgccttgggaatcccgcaaccacctctgtcaagctgctcaagccaagcgctccagttgatgggatgtctgcgccagctgcactcgggactgtttctctaccagggtttgctgcaggccctggccggaatcagccccgagcttgcgccaacgctcgacaccctgcaactcgacaccactgacttcgccattaacatttggcaacaaatggaggacctgggaatggcgccagctgttccacctacgcagggaaccatgccggcttttacctccgcgtttcaaagacgggcaggcggtgtgctggtggcgtccaacctgcagtccttccttgaactcgcgtaccgcgccctgcggcacttcgcgaagcct

SEQ ID NO: 248946 - DNA, 525 bp, Artificial Sequence
  derived and/or modified sequence
atggctccactggggccaactggacccctgccccagtcctttctgctcaagtgtctggagcagatgaggaaagtgcaagcggatggtaccgcattgcaggaaactctgtgtgcaactcaccagctttgtcatccagaagaacttgtcctgcttggtcacgccctgggaattcctcaacccccgcttagctcctgctcgtcgcaggcactccaactcatgggatgcctgaggcagctgcactcgggtttgttcctgtaccagggactgctgcaggcacttgccgggatctcgcccgaacttgcaccaactctcgacaccctgcaactggacactaccgatttcgcaataaacatctggcaacagatggaagatcttggaatggcaccagcggtgccccctactcagggaaccatgcccgcatttacctcggccttccagagacgagcaggtggggtgctggtggcttcaaatcttcagtcctttctcgagctggcgtacagagcccttagacattttgccaagcca

SEQ ID NO: 248947 - DNA, 525 bp, Artificial Sequence
  derived and/or modified sequence
atggcacctctggggcccaccggtccacttccccaatcctttctccttaagtgtcttgaacagatgagaaaggttcaggcagatggaactgccctccaagaaactctttgcgccacccaccagttgtgtcatcctgaagagctcgtcctgctgggccatgcactgggaatacctcagccgcccctttccagctgcagctcccaggccctgcagttgatggggtgcctgaggcagctccactccggactgttcttgtaccagggactgttgcaagcattggcaggcatttcgcccgaacttgcccccactctggataccctccaacttgatactactgactttgcgatcaatatctggcagcaaatggaggaccttggtatggcacctgcagtgcctccgacgcaaggtactatgcctgcttttactagtgcattccagcgccgggctggtggagtgcttgtggcaagcaacctgcagagctttctcgagcttgcgtaccgggcacttcgtcatttcgccaagccg

SEQ ID NO: 248948 - DNA, 525 bp, Artificial Sequence
  derived and/or modified sequence
atggccccactggggcctaccggtccactgccacagagctttcttttgaaatgtctggagcagatgcggaaggtacaggctgatggaactgccctacaagaaactctgtgcgcaacccaccagttgtgtcaccccgaggagctcgtcctcctcggtcacgccctgggtatccctcagccaccattgtcgagttgttcttcccaggctctgcagctaatgggctgcctccgacagctacattccgggctttttctctaccaggggctgcttcaggctctcgctgggatctcgcccgaattggcccccacgcttgatacattgcagctggatactaccgactttgccattaatatatggcagcaaatggaagacctggggatggccccggcggtgccccctacgcaaggcacgatgcctgcattcaccagcgctttccaacggcgcgccgggggagtgctcgtggctagtaatttgcagagtttcctggaactagcctatcgggccttgcgccatttcgcgaaaccc

SEQ ID NO: 248949 - DNA, 525 bp, Artificial Sequence
  derived and/or modified sequence
atggcacctctcggcccaaccggacctctcccccaatctttcctgctgaagtgcctcgaacagatgcgcaaggtccaagctgatggcaccgccctgcaggaaactttgtgcgcaactcatcagctctgtcaccctgaggagctggtactcctgggccatgctctgggcattccgcagcccccactgtcaagctgtagcagtcaggctcttcagctcatgggctgtttgcgccagttgcactccggactctttctgtatcaggggctgctccaggcgctggccggtatcagtccagaactcgcacccacactggacacactgcagctcgatacgaccgattttgcaattaatatctggcagcagatggaggacctgggcatggcccctgcagtaccaccgactcaaggcacaatgccggctttcaccagtgcttttcagagaagagctggaggtgtgctggtggcttcaaacctccaatcttttctcgagctggcgtaccgcgccctgcggcatttcgccaagcca

SEQ ID NO: 248950 - DNA, 525 bp, Artificial Sequence
  derived and/or modified sequence
atggctcctctgggcccaactgggcccctgccccaaagtttcctgcttaaatgcttggaacaaatgcgtaaggtacaagctgacgggactgccctgcaggagactctgtgcgccacccatcaactatgccaccccgaagaactagttctcctgggccacgcactgggtataccacagccacccctgagtagctgcagctctcaagccctacagctaatgggatgcctgcgtcagttgcatagtgggcttttcctgtatcagggcctactgcaggcactggctggcatcagccctgaacttgctcccaccctggacactctgcagctggacacaactgattttgctattaacatctggcagcagatggaagatttaggcatggctcctgccgtcccacccacccagggtacaatgccagcttttacaagcgcctttcagaggagagccggcggggttctggtggcctcaaatctgcagtcttttctagaacttgcctacagagctctgaggcacttcgctaaacca

SEQ ID NO: 248951 - DNA, 525 bp, Artificial Sequence
  derived and/or modified sequence
atggctccactcggacctactggtccacttcctcaatcgtttctgctgaagtgcctggagcagatgcgtaaggtgcaagcagacggcactgcactgcaggaaaccctttgtgcaactcatcaactgtgccacccggaagaacttgtgctgttgggacatgcactgggtattccgcaacctcccctttcgtcttgttcctctcaagctcttcaactgatgggatgtctgcggcaattgcattcagggctgtttctttaccaaggcctgcttcaggcgcttgcgggaatcagcccagagctcgcgcctactctggacacgctccaactggacaccacggattttgcaattaacatctggcagcagatggaagatctggggatggcgccagcagtgcccccaactcagggaaccatgcccgccttcaccagcgcattccaacgaagagcaggtggggtgcttgttgcctcaaatttgcaatcatttttggaactcgcataccgcgcgcttagacatttcgcaaaacct

SEQ ID NO: 248952 - DNA, 525 bp, Artificial Sequence
  derived and/or modified sequence
atggccccactgggtcccacgggtccgctgcctcagtcattccttcttaagtgcctggaacaaatgcgcaaagtgcaagccgatggtaccgcgctgcaggaaaccttgtgtgcaactcatcagctttgccacccggaggagcttgttttgctgggccacgctcttgggattcctcagccgccactgagctcatgttcgtcgcaggcactgcaacttatgggctgcctgcggcagctgcatagcggattgttcttgtaccaaggattgctccaggctctcgccggcatctcgccggaattggctcccaccttggacacgctccagctggacactaccgattttgccatcaacatctggcaacagatggaggacctgggcatggcaccagctgtgcccccgacgcagggaaccatgcctgcttttacttccgcctttcaaagacgcgcaggcggagtgctcgtcgcctccaatctgcaatccttcctcgaattggcgtaccgggcccttcgacacttcgccaagccg

SEQ ID NO: 248953 - DNA, 525 bp, Artificial Sequence
  derived and/or modified sequence
atggcaccgctaggaccgacgggcccgttgccgcaatctttccttttgaaatgccttgaacaaatgaggaaggttcaggcagacggcaccgcactacaagaaacactctgcgctacacatcaattatgccacccggaggagttggtcttgttaggtcatgctctgggtatcccgcaacctccacttagctcttgctcaagtcaagcgctccaactaatgggatgcttgagacagcttcactcaggattgttcctgtatcagggcttacttcaggccttggcgggtatctctcctgaacttgcaccgacactagatacactgcagttggatacaactgattttgcaataaacatctggcaacagatggaagatcttgggatggcacctgctgttccccctacacaaggcacgatgccggcattcacgtcagcgtttcagaggcgggcagggggagttttagtcgcaagcaacttacagtcatttcttgaattagcttatcgcgctttacggcattttgctaaaccg

SEQ ID NO: 248954 - DNA, 525 bp, Artificial Sequence
  derived and/or modified sequence
atggcccccctagggcccaccggacccttgcctcagagcttcctgctcaaatgcctcgagcagatgcgtaaagtccaggccgatgggacagctctccaggaaacactgtgcgctacacaccagctttgtcatccagaagagttggtcttgttggggcatgctctaggaatacctcagcctccattaagcagctgttcttcccaagcactccagttgatggggtgtctgaggcagctccactccggcttattcctgtaccagggtctattgcaagcactggcaggcattagccccgaactggctccaactctagatacccttcagctcgacacaactgattttgccatcaatatatggcagcagatggaggacctcgggatggccccggctgtgccacctacgcagggcacaatgcccgctttcacctctgcgttccagcgtagagccggaggggttttggtcgcttcaaacctccagtccttcctagagttggcttatcgcgcccttcggcacttcgctaagccc

SEQ ID NO: 248955 - DNA, 525 bp, Artificial Sequence
  derived and/or modified sequence
atggcacctcttggccccactggtcctttgccacaatcctttctcctcaagtgtctggaacagatgaggaaggtgcaagccgatggtaccgctcttcaggaaaccctctgtgcaactcatcaactgtgtcatccagaagaactggtgctgctcggacacgcacttggtattcctcaacctcctctctcgagctgctcgtctcaggcacttcagcttatggggtgccttcgccaactgcactcgggtctttttctctaccaaggactcctgcaagcactggcaggcatctcccccgaacttgctcccacccttgatacccttcagctggataccactgatttcgccatcaacatctggcagcagatggaggacttgggaatggcaccggcagtgccaccaactcaaggcaccatgccagcatttacctcggcattccaaagaagggcaggaggagtgcttgtcgcgtccaacctccaatccttcctcgaactcgcataccgtgcgcttcggcactttgccaagccc

SEQ ID NO: 248956 - DNA, 525 bp, Artificial Sequence
  derived and/or modified sequence
atggcgccgctgggccccaccggtccgctcccgcagtcttttctgctgaaatgtctggagcaaatgcgcaaggtgcaagcagatgggactgcgctccaggagacgctgtgtgctacccatcaactgtgccaccctgaagagctggtccttctgggtcacgcattgggaattcctcaaccgcctttgtcgtcctgtagctcccaggccctgcagctgatgggttgtctgcgccagctgcacagcggcctcttcctgtaccagggccttctccaggcgttggctggaatctctcctgagctcgcccctaccctggataccctgcagctagatacgacggatttcgctatcaatatctggcaacagatggaggacttgggcatggccccggcagttccacctacccagggtacaatgccagcattcacctcagcgtttcagcgtcgggcgggaggggttctggtcgcttcaaatctgcagtctttcctggagctcgcatacagggcgctgcgccattttgcgaagccc

SEQ ID NO: 248957 - DNA, 525 bp, Artificial Sequence
  derived and/or modified sequence
atggcgccgctcggacctaccggcccgcttccacaatcattcctgcttaagtgcttggagcaaatgcggaaggtgcaggctgatggcactgctctgcaagaaacgctgtgcgcaacccatcagctttgccatccggaggagttggtgctgctgggacatgccctcggcatccctcaaccgccgctgtcgtcatgtagctcgcaagcattgcagctgatggggtgcttgcggcaactgcactccggactgtttctgtaccagggcctccttcaagcactggcgggaattagccctgagctcgcaccaacgttggatactctccagctggacaccaccgatttcgccatcaacatctggcaacaaatggaggacctgggcatggcccctgcagtgccgccgactcaagggactatgcctgcgttcacctcggcctttcaaaggagagccggcggagtgctcgtcgccagcaaccttcagtccttcctggaactggcctaccgggccctgcgccatttcgccaagcct

SEQ ID NO: 248958 - DNA, 525 bp, Artificial Sequence
  derived and/or modified sequence
atggccccattgggccctacagggcctctgcctcagagcttccttctgaaatgtctggagcaaatgagaaaggttcaggctgacgggacggcactccaggagaccttgtgcgctacccatcagctctgccaccccgaagagctggtactgctgggccacgcccttgggatcccgcaacctcccctgagctcatgcagttctcaagctctgcagcttatgggctgcctgcgccagctgcactccgggttattcctgtaccaaggtctactgcaagccctcgcaggcatcagtccagaacttgctccaaccttggatactttgcaactcgacaccaccgattttgcgatcaacatatggcaacaaatggaggacctgggaatggctcccgccgtcccgccaacccaggggaccatgcctgcattcacatctgccttccagagacgcgctggaggagtattggtggctagcaatctgcagagcttcctcgaactggcttaccgggcactccgtcatttcgccaaacca

SEQ ID NO: 248959 - DNA, 525 bp, Artificial Sequence
  derived and/or modified sequence
atggcacccctaggtccaacaggaccactacctcagtctttcctcctgaaatgtttagagcagatgcgcaaggtgcaagctgacggtacagccctacaggagactctctgtgctacccatcagctgtgtcaccccgaagagctggtgctattagggcacgccctcggaatcccccagcctcccctttcttcctgcagttcacaggctttgcaattaatgggctgcctcagacagcttcattctgggctgttcctctaccagggactcctgcaggccctggccggaatctcaccagaactggcccctactctcgatactctccagctggatactaccgactttgccattaatatttggcaacagatggaggatctgggcatggccccggccgtccctcctacacaggggaccatgccagcattcactagcgcttttcaaaggcgggcaggaggtgtcctcgtggccagcaatctgcaaagcttcttggaattagcctacagagctttgcgtcactttgcaaagcca

SEQ ID NO: 248960 - DNA, 525 bp, Artificial Sequence
  derived and/or modified sequence
atggcgccccttggtcccactggtccccttccgcaatcgtttttgctgaaatgtcttgaacagatgcgcaaagtgcaagcagatggtaccgcgttgcaagaaaccctctgtgccactcatcaactttgtcaccctgaagagctcgtgctcctgggacatgcgctcgggattccgcagcctcccctttcgagctgctcgtcccaagctctccaactgatgggatgtctccggcagcttcattcaggactgtttctttaccaagggcttctgcaagcgctcgcagggatatctccagagcttgcgcccaccctggatactctgcaactggataccacggattttgcaattaacatctggcagcagatggaagatcttggcatggcgcctgcagtgccacctacccagggaaccatgcccgcattcaccagcgcatttcagcggagggcaggaggggtccttgtcgcatcgaacctccagtccttcctcgaactggcataccgggccctgaggcacttcgccaagcca

SEQ ID NO: 248961 - DNA, 525 bp, Artificial Sequence
  derived and/or modified sequence
atggccccgttgggaccaactggacctcttccgcaatccttcctcctcaaatgccttgaacagatgaggaaagttcaagcggatggaactgctttgcaggaaaccctgtgtgccacacatcaactatgtcatccagaagagttggttttacttggacacgctttggggattccccaaccaccactatcatcatgctccagccaggccttgcaacttatgggatgtctccggcagcttcactcggggctctttctctatcagggtcttttacaggctctggcaggaatttcgccggagctagctccaacattggatacgttgcaattggatacaactgatttcgcgattaatatttggcaacaaatggaggaccttggaatggctcctgccgtaccaccaacgcaggggacaatgccggcatttacttcagctttccagagaagagcaggtggagttcttgtggcgtctaatttgcagtcattcctggaattggcttacagagctttgcgtcatttcgctaagccg

SEQ ID NO: 248962 - DNA, 525 bp, Artificial Sequence
  derived and/or modified sequence
atggccccgctcggacccactggccccctcccacagtcatttttgttgaaatgcttggagcagatgagaaaggtgcaagcggacggaactgcactccaggaaaccctgtgcgccacccatcagctttgccaccccgaggaactggtgctgctgggccacgctctgggaatccctcaaccaccgcttagctcgtgctcgagccaggccctccagctcatgggctgtttgaggcagctgcatagtggattgttcctctaccagggtctgctgcaggccctcgcggggatctcgccggaactcgctcctaccctggataccctgcaacttgacactactgacttcgcgattaacatctggcaacaaatggaagatctggggatggccccagcagttccgccgactcagggtaccatgccagcatttacgtcagctttccagcggagagcaggaggtgtcctggtggcgtctaacctgcaatcattcttggagttggcttaccgggcactgcgacacttcgccaagccg

SEQ ID NO: 248963 - DNA, 525 bp, Artificial Sequence
  derived and/or modified sequence
atggccccactgggaccaactgggcctcttccacagtcttttctgttaaagtgcctggagcagatgaggaaagttcaggcggacggtacggccctgcaggaaaccttgtgtgcaacacaccagctgtgccaccccgaagagctcgtgcttctgggccacgctttgggcataccccaaccacccctttcgagttgtagcagccaggccctacagctgatgggatgtctgcgccagctacactccggacttttcctttaccagggtctcctgcaggctctagccgggattagtccagaattggctcccacactcgacactctgcaactcgacactacagatttcgcaatcaacatctggcagcagatggaggatctgggaatggctccagcggtgcctccaacgcagggcacaatgccggcttttacttcggccttccagcgaagagccggaggcgtactggtggctagcaacctgcagagcttcttggaactcgcctaccgcgccctgcgccattttgcgaagcca

SEQ ID NO: 248964 - DNA, 525 bp, Artificial Sequence
  derived and/or modified sequence
atggccccactgggtcccacaggtccactccctcagtctttcctgctgaagtgtctggagcagatgcggaaagttcaggctgatgggaccgcactgcaggagaccctatgcgccacccatcaactgtgtcaccccgaggaactggttctgttgggtcacgccctaggcataccacagcccccgctgtcatcctgcagttctcaggctctgcagcttatggggtgcctgaggcagttgcactctggtttgtttctgtaccagggcttgctccaggccttagcaggtatatccccagaattagcccccaccctcgacactttgcagcttgatacgactgatttcgctataaatatttggcagcagatggaggatctgggcatggcaccagcggttcctcccacccagggcacgatgcctgccttcacatcagcctttcagagacgggctggaggtgtacttgtcgcctcgaatctgcagtcgtttttggagctcgcctatagggccctgcggcacttcgccaaacca

SEQ ID NO: 248965 - DNA, 525 bp, Artificial Sequence
  derived and/or modified sequence
atggctcctcttggaccaacaggacctcttccacaatcatttttacttaaatgtttagaacaaatgagaaaagttcaagctgatggtactgctttacaagaaactctttgcgcaacacaccaattatgtcaccctgaagaacttgtattgttaggacatgctcttggtataccacaaccacctttatcatcatgtagttcacaagcattacaattaatgggttgtcttagacaactacatagtggtctttttctttaccaaggattgcttcaagcattagcagggatttctccagaacttgcaccaacattagatactcttcagcttgatactacagattttgctattaatatttggcaacaaatggaagatttaggtatggcaccagcagttccaccaacacagggtacaatgcctgcttttactagcgcttttcaacgtcgagctggaggagttcttgttgcttcaaatctacaaagttttttagaacttgcttatagagcattgagacattttgctaaacca

SEQ ID NO: 248966 - DNA, 525 bp, Artificial Sequence
  derived and/or modified sequence
atggcccctcttgggcccacgggccctttgccacaatcttttctattaaagtgtctggaacagatgaggaaagtccaggccgatggcacagcattgcaggagaccctgtgcgcgacgcatcaactctgccacccggaggaactggtccttctgggacatgccctaggcattccccagcccccattgtcctcctgcagttctcaggccctgcagctcatgggttgtctcagacaactccattctggcctctttctgtatcagggactgctccaggccctggccgggatctcgccagaattggctcccacgttggataccctccaactggacacgaccgactttgccataaacatctggcaacaaatggaggacctcggcatggccccagcagtgcccccgactcagggcacaatgcctgcctttacaagcgcgttccagagaagggctgggggagtcctggttgcctccaatctgcagtcctttctcgagctagcctacagggccctccggcatttcgccaaacct

SEQ ID NO: 248967 - DNA, 525 bp, Artificial Sequence
  derived and/or modified sequence
atggcacctctgggacctaccggtccgctgccgcagagcttcctgttgaagtgtctggaacagatgcgaaaagtgcaggcagatggcaccgctctgcaggaaacactgtgcgctacccaccaattgtgtcaccccgaggaacttgttctcctggggcacgccctcgggatcccacagccccctctatcctcttgcagcagtcaggctcttcagttaatgggctgcctgcggcagctacattcaggactcttcctctaccaggggctgctacaagcactagctggaatttccccggaactggcccctaccttagacacactgcaactggatacaaccgactttgcaatcaatatctggcagcaaatggaggatctcggtatggcacccgcagtgccaccaacgcaaggcacgatgccggcatttacctcggccttccagcgccgagccggtggtgtactcgtcgcctcgaacttgcagagtttcctggaactcgcttaccgggccctaaggcacttcgctaaaccc

SEQ ID NO: 248968 - DNA, 525 bp, Artificial Sequence
  derived and/or modified sequence
atggcaccgctgggtcccaccggacccttgccacagtcttttctcctgaaatgcctggaacagatgagaaaggtccaggccgatggtacagccctgcaggagacactgtgtgccactcaccagctctgccaccccgaagaattggtgcttctggggcacgcactgggaataccccaaccgcctctgagttcgtgttctagccaggcactgcagctcatgggatgcctccgtcagctccatagcggactgttcctttaccagggcctgcttcaggcccttgcaggaatttctcctgagctagcgcccaccttggatacccttcagctggacaccacggactttgcgataaacatttggcaacagatggaagacctgggcatggcccctgctgtgccacctacgcagggcacgatgcctgccttcacatcagcattccagagacgggcgggaggcgttctggtcgctagtaacctgcagagtttcctggaactcgcctatcgcgccttgcggcactttgccaaaccg

SEQ ID NO: 248969 - DNA, 525 bp, Artificial Sequence
  derived and/or modified sequence
atggcacccttgggacctactgggccccttcctcagtcctttttgcttaaatgcctggaacaaatgcggaaggtgcaggccgacggcactgcactccaagagactttgtgtgcaacccatcagctgtgtcatcccgaagaacttgtgctgctcggtcatgccctgggaatcccacagccaccccttagctcctgttcgtctcaggccttgcaacttatgggttgcctccgccaacttcacagcggtctgttcctttaccagggattgctgcaagcactggcaggcatctcaccagaacttgcacccacccttgatactcttcaactcgatactaccgactttgcaattaacatttggcagcaaatggaagatcttgggatggcacctgcagtgcctccaacccagggaactatgcctgcttttacctcagccttccagagaagggccggtggggttctcgttgccagcaatctgcaatcgttcttggaactcgcataccgtgcactgcgccattttgctaagcca

SEQ ID NO: 248970 - DNA, 612 bp, Artificial Sequence
  derived and/or modified sequence
atggcaggaccagcaacgcaatcgccaatgaagctgatggcacttcaattgctcctgtggcattcggccctttggactgttcaggaggcaacccctctgggacccgcatcatccctccctcaatcatttctgctcaagtgtctcgagcaggtgagaaagatccaaggcgacggcgcagcactgcaggagaagctctgcgcaacgtacaaactgtgtcatccagaagagctggtccttctggggcactcacttggcataccttgggctcctttgtcctcttgtccctcacaagccctccaactggcaggttgtctgtcgcagctgcactcgggactgtttctttaccaaggtctgctccaagccctcgagggtatttctccagagcttggcccaacccttgataccctgcaacttgatgttgcagacttcgcaactacgatatggcaacaaatggaagaactcgggatggcacctgcacttcaacccactcagggtgcgatgcctgcttttgcctcggcgttccaaagacgagcgggaggtgtgttggtggccagccacctgcagtcctttctcgaagtgtcgtaccgcgtgctgaggcatctggcccaacca

SEQ ID NO: 248971 - DNA, 612 bp, Artificial Sequence
  derived and/or modified sequence
atggcaggccccgcaacccaaagccccatgaagctgatggcattgcaactgctcttgtggcactcggcactttggactgtgcaagaagccactccccttggccctgcatcgtccctgcctcaatcgttccttcttaaatgtctggaacaagtgagaaagatccagggggatggtgcggccttgcaggaaaaactctgtgcgacttacaagctctgccatccagaggaactggtgttgcttggtcattcgctgggaattccgtgggcacccctgtcgtcgtgtccgagccaggctctgcaacttgcaggatgtttgtcccagctccactctggacttttcctgtaccaaggactcctgcaggccttggagggaattagcccagaactcggaccaactcttgataccctgcagctggacgtggcagattttgcaactaccatttggcagcaaatggaagaattgggtatggcacctgcactgcaacctactcagggcgcgatgccagcatttgcatccgcttttcaaagaagggccgggggcgtgctcgtcgcaagccacctgcaatcatttctggaagtgtcgtacagagtgctgagacatctggcacagcca

SEQ ID NO: 248972 - DNA, 612 bp, Artificial Sequence
  derived and/or modified sequence
atggcagggccagccacccagtcccctatgaaactgatggcattgcaactccttctctggcactcggccctttggaccgtgcaagaagccacccctctgggacccgcgagcagccttccacaatcgttccttctgaagtgtctcgagcaggtccgcaaaatccaaggagacggagcggcgcttcaagaaaagctctgcgccacttacaaactttgtcatccagaggaactggttctgctcggccactccttgggtataccttgggcgcccctgtcgtcatgcccaagccaggcactgcagctggcaggttgtctgtcccagttgcactcaggcctctttttgtaccaagggctcctgcaagcactggaaggaattagccctgagttgggtccaaccctggatacgctgcagttggacgttgccgattttgcaaccaccatctggcaacagatggaggagcttggtatggcgcccgcactccaacccactcaaggggctatgccagcctttgcatcggcatttcaacgacgggccggtggtgtccttgtggcttcgcatcttcaatcctttctggaagtgtcgtaccgcgtccttaggcaccttgcccaaccc

SEQ ID NO: 248973 - DNA, 612 bp, Artificial Sequence
  derived and/or modified sequence
atggccggaccggcaactcaatcacctatgaaactgatggcccttcagcttctcctttggcattcggcgctttggactgtgcaagaggccaccccgcttggtccggcatcctcccttcctcaatctttcctgctcaagtgtctggagcaggtccggaagatccaaggtgacggagcagcgctccaggaaaagctgtgtgcaacctacaagctgtgccatccagaagagcttgtcctgctgggacactcgctcggaattccctgggcgccactctctagctgcccttcacaagccctccagctggcaggttgtctgtcccaactgcacagcggactgttcctgtaccaggggcttttgcaggccctcgaaggaattagcccagagctcggccccactcttgatacgctgcaactggatgtggctgatttcgcaacgactatatggcaacagatggaagaactcggcatggcccccgcactgcagccaactcaaggcgcgatgcccgcatttgcatccgcttttcaacggagagcaggcggggtgcttgtggcgtctcatcttcagtcgtttcttgaagtgtcctacagagtgctgcgccatctggcccagccc

SEQ ID NO: 248974 - DNA, 612 bp, Artificial Sequence
  derived and/or modified sequence
atggctggccctgctacccagagcccgatgaaactaatggccctgcaactgctgctgtggcattcagcgctttggactgtacaagaggctactccattggggcctgcatcatcactcccccagtccttcctgctgaaatgtttggagcaggtccgcaaaatccagggcgacggagctgcccttcaggaaaagctgtgtgcaacatacaagctgtgtcatccggaagaactggttctcctagggcacagtcttgggataccttgggcccccctgagttcttgccctagtcaggctctccagctcgccggctgtctctctcaactccacagcggtctgttcctatatcaggggctgctccaggctctcgaaggtatttccccggagctgggccctacactggatacactgcaactcgatgtagcagattttgctacgacaatctggcaacaaatggaggaactcggtatggcaccagccctgcagccaacccaaggtgctatgcctgcttttgcgtctgcctttcagagacgcgctggaggggttctcgtggcgtcccacctacagagcttcttggaagttagctatcgcgtgctcagacacctcgctcagccc

SEQ ID NO: 248975 - DNA, 612 bp, Artificial Sequence
  derived and/or modified sequence
atggccggaccggccacccaatcgccaatgaaactgatggcacttcaactgctcctgtggcactcagccctctggaccgttcaggaagcgactcctctgggaccggcctccagcctgcctcaatcctttctgctcaagtgcctggagcaggtccggaagatccagggagatggagccgccctgcaagagaaactttgcgcgacttacaagctctgtcatccggaagagttggtgctccttggtcatagcctgggcattccgtgggccccgcttagctcatgcccgagccaggctcttcaactggcagggtgcttgtctcagctccattcgggactgtttctgtaccaaggattgctccaagcgctcgaaggtatctcgcccgagctcggcccgaccctcgacaccctgcagctggatgtggcagactttgcaactacgatctggcagcagatggaagagctgggaatggcccctgccttgcagccaacgcaaggtgcaatgccggcgttcgcgtccgccttccagcgccgggctgggggagtgctggtggcctctcacctccagtcgttcctcgaagtgtcatacagagtcttgcggcatcttgcccaaccc

SEQ ID NO: 248976 - DNA, 612 bp, Artificial Sequence
  derived and/or modified sequence
atggcaggacccgccacccaatctcccatgaaactcatggcactccagctcctcctgtggcatagtgccctttggaccgtgcaggaagctacccctttaggacccgcaagcagcctgccccagagcttcctgctgaaatgcttggaacaggtcaggaaaattcagggggacggcgcagctcttcaggaaaagctgtgcgcaacatataagctttgtcatcctgaggagcttgttctgctgggccacagcctggggataccctgggctccactgtcaagctgcccctctcaggcgctgcagttggctggttgcctgagccagctccactccggcctgtttttatatcaagggctcttgcaggcactcgaaggcatcagcccagagctgggaccaaccctggataccctgcagctggatgtagctgactttgctaccacaatctggcagcaaatggaagagttgggaatggctcccgctcttcagcctacccaaggagccatgcctgcatttgcttctgctttccagcgccgcgctgggggggtgttggtcgctagccatttgcagtccttcttggaagtctcgtacagggtcttgagacacctggcccaacca

SEQ ID NO: 248977 - DNA, 612 bp, Artificial Sequence
  derived and/or modified sequence
atggcagggcctgcaacccagtcacctatgaagttaatggctttacaactcctcctgtggcactccgccctttggactgtgcaggaagccacacctttggggcctgccagcagtttgccacaatcttttctgctgaaatgtcttgagcaggtgagaaagatccagggcgatggcgcggcactgcaggagaaactgtgtgcgacatataagttatgtcacccagaggaactggtccttctcggacactccctcgggatcccatgggcccctctctcttcctgcccatcccaagctcttcaattagctgggtgtctgtctcagctccatagcgggctgttcctgtatcagggactgctgcaggctctcgagggcattagtcccgaactcggcccaacgctggacactctccagctggatgttgctgactttgctaccaccatctggcagcagatggaggagctcggaatggcccctgccctccagccgacgcagggagcaatgccagccttcgcatccgcttttcaacgtcgcgcaggtggcgtgctagttgcctcccatttgcagtcgttcctggaggtgtcttaccgcgtactgagacatctcgcgcagccc

SEQ ID NO: 248978 - DNA, 612 bp, Artificial Sequence
  derived and/or modified sequence
atggctgggcctgctacccaatccccgatgaagctgatggctctgcaattattactctggcactcggccctgtggactgtccaggaagctaccccactcggacccgcttcttccctgccccaatccttccttcttaagtgcctggagcaagtgagaaaaattcagggagacggagcagccctccaggagaagctctgtgccacctacaagctgtgtcaccccgaggaattggtcctgttgggccattcactggggataccttgggcccccctgagctcttgtccatcacaggccctgcagctggcgggctgcctgtctcagctccattccggcctgtttctgtaccagggcttgctgcaggctctggaaggtatatcccccgagctgggacccacactggacactctgcagctagacgtggccgattttgcaacaactatctggcaacagatggaagagcttggcatggcccctgctcttcagccaacacagggcgcaatgccagccttcgccagcgccttccagagacgggctgggggggtgctggtggcctcccatctccagtcttttctcgaggttagttaccgtgtcctgaggcacctggcgcagccc

SEQ ID NO: 248979 - DNA, 612 bp, Artificial Sequence
  derived and/or modified sequence
atggcggggccggcgactcaatcgcctatgaagttgatggcactgcagctgctgctgtggcactcggcgctctggaccgtgcaagaggctactcccctgggccccgcctcatctctgccacaatccttcctcctcaaatgcctggaacaggttagaaagatccagggagatggagccgcactgcaggagaagctgtgcgccacctataaactgtgccacccggaagaactcgtcctcctcggtcatagccttggaatcccgtgggctccactgtcgagctgcccatcccaggccctgcagcttgccgggtgtctgtcccaactgcattcagggctttttctctaccaaggcctgctgcaagcccttgagggaatctcaccggagctcggcccaactttggacaccctgcagttggatgtcgcagacttcgccaccactatttggcagcagatggaagaactcggaatggctccagcgcttcagccaacccagggagcaatgccggctttcgcaagcgcgttccaaagacgggctggtggcgtgttggtggctagtcacctgcagtccttcctggaagtgtcgtaccgtgtgctgaggcacctcgcacagcca

SEQ ID NO: 248980 - DNA, 612 bp, Artificial Sequence
  derived and/or modified sequence
atggcaggtccagccacgcaatcgcctatgaagctgatggccctgcaactgcttctctggcactcagccctctggaccgtacaagaagcaaccccgctcggacctgcgtcctccctgccccaatcgttcctgctcaagtgtcttgaacaggtgcgtaagattcagggcgacggagcagcgctccaggagaagctgtgcgcaacttacaaactgtgtcatcccgaagagctggtgctgctcgggcactcacttggtattccctgggcacctctctcgtcatgcccttcgcaagcgctccagcttgcgggctgtctgagccaactgcattcggggctctttctttaccaaggacttctccaagccctggagggtatttcaccggaacttgggccaaccttggatactctccaactggatgtggcggattttgctaccactatatggcagcaaatggaggaacttggcatggcacccgcattgcagcctacccaaggagcaatgcccgcctttgcatcggcatttcagagacgcgctggaggagtgttggtggcctcccacttgcagtcattcctggaagtgtcctaccgcgttctgagacatcttgcacaacct

SEQ ID NO: 248981 - DNA, 612 bp, Artificial Sequence
  derived and/or modified sequence
atggctgggccagcaactcaaagtcccatgaagctcatggccctgcagctgctgttgtggcacagcgccctgtggacagtccaggaagctactcctctgggacccgcctcatcactgccccagtctttccttctgaagtgcctggagcaggttcgcaagatccaaggtgacggagctgctctccaggagaaactctgtgcaacatataaactatgccaccccgaggagttggtcttgttgggccattctctgggtatcccctgggccccgctgtccagctgtccttcccaggcacttcagctggcagggtgcttgagccagctgcactctgggctgttcctgtaccaaggccttcttcaagcattggagggtatctctccggagctgggcccaaccctggatacactgcagttggacgtagcagacttcgccacaactatctggcagcagatggaagagctgggcatggcccccgcgctgcagcccacccagggcgccatgcccgcgtttgccagcgccttccagagacgagctggaggcgttctcgtcgcatcccacctgcagtcattcctggaggtttcctatcgagtactccgccacctcgctcagccg

SEQ ID NO: 248982 - DNA, 612 bp, Artificial Sequence
  derived and/or modified sequence
atggcagggcctgcaacgcagtcgcccatgaagctcatggcactccaactgcttctgtggcattccgcactctggaccgtgcaggaagcaacccctctgggtcccgcctcctcgctgcctcagtcatttcttcttaaatgtctggagcaagtgcggaagatacaaggagacggagcagccctgcaggaaaagctctgtgcaacttacaaactttgtcacccagaagaactcgtgctgctgggtcattcactcggtataccttgggcaccgctctcatcctgcccctcccaagcgctgcaattggcaggttgcttgagccagcttcatagcggacttttcttgtaccaagggctgcttcaagcacttgaaggaatttcgcctgaacttggacctaccctggataccctgcagctggatgtggcagactttgccacgaccatttggcagcaaatggaagagctcggcatggcacctgcgcttcagccaacccagggtgcgatgccagcgttcgcgtccgcttttcagagacgggccggcggggtcctcgtcgcatcgcacctccaatccttcctggaagtttcctaccgagtgcttagacatcttgcgcagcct

SEQ ID NO: 248983 - DNA, 612 bp, Artificial Sequence
  derived and/or modified sequence
atggcagggccagcaacacagtccccgatgaaactgatggccctgcagcttctcctgtggcactccgcactgtggacggtgcaggaggccacacccttgggcccagcttcaagcctgcctcagtcatttctgttgaaatgcttagagcaggtacgcaagatccaaggcgacggggccgcgctccaagagaagctgtgcgccacttataagctctgccaccccgaagaactggttctgctgggacacagtctggggataccctgggcccctctctctagctgcccgagccaggccctgcagcttgcaggctgtctgtcccagctacactccggcctgtttctgtatcaaggcttgttgcaggctctggaggggatctcccccgaattgggtcctacgcttgataccctgcaactcgacgtggccgacttcgctacaactatttggcagcaaatggaggaactgggaatggcacccgcattgcagcctacccagggggccatgcccgcctttgccagcgcttttcaacgaagggccgggggggttctcgttgccagccacctgcagtcgtttctcgaggtcagctaccgggtccttagacatctggctcagcct

SEQ ID NO: 248984 - DNA, 612 bp, Artificial Sequence
  derived and/or modified sequence
atggccggacccgctactcaatccccaatgaagcttatggctctgcaactcctcctatggcattctgctctttggactgtgcaggaagcaacacctctaggacctgctagttctcttcctcagagttttctgcttaaatgcctcgaacaggtacggaagattcagggggatggggctgcactgcaggaaaaactgtgtgcgacttataaactatgtcaccctgaggagttagttctgctgggacattctctggggataccctgggcacctctttcatcttgccctagtcaggccctccagctcgccgggtgcctgtcacaacttcactctgggctcttcctttatcagggactcctccaagctctggaagggatatctccagaacttggacctactctcgatacactccagctggatgtagcggacttcgctacaactatatggcagcagatggaagaactgggaatggcccccgccctgcagccaacgcagggagcaatgcccgctttcgcctccgcttttcagaggagagcggggggagttctggttgcatcacacctacagtctttcctcgaagtgtcgtatcgcgtgttaaggcacctcgctcagcct

SEQ ID NO: 248985 - DNA, 612 bp, Artificial Sequence
  derived and/or modified sequence
atggccggccctgccacgcagtcgcctatgaagctgatggcgctgcaattgctcctgtggcacagcgccctctggacggtgcaggaggccaccccactgggaccggccagtagcctgccacaatcattcctgctgaaatgcctcgagcaggtgcggaagatccaaggagatggagctgcgctgcaggaaaagctgtgcgcaacctacaagctgtgtcaccccgaggaactggtcctgctgggacactccctgggaatcccttgggccccgctttcatcctgtccgtcgcaggcactccaactggcgggatgtctgtcacaactgcattcgggactttttctgtatcagggcctgctgcaagcgttggaaggaatctccccagaactgggaccgactctggataccctccaactggacgtcgctgacttcgcaactaccatctggcagcaaatggaggaattgggcatggcaccggcgctgcagccaactcaaggcgccatgccggccttcgcatccgcgtttcagagaagggccgggggcgtgctcgtcgcctcccatctccaatcgttcctggaggtgtcctaccgcgtcttgcggcacctggcgcagcca

SEQ ID NO: 248986 - DNA, 612 bp, Artificial Sequence
  derived and/or modified sequence
atggctggccccgctacccagagccccatgaaattgatggccttacagctgctgttgtggcatagcgccttgtggaccgtccaggaggccactccccttggcccagcgagttcacttccccagtcttttctcctgaagtgcctggagcaggtcagaaaaatacagggagacggcgccgcattgcaggagaagctgtgcgccacatataagctctgccaccccgaggagctcgtgctcttgggccatagtttggggattccatgggctcctctgagttcttgtccctcgcaagctctacaactagctggatgcctctcacagcttcatagcgggctattcctgtaccagggcctgttacaagcactcgaggggatctctccagagctaggaccaaccctggatactttgcaactggacgttgccgacttcgcgactaccatttggcaacagatggaggagctgggcatggcacctgcactacaaccaacgcagggggcaatgcccgccttcgcgtcagctttccagcgcagagctggtggggtgctcgttgcttcacacctccagtcattcttggaagtatcttacagggtgctgcggcacctcgcccaacct

SEQ ID NO: 248987 - DNA, 612 bp, Artificial Sequence
  derived and/or modified sequence
atggcgggacctgccacgcagagcccgatgaaacttatggcgctccagcttcttctgtggcactcagcgctgtggactgttcaggaggctaccccgctcggacccgcctcttcactgccgcaatcgttcctcctcaagtgcttggagcaggtgcgcaagattcagggggacggtgccgccttgcaggaaaagctgtgcgcaacttacaaactgtgccacccagaggaattggtgctgctcggacattcgctcggcatcccttgggcaccgctttcgagctgcccttcccaggctcttcaactggcgggttgtctctcccagctccattccggcttgttcctgtaccagggcctgctgcaggctctggaaggcatctccccagaactcgggccaaccctcgatactctgcaactggacgtggccgatttcgcaactaccatctggcagcagatggaagagctgggaatggcacccgccctgcaaccaacccagggagccatgccggcctttgctagcgccttccaaagaagggcgggaggagtcctggtggcaagccacctccaatcgtttctggaggtgtcataccgggtcctgcgccacctggcgcaaccg

SEQ ID NO: 248988 - DNA, 612 bp, Artificial Sequence
  derived and/or modified sequence
atggcaggcccggcaacccagtcgcctatgaagcttatggccctccagctactattatggcatagcgcactatggacagtgcaagaggctaccccacttgggcccgccagctccctgcctcaatctttcctgttaaaatgtctggagcaagtgcggaaaatccagggagatggtgcggctctgcaggaaaaactctgtgcgacgtacaagctgtgccacccagaggagctggtcctgctgggccatagtctggggattccatgggccccgctgagctcttgccccagtcaggctctgcagttggcggggtgtctgagccagctccattcggggctgttcctctatcagggcctattacaggctttggaggggattagtcccgaactgggccctaccctagatacccttcagctagacgtggcggatttcgccaccactatttggcagcagatggaagagttgggcatggcccctgctcttcagcctacccagggggcgatgcccgcttttgcctccgccttccaacgcagggctggaggcgtactcgttgcttcccatttgcagtcgtttctagaggtgtcgtatagggtgctgcgccaccttgctcagcca

SEQ ID NO: 248989 - DNA, 612 bp, Artificial Sequence
  derived and/or modified sequence
atggccggacccgcaacccagagccccatgaaattgatggcgttacagcttcttctgtggcactcagctctttggactgtgcaagaagcaacgccgctggggcccgcttcatccttaccacagtcttttctcctgaagtgccttgagcaagtacggaagattcagggggacggggccgctttgcaagagaagctctgcgctacctataagctgtgccacccagaggagctggtgctgttaggccactcactcggcataccctgggctccattatcaagctgccccagtcaggctttacagttggcaggctgcctttcacaactgcacagcgggttgttcctctaccaagggctcctgcaggctctggaaggcatttctccagaactcgggccgacacttgacaccctgcaacttgatgttgccgactttgccaccacaatctggcagcaaatggaagagctggggatggcaccagccttgcagcctacgcagggcgccatgcccgcttttgcgagtgcattccaaagacgggcaggaggagtccttgtcgctagtcaccttcagtcttttttggaagttagctatcgtgtgctgaggcatctggcccaaccc

SEQ ID NO: 248990 - DNA, 612 bp, Artificial Sequence
  derived and/or modified sequence
atggccggccctgcgactcagagccctatgaaactgatggcgctgcagctgcttctctggcactcagctctgtggacggtccaagaagcaaccccactcgggccagcttcaagcctcccccaatcgtttctgctgaagtgtctcgagcaagtgagaaagattcaaggagacggcgcagcactccaggagaagttgtgtgctacctacaagctctgccatccagaggaactggtcctgcttggccacagccttggaataccgtgggcacctctctcctcctgcccgtcgcaagcgctgcaacttgcgggatgtctttcccaacttcactccgggctgttcctttaccagggacttctgcaagcgctcgaaggaatctccccggagcttggacccactctcgataccctgcaacttgacgtggcagattttgccactaccatctggcaacaaatggaagaactgggaatggccccagccttgcagccgacccagggcgccatgcctgcatttgcttcagctttccaacggagagcaggtggtgtcctggtggcatcccatctgcagagcttcttggaagtgtcatacagggttctgcgacatctcgctcagcca

SEQ ID NO: 248991 - DNA, 612 bp, Artificial Sequence
  derived and/or modified sequence
atggcaggccctgccactcagtccccaatgaaacttatggcactgcagctactgctgtggcattccgccctgtggaccgtgcaagaggctactccacttggacccgcatccagcctgcctcagtctttcctcttaaagtgtcttgagcaggtgcgaaagatacagggggatggcgccgctctgcaagagaagctctgcgccacctacaagctgtgccaccctgaagaattggtgctgctcggtcactctctgggcataccatgggctcccctcagtagctgccctagccaagccctccaactggctggctgcttatcacagctgcacagcggcctcttcctataccagggcctgctgcaggcactcgagggcatctcaccagagctcgggcctaccctggatactcttcagttagatgtggcagacttcgcaacaacaatctggcagcagatggaggagttaggcatggctcctgctctgcagccaacacaaggtgccatgcccgccttcgcttccgcttttcagaggagagccggcggcgtgttagtggcatctcacctgcagtcatttctggaggtgtcctaccgcgttctgaggcacctggcccagcca

SEQ ID NO: 248992 - DNA, 612 bp, Artificial Sequence
  derived and/or modified sequence
atggctgggcccgccacgcagagtcctatgaaactgatggccctccagttacttctgtggcacagtgccctgtggaccgtgcaggaggccactcccctgggcccagccagttctctgccccagtctttcctgctgaagtgtcttgaacaggtaaggaaaatccagggcgatggtgccgcgctgcaagagaaattgtgtgccacctacaaattatgccaccctgaagaactcgtgctgctgggacattccctcggcatcccctgggcccccttgagttcgtgtccttctcaggcacttcagctcgccggttgcctctcccagctacacagcggactattcctgtatcagggactactgcaagccttggagggcatttcccctgaactgggccctactctggatacactgcagttagatgttgccgactttgctactacaatttggcagcagatggaagagcttggaatggcacctgcccttcagcctacgcagggcgcaatgccagccttcgcatctgcatttcaacgccgggcgggtggcgttctggtggcttcccatctccaatctttcctggaggtatcctaccgcgttctgcggcatctggcacagcca

SEQ ID NO: 248993 - DNA, 612 bp, Artificial Sequence
  derived and/or modified sequence
atggctggaccagccactcagtcaccaatgaagctgatggccctccaactgctcctctggcattcggccctttggaccgtccaggaggctactcctctggggccggcctcatccttgcctcagtccttcctgctcaagtgcctggagcaggtcaggaaaatccaaggagacggagccgcgctgcaagagaagctgtgcgcaacttacaagctctgccatcctgaagaactggttcttctcggtcacagcctgggcatcccgtgggccccgctctcttcctgcccttcacaggccctgcagctggccggatgcctgagccagctgcactcggggctgttcctgtaccagggactcctgcaagctctggaaggaatttcaccagagctggggccaaccttggataccctccagctcgacgtggcagactttgcaaccacgatctggcaacaaatggaagaactgggaatggcaccggccctgcagcctactcagggggccatgccagcgttcgcatctgctttccaacggcgggctggaggagtgttggtggcaagccacctccaatcctttctggaggtgtcttaccgcgtcctgcggcacctcgcccagccg

SEQ ID NO: 248994 - DNA, 612 bp, Artificial Sequence
  derived and/or modified sequence
atggccggccccgccacccagtcacccatgaaactcatggctctacagttgttgctgtggcacagtgcactatggacggtccaggaggccacacctttgggccccgcctcctccctgccgcaatcttttctgctgaagtgcctggagcaagtccgtaagatccagggagacggcgctgccctacaggagaagctttgcgcaacctataagctgtgccacccggaggaactggtgctcttggggcattctttgggcatcccatgggctccgctgtcgtcatgcccaagtcaggccctgcagctcgccggctgcctaagccaacttcactcaggactgttcttataccaggggttgctccaggccctggaagggatctccccagaattaggacctactttagacaccctccagctggacgtggccgattttgcgactactatttggcagcagatggaggagcttggcatggcacccgctctccagcctacgcagggagctatgccggctttcgcatctgctttccaacggcgggccggcggggtgttggtggccagtcatctgcagtcgttcctggaggtgtcatatcgggtcctgaggcacctggcccagcct

SEQ ID NO: 248995 - DNA, 612 bp, Artificial Sequence
  derived and/or modified sequence
atggcaggtcctgcaacccagtcacctatgaaactgatggcattgcaactgctgctgtggcattccgcactctggaccgtgcaggaagcaactccgctgggaccggcgtcctcacttccccagtcatttcttctgaagtgccttgagcaggtgaggaagattcaaggtgatggagcagcactgcaggaaaaactctgtgcaacgtacaaattgtgccatccagaagagctggtgctgcttggccatagcttggggataccttgggcaccgcttagctcgtgtccaagccaagcacttcaactggccggttgcttgtcccaacttcattctggattgttcctgtaccagggacttcttcaggcattggaagggatctcacctgaacttggacctacgcttgatactctgcagctggatgttgcggattttgctactactatctggcagcaaatggaagagcttgggatggccccagcgttgcagccaacccaaggcgccatgcccgcatttgcttcggcctttcaacgtagagcaggtggtgtgctggtggcttcgcacctccagagcttcctggaggtgagctaccgcgtgctgcgccatcttgcacagcca

SEQ ID NO: 248996 - DNA, 612 bp, Artificial Sequence
  derived and/or modified sequence
atggcaggaccagcaacccagtcgcctatgaagctgatggcactccagttgctgctgtggcactcggctctgtggactgttcaagaggcaaccccgctgggcccggcaagctcattgccgcagtcgttcctgttgaagtgtctcgagcaagtccgaaaaatccaaggtgatggggcagctctgcaggagaaactgtgcgcaacttacaagctgtgtcatcctgaagaattggtgttgcttggtcattccctgggtatcccttgggccccgctttcctcgtgccctagccaggcactgcaacttgctggttgtctctcccaactgcattccgggctgttcctttaccagggactccttcaagcgctcgaaggtatttccccagaactgggcccaaccctcgacacccttcaactggatgtcgcagactttgcaacgactatttggcagcagatggaagagttgggaatggccccggcacttcaaccaactcaaggagctatgccggcattcgcgtcagcattccaaagacgcgccggaggagtgctcgtggcctcccatctccagtcgtttctggaggtgtcgtatcgggtgctcagacaccttgcccagcct

SEQ ID NO: 248997 - DNA, 612 bp, Artificial Sequence
  derived and/or modified sequence
atggcaggtccagccacccaatcgccaatgaagctgatggcactgcaactgctgctgtggcattccgccctgtggaccgtgcaggaagcaactccgctgggaccagcgtcgtccctgccgcagtcctttctgctcaagtgccttgaacaggtgcggaagatccaaggagatggggccgccctgcaggaaaaactttgcgcgacctacaagctctgccacccggaggagttggttctgctgggacactcactgggaatcccgtgggctccactgagctcatgtccatctcaggcactccagctcgccggttgcttgtcgcagctgcattcaggactgttcctgtaccagggacttttgcaggctttggagggcatctcgcctgaactgggcccgaccctggacacgctgcagctggatgtggcagactttgccactactatctggcagcaaatggaggaactcgggatggcacctgccctgcagccaactcaaggagccatgccggccttcgcgtccgccttccagcgccgggccggaggagtgcttgtggcgtcgcacctgcaaagtttcctggaggtgtcgtaccgggtcctgcggcaccttgctcagccg

SEQ ID NO: 248998 - DNA, 612 bp, Artificial Sequence
  derived and/or modified sequence
atggcgggaccggccacccagtctccgatgaaactgatggctctgcaactgctgctttggcattccgccttgtggaccgtgcaagaagcgacccctctcggaccggcctcgagcctgccccagtcctttctgctgaagtgtctcgaacaggtgaggaagatccagggagacggtgccgccttgcaggagaaactgtgtgcaacctacaagctctgccacccggaggaactcgtcttgctcggtcactcgctgggcataccctgggcaccactctcatcatgccctagccaggccctgcagctggcgggatgcttgtcccaactgcactcgggcctgttcctctaccagggcctcttgcaagcccttgaaggaatttcccctgagctcgggccgacgcttgacactcttcaactggatgtggccgacttcgcaactaccatctggcaacaaatggaagaacttgggatggcaccggctctccagccgactcagggagcgatgccagcgttcgcttcagcttttcagcgccgggcgggaggtgtgcttgtcgcctcgcacttgcagagtttcctggaggtgtcttaccgggttttgcgccatctcgcccaaccg

SEQ ID NO: 248999 - DNA, 612 bp, Artificial Sequence
  derived and/or modified sequence
atggccggaccagccactcagtctcctatgaaacttatggccctgcagctcctcttgtggcactcagcactttggactgtccaagaggcaacgccgctgggaccggcttcatcactgccgcagtcatttctcctcaagtgccttgagcaagtgcgcaaaatccaaggagacggcgcagcgctgcaggagaagctgtgtgccacttacaagctctgtcatccggaagaactggtgcttctgggccatagcctcggtattccctgggcccccctgtcatcgtgcccttcgcaggcactgcagctggcaggatgcttgtcgcaactccacagcggactgtttctgtaccaaggattgctgcaggcactcgagggcatttcaccggaactcggccccacccttgacaccttgcaattggacgtggctgatttcgcgactaccatctggcagcagatggaggaactggggatggctccggctcttcaaccaacccagggtgcaatgccggcttttgcctcagccttccaaagacgcgccggtggagtcctcgtggcctcccacctgcaatcttttttggaagtgtcctaccgcgtcctgcggcacctggcccaaccg

SEQ ID NO: 249000 - DNA, 612 bp, Artificial Sequence
  derived and/or modified sequence
atggctggtccagccactcagtctcccatgaagctgatggccctgcagctgctgttatggcattcagccttgtggactgtgcaggaggcaacaccactcggcccagcgtcttcgttacctcaatccttcttactgaagtgcctcgaacaagtcaggaagatccagggcgatggcgcagccctccaggaaaaactgtgcgctacgtacaaactgtgccatcccgaggagctggtgctcctgggccattcactgggtatcccttgggcccccttatcctcatgcccttcacaggcccttcagcttgccggttgtctgtcccagctgcacagtggactgtttctgtaccagggactgttgcaggccctggagggtattagccccgaactgggaccaaccctggacaccctccagctggacgtcgccgattttgcgactactatatggcagcagatggaagaattgggtatggcaccagctcttcagccaacgcagggggctatgccagcctttgcttccgccttccaacggcgcgccggcggcgtactggtggcctcacacttgcagtcttttctggaggtgtcttatcgcgttctaagacatctggcacagcct

SEQ ID NO: 249001 - DNA, 612 bp, Artificial Sequence
  derived and/or modified sequence
atggctggacctgctacgcaatctccaatgaaacttatggcattacaattacttctttggcatagtgcattatggactgttcaagaagcaacaccattaggtccagcaagttcacttccacaatcttttttattaaagtgtcttgaacaagtcagaaaaattcagggagatggagcagcattacaagaaaaactttgtgctacttataaattatgccacccagaagaattagttttgttaggacattcattaggaattccttgggctccattaagttcttgtccatcacaagcactacaattagctggatgtttaagtcaacttcattcaggactttttctttatcaaggactcttacaagcacttgaaggaatttctcctgaacttggtccaacactagatactttacaattggatgttgcagattttgcaactactatttggcaacaaatggaagaacttggaatggctccagcattacagccaactcaaggagcaatgccagcttttgcaagtgcttttcaaagaagagcaggaggagttttagttgcttcacatttgcaaagttttttagaagttagttatcgtgtattaagacatctagcacaacca

SEQ ID NO: 249002 - DNA, 612 bp, Artificial Sequence
  derived and/or modified sequence
atggctggaccggctactcagtccccgatgaaattgatggccctccaattgctcctctggcattccgctctgtggactgtacaggaagccaccccacttggaccggcgtcaagcctgcctcagtcgtttctcttgaagtgcctcgaacaggtcagaaagatccagggagatggtgcagcactgcaggaaaaactttgcgcgacttacaagctgtgccatcctgaggaacttgtcctgctcggacactcgctgggaatcccatgggcccccctctcatcatgcccgtcgcaagctctgcaattggctggatgtctgagccagctccatagcggcctttttctctaccagggcctgctccaggctctggagggaatctctcctgaactcgggccaaccctggataccctgcagttggacgtggcggacttcgccaccaccatttggcaacagatggaagagctgggtatggctccagcattgcaacctactcagggggcaatgccggctttcgcctcggcgttccagcggcgcgccgggggcgtgcttgtggcttcacatcttcaatccttcctggaggtgagctatagagtgctgaggcacttggcacagccg

SEQ ID NO: 249003 - DNA, 612 bp, Artificial Sequence
  derived and/or modified sequence
atggccggcccggctactcaatctccaatgaagcttatggctcttcagttgcttttatggcactcggctctatggaccgtccaggaagccacaccgctggggcctgcaagttcgttaccccaatcgttcttgctgaaatgtcttgagcaggttagaaagatccagggggatggcgccgcgctccaggagaagctgtgcgcgacatacaaactttgccacccggaggagttggtgctgctggggcatagcctaggaataccttgggccccgctgtcaagctgtcccagccaggcactgcagctggccgggtgtctttctcagttgcactctggcctctttctctaccagggactgctgcaagccctcgaaggcattagccccgaactcggcccgactctggatactctccaacttgacgtggcagattttgccacgactatatggcagcagatggaggagttgggcatggcacccgcactgcagcccactcagggagccatgccggcttttgcatcagccttccagcgcagggctggcggggtgctcgtggctagccacctccaatcttttctggaggtgtcatacagagtgctgcggcacctcgcccagcct

SEQ ID NO: 249004 - DNA, 612 bp, Artificial Sequence
  derived and/or modified sequence
atggcggggccggctacccaatcaccgatgaagctgatggcgttacagcttcttctgtggcactctgcgttgtggactgttcaagaagcgaccccgttggggccagcatcatcacttcctcaatcttttctgctcaaatgtctagaacaagtgaggaaaattcaaggcgatggcgcggccttacaggaaaaactgtgtgcgacttataagttgtgccacccggaggagttggtgttgttaggccatagtctaggaatcccatgggctccgttgtcatcgtgcccaagtcaagcactgcagctggccgggtgtctttctcagctgcactcgggccttttcttatatcaaggactgcttcaagcgctggagggtatctcccctgagctaggcccgactttggatacgcttcagcttgacgtagcagattttgctacgacgatttggcaacaaatggaagaattaggtatggcaccggcgttacaaccaacgcagggagcaatgcctgcgtttgcgtctgcgtttcaacgtcgtgcaggcggtgttttagttgcctctcacctgcaatcttttctggaggtctcataccgcgtcttgaggcacttagcacagcct

SEQ ID NO: 249005 - DNA, 612 bp, Artificial Sequence
  derived and/or modified sequence
atggcaggccccgcaacgcagagcccaatgaagctgatggctctgcagttgctgttgtggcactctgctctgtggacggttcaggaggctacccccctgggcccggcaagcagcctgccacagtctttcctcctgaagtgccttgaacaggttaggaaaatccagggcgacggcgctgctttgcaggagaagctttgtgcgacctacaagctgtgccacccagaagagctcgtgctgttgggtcactccctgggaatcccctgggccccacttagcagctgcccaagccaggctctccaactggctggttgtctgtctcagcttcattctggtcttttcctttatcagggcctgcttcaagctcttgaaggaataagccctgagctgggaccgacactggacacactgcagctggatgtagccgacttcgctacgactatctggcagcaaatggaagaactcgggatggccccggctctgcagccaacccagggtgcgatgccagccttcgcatcagctttccagcgcagggccggcggggtgcttgttgcgagtcaccttcaatcctttctggaagtatcatatagggtcctcaggcatctggcgcagcct

SEQ ID NO: 249006 - DNA, 612 bp, Artificial Sequence
  derived and/or modified sequence
atggcaggtccagccactcagtcaccaatgaaactgatggcgctccagctcctgctgtggcacagtgccttgtggaccgtgcaggaagctactccattaggtccggccagctccctgccacagagctttctgcttaagtgcctcgagcaggtgcgcaagatccaaggtgacggtgctgccctgcaagaaaaactgtgcgcaacatataaactttgtcatcccgaagaactggtactgctggggcacagcttgggtataccatgggccccgctgagctcctgccctagccaggctctgcaactggcgggttgcctgagccagctgcactctggtctgttcttgtatcagggattgttgcaagccctggaaggcattagcccagagcttggcccaacccttgacactttgcagctggacgtggccgacttcgcaaccacaatttggcaacagatggaggaactcggcatggccccggcactccaaccaactcagggtgccatgcctgcatttgcatcagcgtttcagcggcgtgccggcggggtgctggttgcaagccatctccagtcttttctcgaggtgtcctaccgtgtcctgcgtcatctagctcagcca

SEQ ID NO: 249007 - DNA, 612 bp, Artificial Sequence
  derived and/or modified sequence
atggctggccctgccacgcagtcccccatgaagctgatggcccttcaattactcctctggcattccgcactgtggacagtgcaggaagcgacaccgctcggacctgcctcttcactcccccaatccttcttgctcaaatgcctcgaacaggtgaggaagatccagggcgatggcgccgcactgcaggaaaagctgtgcgccacatataagctctgccaccctgaagaactggtcttgctgggacattctcttggaattccctgggcacctctatcatcttgtccctctcaggcactacagttagccgggtgtctgtcccagctccacagcggtctcttcttatatcaaggccttctgcaggcgctggaagggatctctcctgagcttgggcctaccctcgatacactgcagttagacgtggccgacttcgccaccaccatatggcagcaaatggaagagcttggcatggcacctgccttacagcccacccagggtgccatgcctgcctttgccagcgcatttcagcggcgggctggtggcgtgttggtagcctctcacttgcagtcatttctggaggtaagctatcgtgtacttaggcatctcgcccagcca

SEQ ID NO: 249008 - DNA, 612 bp, Artificial Sequence
  derived and/or modified sequence
atggccggcccggccactcaatcgccaatgaagctcatggctctgcagcttctcttgtggcactccgctttgtggaccgtccaagaagcgaccccgctgggtccggcctcctctcttcctcagtccttcttgctcaagtgcctcgagcaagtgcgcaagattcaaggggacggagccgctctccaggaaaagctctgtgccacgtacaaactctgccaccccgaggagctggtcctcctggggcatagcctgggcatcccatgggcgcctctgtcatcttgcccctcgcaagctctgcaactggccggttgtctgtcgcagttgcatagtggactcttcctgtaccaggggctgctgcaggccctggagggaatcagccctgagcttgggcccaccctcgacactcttcagctggatgtggcggatttcgcgactaccatctggcagcagatggaggagcttggcatggcgccagcgctgcagccgacccagggtgctatgccggcatttgcctcggcatttcaacgacgtgcgggtggagtgctggtggcctcccatctccagtccttcctggaagtctcataccgggtgctgcggcacctggcccaaccc

SEQ ID NO: 249009 - DNA, 612 bp, Artificial Sequence
  derived and/or modified sequence
atggctggccctgctacacaatcacctatgaagctgatggcccttcagttgctgctctggcactccgccttgtggacagttcaggaggccacacccctggggcccgcttcctcgctgccgcagtcgtttctattaaagtgccttgaacaagtaagaaagatccagggagatggcgcagctcttcaggagaaactttgcgctacctataagttgtgccatcctgaggagctggttctactcggccattcgttaggcataccctgggctccactgagtagctgtccaagtcaagcccttcagctagctggttgcctgtcccagctgcactccggcctgtttctctatcagggcctgttgcaggccctggagggcatctctccagaactgggaccaaccctggatacactgcagttggacgtggccgacttcgcgacaacaatctggcagcagatggaggaactgggtatggctcccgccctgcagcccacacaaggcgctatgccggcatttgccagcgccttccagcgaagggcagggggggtgcttgtcgcctcccacctgcagtcattcctcgaagtgtcatatcgggtactacgccacttagctcagcca

SEQ ID NO: 249010 - DNA, 612 bp, Artificial Sequence
  derived and/or modified sequence
atggcgggtcctgccacccagtcgcctatgaaactaatggcgcttcagttgttgctctggcactccgcactgtggaccgttcaggaagctacccctctcggaccggcttcttccctgccgcagtcgttcctgctcaagtgcttggagcaagtgcgaaagattcagggagacggagccgctctacaagagaagctttgcgccacctataaactgtgccatcctgaggagctggtgttgctcggccattcgttggggatcccctgggcgcccctcagttcctgcccatcccaagcactgcagctcgccggttgcctgagccagctccattctggcttgtttttgtaccagggcctgctgcaggctctcgaaggaatctcccccgaactgggtcccacactggataccctccagctggacgtggctgatttcgctaccaccatctggcagcagatggaagagcttggtatggcccctgctctccagccgacccagggtgctatgccggcattcgcctctgcattccagcgtagggcggggggggttcttgtggccagccacctgcagtccttcctggaggtgagctaccgcgtcctgcgtcacctggcccaacct

SEQ ID NO: 249011 - DNA, 612 bp, Artificial Sequence
  derived and/or modified sequence
atggccggccctgcaactcaatcacctatgaagctcatggcattgcagttgctcctctggcactcggcactttggaccgtgcaggaagcgacccccctgggacctgcaagctcgctgccacaatcgtttctgctcaagtgccttgaacaggtgagaaagatacagggagatggagccgcacttcaagaaaagctctgtgcgacgtataaactgtgccacccagaggaacttgtgctgctgggtcacagcctgggaattccctgggcacctctgtcctcttgcccttcccaagcacttcagcttgctggttgtctttcccaactgcattccggtcttttcctttaccagggactcctgcaagcactggaagggatttcaccggagctcggtcccaccctcgacaccctgcaacttgatgttgcagactttgccaccactatctggcaacaaatggaggaactcggaatggcacctgcactgcaacccacccagggcgccatgccagcatttgccagcgccttccagcgccgcgccggaggtgtgctggtggcctcccatttgcagagctttttggaggtgtcgtaccgcgtgctgagacacttggcccagcca

SEQ ID NO: 249012 - DNA, 612 bp, Artificial Sequence
  derived and/or modified sequence
atggcggggccggccactcagtcaccaatgaaactcatggcactgcagcttctcctctggcattccgcgctgtggacggtgcaagaggcgactcctctgggaccggcctcatcgctgccacaatcttttctcctgaaatgtctggagcaagtgcggaaaatccagggagacggcgccgctctccaagagaagctgtgcgctacctacaagctgtgccacccggaggaactcgttctgctcggccactcgctcggtatcccgtgggctcctctcagctcgtgcccgtcgcaagcgttgcaactggcaggctgcctgtcgcagttgcactcgggactcttcttgtatcagggcctgctccaggcactggaagggatcagcccggaactcggaccaactctcgacactctgcagctggacgtcgctgattttgctaccaccatctggcagcagatggaggagctgggtatggcgccggctctgcagccaacccaaggagccatgccggccttcgcgtcggccttccaacggcgggccgggggagtgctggtggcctcccacctgcagagctttctggaggtgtcgtacagggtgctgcgccacttggcacagccg

SEQ ID NO: 249013 - DNA, 612 bp, Artificial Sequence
  derived and/or modified sequence
atggccggacccgcgactcagagcccaatgaagctgatggctcttcagctgctgctgtggcattccgccctgtggaccgtccaggaggctactccgctgggaccggcatccagcctcccacagtcgtttcttctcaagtgcctggagcaggttcggaagatccagggcgacggagcagctctccaggaaaaactctgcgccacctacaagctctgtcacccggaggagctggtcctgctgggacactcgctggggattccctgggctccgctgtcgtcctgcccttctcaggcgctgcagctcgctggttgcctgagccagctgcactcgggactgttcctgtaccagggcttgcttcaggcactggaaggcatctcgcctgaactgggaccaaccctggacacgttgcagctggatgtggcagacttcgcgactactatctggcagcagatggaggaactgggaatggcgcccgccctgcagccgacccagggagcgatgcccgccttcgcctcggcgttccaaaggagagctggaggtgtgctggtcgcctcacacctgcagagctttctcgaagtgagctacagagtcctgcgccatttggctcagcct

SEQ ID NO: 249014 - DNA, 784 bp, Artificial Sequence
  derived and/or modified sequence
gggagatcagagagaaaagaagagtaagaagaaatataagagccaccatggccggtcccgcgacccaaagccccatgaaacttatggccctgcagttgctgctttggcactcggccctctggacagtccaagaagcgactcctctcggacctgcctcatcgttgccgcagtcattccttttgaagtgtctggagcaggtgcgaaagattcagggcgatggagccgcactccaagagaagctctgcgcgacatacaaactttgccatcccgaggagctcgtactgctcgggcacagcttggggattccctgggctcctctctcgtcctgtccgtcgcaggctttgcagttggcagggtgcctttcccagctccactccggtttgttcttgtatcagggactgctgcaagcccttgagggaatctcgccagaattgggcccgacgctggacacgttgcagctcgacgtggcggatttcgcaacaaccatctggcagcagatggaggaactggggatggcacccgcgctgcagcccacgcagggggcaatgccggcctttgcgtccgcgtttcagcgcagggcgggtggagtcctcgtagcgagccaccttcaatcatttttggaagtctcgtaccgggtgctgagacatcttgcgcagccgtgataataggctggagcctcggtggccatgcttcttgccccttgggcctccccccagcccctcctccccttcctgcacccgtacccccgtggtctttgaataaagtctgagtgggcggctctaga

SEQ ID NO: 249015 - DNA, 761 bp, Artificial Sequence
  derived and/or modified sequence
gggaaataagagagaaaagaagagtaagaagaaatataagagccaccatggccggtcccgcgacccaaagccccatgaaacttatggccctgcagttgctgctttggcactcggccctctggacagtccaagaagcgactcctctcggacctgcctcatcgttgccgcagtcattccttttgaagtgtctggagcaggtgcgaaagattcagggcgatggagccgcactccaagagaagctctgcgcgacatacaaactttgccatcccgaggagctcgtactgctcgggcacagcttggggattccctgggctcctctctcgtcctgtccgtcgcaggctttgcagttggcagggtgcctttcccagctccactccggtttgttcttgtatcagggactgctgcaagcccttgagggaatctcgccagaattgggcccgacgctggacacgttgcagctcgacgtggcggatttcgcaacaaccatctggcagcagatggaggaactggggatggcacccgcgctgcagcccacgcagggggcaatgccggcctttgcgtccgcgtttcagcgcagggcgggtggagtcctcgtagcgagccaccttcaatcatttttggaagtctcgtaccgggtgctgagacatcttgcgcagccgtgatgataagctgccttctgcggggcttgccttctggccatgcccttcttctctcccttgcacctgtacctcttggtctttgaataaagcctgagtaggaag

SEQ ID NO: 249016 - DNA, 783 bp, Artificial Sequence
  derived and/or modified sequence
gggaaataagagagaaaagaagagtaagaagaaatataagagccaccatggccggtcccgcgacccaaagccccatgaaacttatggccctgcagttgctgctttggcactcggccctctggacagtccaagaagcgactcctctcggacctgcctcatcgttgccgcagtcattccttttgaagtgtctggagcaggtgcgaaagattcagggcgatggagccgcactccaagagaagctctgcgcgacatacaaactttgccatcccgaggagctcgtactgctcgggcacagcttggggattccctgggctcctctctcgtcctgtccgtcgcaggctttgcagttggcagggtgcctttcccagctccactccggtttgttcttgtatcagggactgctgcaagcccttgagggaatctcgccagaattgggcccgacgctggacacgttgcagctcgacgtggcggatttcgcaacaaccatctggcagcagatggaggaactggggatggcacccgcgctgcagcccacgcagggggcaatgccggcctttgcgtccgcgtttcagcgcagggcgggtggagtcctcgtagcgagccaccttcaatcatttttggaagtctcgtaccgggtgctgagacatcttgcgcagccgtgatgataagctgccttctgcggggcttgccttctggccatgcccttcttctctcccttgcacctgtacctctcaaacaccattgtcacactccatggtctttgaataaagcctgagtaggaag

SEQ ID NO: 249017 - DNA, 821 bp, Artificial Sequence
  derived and/or modified sequence
gggaaataagagagaaaagaagagtaagaagaaatataagagccaccatggccggtcccgcgacccaaagccccatgaaacttatggccctgcagttgctgctttggcactcggccctctggacagtccaagaagcgactcctctcggacctgcctcatcgttgccgcagtcattccttttgaagtgtctggagcaggtgcgaaagattcagggcgatggagccgcactccaagagaagctctgcgcgacatacaaactttgccatcccgaggagctcgtactgctcgggcacagcttggggattccctgggctcctctctcgtcctgtccgtcgcaggctttgcagttggcagggtgcctttcccagctccactccggtttgttcttgtatcagggactgctgcaagcccttgagggaatctcgccagaattgggcccgacgctggacacgttgcagctcgacgtggcggatttcgcaacaaccatctggcagcagatggaggaactggggatggcacccgcgctgcagcccacgcagggggcaatgccggcctttgcgtccgcgtttcagcgcagggcgggtggagtcctcgtagcgagccaccttcaatcatttttggaagtctcgtaccgggtgctgagacatcttgcgcagccgtgatgataagctgccttctgcggggcttgccttctggccatgcccttcttctctcccttgcacctgtacctctcaaacaccattgtcacaaacaccattgtcacaaacaccattgtcacaaacaccattgtcatggtctttgaataaagcctgagtaggaag

SEQ ID NO: 249018 - DNA, 778 bp, Artificial Sequence
  derived and/or modified sequence
gggaattaacagagaaaagaagagtaagaagaaatataagagccaccatggccggtcccgcgacccaaagccccatgaaacttatggccctgcagttgctgctttggcactcggccctctggacagtccaagaagcgactcctctcggacctgcctcatcgttgccgcagtcattccttttgaagtgtctggagcaggtgcgaaagattcagggcgatggagccgcactccaagagaagctctgcgcgacatacaaactttgccatcccgaggagctcgtactgctcgggcacagcttggggattccctgggctcctctctcgtcctgtccgtcgcaggctttgcagttggcagggtgcctttcccagctccactccggtttgttcttgtatcagggactgctgcaagcccttgagggaatctcgccagaattgggcccgacgctggacacgttgcagctcgacgtggcggatttcgcaacaaccatctggcagcagatggaggaactggggatggcacccgcgctgcagcccacgcagggggcaatgccggcctttgcgtccgcgtttcagcgcagggcgggtggagtcctcgtagcgagccaccttcaatcatttttggaagtctcgtaccgggtgctgagacatcttgcgcagccgtgataataggctggagcctcggtggccatgcttcttgccccttgggcctccccccagcccctcctccccttcctgcacccgtacccccgtggtctttgaataaagtctgagtgggcggc

SEQ ID NO: 249019 - DNA, 778 bp, Artificial Sequence
  derived and/or modified sequence
gggaaattagacagaaaagaagagtaagaagaaatataagagccaccatggccggtcccgcgacccaaagccccatgaaacttatggccctgcagttgctgctttggcactcggccctctggacagtccaagaagcgactcctctcggacctgcctcatcgttgccgcagtcattccttttgaagtgtctggagcaggtgcgaaagattcagggcgatggagccgcactccaagagaagctctgcgcgacatacaaactttgccatcccgaggagctcgtactgctcgggcacagcttggggattccctgggctcctctctcgtcctgtccgtcgcaggctttgcagttggcagggtgcctttcccagctccactccggtttgttcttgtatcagggactgctgcaagcccttgagggaatctcgccagaattgggcccgacgctggacacgttgcagctcgacgtggcggatttcgcaacaaccatctggcagcagatggaggaactggggatggcacccgcgctgcagcccacgcagggggcaatgccggcctttgcgtccgcgtttcagcgcagggcgggtggagtcctcgtagcgagccaccttcaatcatttttggaagtctcgtaccgggtgctgagacatcttgcgcagccgtgataataggctggagcctcggtggccatgcttcttgccccttgggcctccccccagcccctcctccccttcctgcacccgtacccccgtggtctttgaataaagtctgagtgggcggc

SEQ ID NO: 249020 - DNA, 778 bp, Artificial Sequence
  derived and/or modified sequence
gggaaattagagagtaaagaacagtaagtagaattaaaagagccaccatggccggtcccgcgacccaaagccccatgaaacttatggccctgcagttgctgctttggcactcggccctctggacagtccaagaagcgactcctctcggacctgcctcatcgttgccgcagtcattccttttgaagtgtctggagcaggtgcgaaagattcagggcgatggagccgcactccaagagaagctctgcgcgacatacaaactttgccatcccgaggagctcgtactgctcgggcacagcttggggattccctgggctcctctctcgtcctgtccgtcgcaggctttgcagttggcagggtgcctttcccagctccactccggtttgttcttgtatcagggactgctgcaagcccttgagggaatctcgccagaattgggcccgacgctggacacgttgcagctcgacgtggcggatttcgcaacaaccatctggcagcagatggaggaactggggatggcacccgcgctgcagcccacgcagggggcaatgccggcctttgcgtccgcgtttcagcgcagggcgggtggagtcctcgtagcgagccaccttcaatcatttttggaagtctcgtaccgggtgctgagacatcttgcgcagccgtgataataggctggagcctcggtggccatgcttcttgccccttgggcctccccccagcccctcctccccttcctgcacccgtacccccgtggtctttgaataaagtctgagtgggcggc

SEQ ID NO: 249021 - DNA, 778 bp, Artificial Sequence
  derived and/or modified sequence
gggaaataagagagaatagaagagtaagaagaaatataagagccaccatggccggtcccgcgacccaaagccccatgaaacttatggccctgcagttgctgctttggcactcggccctctggacagtccaagaagcgactcctctcggacctgcctcatcgttgccgcagtcattccttttgaagtgtctggagcaggtgcgaaagattcagggcgatggagccgcactccaagagaagctctgcgcgacatacaaactttgccatcccgaggagctcgtactgctcgggcacagcttggggattccctgggctcctctctcgtcctgtccgtcgcaggctttgcagttggcagggtgcctttcccagctccactccggtttgttcttgtatcagggactgctgcaagcccttgagggaatctcgccagaattgggcccgacgctggacacgttgcagctcgacgtggcggatttcgcaacaaccatctggcagcagatggaggaactggggatggcacccgcgctgcagcccacgcagggggcaatgccggcctttgcgtccgcgtttcagcgcagggcgggtggagtcctcgtagcgagccaccttcaatcatttttggaagtctcgtaccgggtgctgagacatcttgcgcagccgtgataataggctggagcctcggtggccatgcttcttgccccttgggcctccccccagcccctcctccccttcctgcacccgtacccccgtggtctttgaataaagtctgagtgggcggc

SEQ ID NO: 249022 - DNA, 1021 bp, Artificial Sequence
  derived and/or modified sequence
gggaaataagagagaaaagaagagtaagaagaaatataagagccaccatggccggtcccgcgacccaaagccccatgaaacttatggccctgcagttgctgctttggcactcggccctctggacagtccaagaatcatcctcgagcaaggcccctccgccctcactgccatcgccaagccgcctgccgggaccttccgacaccccgatcctcccgcaggcgactcctctcggacctgcctcatcgttgccgcagtcattccttttgaagtgtctggagcaggtgcgaaagattcagggcgatggagccgcactccaagagaagctctgcgcgacatacaaactttgccatcccgaggagctcgtactgctcgggcacagcttggggattccctgggctcctctctcgtcctgtccgtcgcaggctttgcagttggcagggtgcctttcccagctccactccggtttgttcttgtatcagggactgctgcaagcccttgagggaatctcgccagaattgggcccgacgctggacacgttgcagctcgacgtggcggatttcgcaacaaccatctggcagcagatggaggaactggggatggcacccgcgctgcagcccacgcagggggcaatgccggcctttgcgtccgcgtttcagcgcagggcgggtggagtcctcgtagcgagccaccttcaatcatttttggaagtctcgtaccgggtgctgagacatcttgcgcagccgtcatcctcgagcaaggcccctccgccctcactgccatcgccaagccgcctgccgggaccttccgacaccccgatcctcccgcagtcatcctcgagcaaggcccctccgccctcactgccatcgccaagccgcctgccgggaccttccgacaccccgatcctcccgcaggctggagcctcggtggccatgcttcttgccccttgggcctccccccagcccctcctccccttcctgcacccgtacccccgtggtctttgaataaagtctgagtgggcggc

SEQ ID NO: 249023 - DNA, 1012 bp, Artificial Sequence
  derived and/or modified sequence
gggaaataagagagaaaagaagagtaagaagaaatataagagccaccatggccactgggtcgaggaccagcctgttgttggcctttgggctgctttgtctgccatggctccaagagggatccgcatcatcctcgagcaaggcccctccgccctcactgccatcgccaagccgcctgccgggaccttccgacaccccgatcctcccgcaggcgactcctctcggacctgcctcatcgttgccgcagtcattccttttgaagtgtctggagcaggtgcgaaagattcagggcgatggagccgcactccaagagaagctctgcgcgacatacaaactttgccatcccgaggagctcgtactgctcgggcacagcttggggattccctgggctcctctctcgtcctgtccgtcgcaggctttgcagttggcagggtgcctttcccagctccactccggtttgttcttgtatcagggactgctgcaagcccttgagggaatctcgccagaattgggcccgacgctggacacgttgcagctcgacgtggcggatttcgcaacaaccatctggcagcagatggaggaactggggatggcacccgcgctgcagcccacgcagggggcaatgccggcctttgcgtccgcgtttcagcgcagggcgggtggagtcctcgtagcgagccaccttcaatcatttttggaagtctcgtaccgggtgctgagacatcttgcgcagccgtcatcctcgagcaaggcccctccgccctcactgccatcgccaagccgcctgccgggaccttccgacaccccgatcctcccgcagtcatcctcgagcaaggcccctccgccctcactgccatcgccaagccgcctgccgggaccttccgacaccccgatcctcccgcaggctggagcctcggtggccatgcttcttgccccttgggcctccccccagcccctcctccccttcctgcacccgtacccccgtggtctttgaataaagtctgagtgggcggc

SEQ ID NO: 249024 - DNA, 853 bp, Artificial Sequence
  derived and/or modified sequence
gggaaataagagagaaaagaagagtaagaagaaatataagagccaccatggccggtcccgcgacccaaagccccatgaaacttatggccctgcagttgctgctttggcactcggccctctggacagtccaagaatcatcctcgagcaaggcccctccgccctcactgccatcgccaagccgcctgccgggaccttccgacaccccgatcctcccgcaggcgactcctctcggacctgcctcatcgttgccgcagtcattccttttgaagtgtctggagcaggtgcgaaagattcagggcgatggagccgcactccaagagaagctctgcgcgacatacaaactttgccatcccgaggagctcgtactgctcgggcacagcttggggattccctgggctcctctctcgtcctgtccgtcgcaggctttgcagttggcagggtgcctttcccagctccactccggtttgttcttgtatcagggactgctgcaagcccttgagggaatctcgccagaattgggcccgacgctggacacgttgcagctcgacgtggcggatttcgcaacaaccatctggcagcagatggaggaactggggatggcacccgcgctgcagcccacgcagggggcaatgccggcctttgcgtccgcgtttcagcgcagggcgggtggagtcctcgtagcgagccaccttcaatcatttttggaagtctcgtaccgggtgctgagacatcttgcgcagccggctggagcctcggtggccatgcttcttgccccttgggcctccccccagcccctcctccccttcctgcacccgtacccccgtggtctttgaataaagtctgagtgggcggc

SEQ ID NO: 249025 - DNA, 937 bp, Artificial Sequence
  derived and/or modified sequence
gggaaataagagagaaaagaagagtaagaagaaatataagagccaccatggccggtcccgcgacccaaagccccatgaaacttatggccctgcagttgctgctttggcactcggccctctggacagtccaagaagcgactcctctcggacctgcctcatcgttgccgcagtcattccttttgaagtgtctggagcaggtgcgaaagattcagggcgatggagccgcactccaagagaagctctgcgcgacatacaaactttgccatcccgaggagctcgtactgctcgggcacagcttggggattccctgggctcctctctcgtcctgtccgtcgcaggctttgcagttggcagggtgcctttcccagctccactccggtttgttcttgtatcagggactgctgcaagcccttgagggaatctcgccagaattgggcccgacgctggacacgttgcagctcgacgtggcggatttcgcaacaaccatctggcagcagatggaggaactggggatggcacccgcgctgcagcccacgcagggggcaatgccggcctttgcgtccgcgtttcagcgcagggcgggtggagtcctcgtagcgagccaccttcaatcatttttggaagtctcgtaccgggtgctgagacatcttgcgcagccgtcatcctcgagcaaggcccctccgccctcactgccatcgccaagccgcctgccgggaccttccgacaccccgatcctcccgcagtcatcctcgagcaaggcccctccgccctcactgccatcgccaagccgcctgccgggaccttccgacaccccgatcctcccgcaggctggagcctcggtggccatgcttcttgccccttgggcctccccccagcccctcctccccttcctgcacccgtacccccgtggtctttgaataaagtctgagtgggcggc

SEQ ID NO: 249026 - DNA, 862 bp, Artificial Sequence
  derived and/or modified sequence
gggaaataagagagaaaagaagagtaagaagaaatataagagccaccatggccggtcccgcgacccaaagccccatgaaacttatggccctgcagttgctgctttggcactcggccctctggacagtccaagaatcatcctcgagcaaggcccctccgccctcactgccatcgccaagccgcctgccgggaccttccgacaccccgatcctcccgcaggcgactcctctcggacctgcctcatcgttgccgcagtcattccttttgaagtgtctggagcaggtgcgaaagattcagggcgatggagccgcactccaagagaagctctgcgcgacatacaaactttgccatcccgaggagctcgtactgctcgggcacagcttggggattccctgggctcctctctcgtcctgtccgtcgcaggctttgcagttggcagggtgcctttcccagctccactccggtttgttcttgtatcagggactgctgcaagcccttgagggaatctcgccagaattgggcccgacgctggacacgttgcagctcgacgtggcggatttcgcaacaaccatctggcagcagatggaggaactggggatggcacccgcgctgcagcccacgcagggggcaatgccggcctttgcgtccgcgtttcagcgcagggcgggtggagtcctcgtagcgagccaccttcaatcatttttggaagtctcgtaccgggtgctgagacatcttgcgcagccgtgataataggctggagcctcggtggccatgcttcttgccccttgggcctccccccagcccctcctccccttcctgcacccgtacccccgtggtctttgaataaagtctgagtgggcggc

SEQ ID NO: 249027 - DNA, 946 bp, Artificial Sequence
  derived and/or modified sequence
gggaaataagagagaaaagaagagtaagaagaaatataagagccaccatggccggtcccgcgacccaaagccccatgaaacttatggccctgcagttgctgctttggcactcggccctctggacagtccaagaagcgactcctctcggacctgcctcatcgttgccgcagtcattccttttgaagtgtctggagcaggtgcgaaagattcagggcgatggagccgcactccaagagaagctctgcgcgacatacaaactttgccatcccgaggagctcgtactgctcgggcacagcttggggattccctgggctcctctctcgtcctgtccgtcgcaggctttgcagttggcagggtgcctttcccagctccactccggtttgttcttgtatcagggactgctgcaagcccttgagggaatctcgccagaattgggcccgacgctggacacgttgcagctcgacgtggcggatttcgcaacaaccatctggcagcagatggaggaactggggatggcacccgcgctgcagcccacgcagggggcaatgccggcctttgcgtccgcgtttcagcgcagggcgggtggagtcctcgtagcgagccaccttcaatcatttttggaagtctcgtaccgggtgctgagacatcttgcgcagccgtcatcctcgagcaaggcccctccgccctcactgccatcgccaagccgcctgccgggaccttccgacaccccgatcctcccgcagtcatcctcgagcaaggcccctccgccctcactgccatcgccaagccgcctgccgggaccttccgacaccccgatcctcccgcagtgataataggctggagcctcggtggccatgcttcttgccccttgggcctccccccagcccctcctccccttcctgcacccgtacccccgtggtctttgaataaagtctgagtgggcggc

SEQ ID NO: 249028 - DNA, 1512 bp, Artificial Sequence
  derived and/or modified sequence
taatacgactcactatagggaaataagagagaaaagaagagtaagaagaaatataagagggtctttcccctctcgccaaaggaatgcaaggtctgttgaatgtcgtgaaggaagcagttcctctggaagcttcttgaagacaaacaacgtctgtagcgaccctttgcaggcagcggaaccccccacctggcgacaggtgcctctgcggccaaaagccacgtgtataagatacacctgcaaaggcggcacaaccccagtgccacgttgtgagttggatagttgtggaaagagtcaaatggctcacctcaagcgtattcaacaaggggctgaaggatgcccagaaggtaccccattgtatgggatctgatctggggcctcggtgcacatgctttacatgtgtttagtcgaggttaaaaaacgtctaggccccccgaaccacggggacgtggttttcctttgaaaaacacgatgataatatggccggtcccgcgacccaaagccccatgaaacttatggccctgcagttgctgctttggcactcggccctctggacagtccaagaagcgactcctctcggacctgcctcatcgttgccgcagtcattccttttgaagtgtctggagcaggtgcgaaagattcagggcgatggagccgcactccaagagaagctctgcgcgacatacaaactttgccatcccgaggagctcgtactgctcgggcacagcttggggattccctgggctcctctctcgtcctgtccgtcgcaggctttgcagttggcagggtgcctttcccagctccactccggtttgttcttgtatcagggactgctgcaagcccttgagggaatctcgccagaattgggcccgacgctggacacgttgcagctcgacgtggcggatttcgcaacaaccatctggcagcagatggaggaactggggatggcacccgcgctgcagcccacgcagggggcaatgccggcctttgcgtccgcgtttcagcgcagggcgggtggagtcctcgtagcgagccaccttcaatcatttttggaagtctcgtaccgggtgctgagacatcttgcgcagccgtgataataggctggagcctcggtggccatgcttcttgccccttgggcctccccccagcccctcctccccttcctgcacccgtacccccgtggtctttgaataaagtctgagtgggcggcaaaaaaaaaaaaaaaaaaaaaaaaaaaaaaaaaaaaaaaaaaaaaaaaaaaaaaaaaaaaaaaaaaaaaaaaaaaaaaaaggcgcgcctcgtgaggatctatttccggtgaattcctcgagactagttctagagcggccgcggatcccgcccctctccctcccccccccctaacgttactggccgaagccgcttggaataaggccggtgtgcgtttgtctatatgttattttccaccatattgccgtcttttggcaatgtgagggcccggaaacctggccctgtcttcttgacgagcattcctag

SEQ ID NO: 249029 - DNA, 918 bp, Artificial Sequence
  derived and/or modified sequence
gggaaataagagagaaaagaagagtaagaagaaatataagagccaccatggccggtcccgcgacccaaagccccatgaaacttatggccctgcagttgctgctttggcactcggccctctggacagtccaagaagcgactcctctcggacctgcctcatcgttgccgcagtcattccttttgaagtgtctggagcaggtgcgaaagattcagggcgatggagccgcactccaagagaagctctgcgcgacatacaaactttgccatcccgaggagctcgtactgctcgggcacagcttggggattccctgggctcctctctcgtcctgtccgtcgcaggctttgcagttggcagggtgcctttcccagctccactccggtttgttcttgtatcagggactgctgcaagcccttgagggaatctcgccagaattgggcccgacgctggacacgttgcagctcgacgtggcggatttcgcaacaaccatctggcagcagatggaggaactggggatggcacccgcgctgcagcccacgcagggggcaatgccggcctttgcgtccgcgtttcagcgcagggcgggtggagtcctcgtagcgagccaccttcaatcatttttggaagtctcgtaccgggtgctgagacatcttgcgcagccgtgataataggctggagcctcggtggccatgcttcttgccccttgggcctccccccagcccctcctccccttcctgcacccgtacccccgtggtctttgaataaagtctgagtgggcggcaaaaaaaaaaaaaaaaaaaaaaaaaaaaaaaaaaaaaaaaaaaaaaaaaaaaaaaaaaaaaaaaaaaaaaaaaaaaaaaaaaaaaaaaaaaaaaaaaaaaaaaaaaaaaaaaaaaaaaaaaaaaaaaaaaaaaaaaaaaa

SEQ ID NO: 249030 - DNA, 824 bp, Artificial Sequence
  derived and/or modified sequence
tcaagcttttggaccctcgtacagaagctaatacgactcactatagggaaataagagagaaaagaagagtaagaagaaatataagagccaccatggccggtcccgcgacccaaagccccatgaaacttatggccctgcagttgctgctttggcactcggccctctggacagtccaagaagcgactcctctcggacctgcctcatcgttgccgcagtcattccttttgaagtgtctggagcaggtgcgaaagattcagggcgatggagccgcactccaagagaagctctgcgcgacatacaaactttgccatcccgaggagctcgtactgctcgggcacagcttggggattccctgggctcctctctcgtcctgtccgtcgcaggctttgcagttggcagggtgcctttcccagctccactccggtttgttcttgtatcagggactgctgcaagcccttgagggaatctcgccagaattgggcccgacgctggacacgttgcagctcgacgtggcggatttcgcaacaaccatctggcagcagatggaggaactggggatggcacccgcgctgcagcccacgcagggggcaatgccggcctttgcgtccgcgtttcagcgcagggcgggtggagtcctcgtagcgagccaccttcaatcatttttggaagtctcgtaccgggtgctgagacatcttgcgcagccgtgataataggctggagcctcggtggccatgcttcttgccccttgggcctccccccagcccctcctccccttcctgcacccgtacccccgtggtctttgaataaagtctgagtgggcggct

SEQ ID NO: 249031 - RNA, 852 nt, Artificial Sequence
  derived and/or modified sequence
agcuuuuggacccucguacagaagcuaauacgacucacuauagggaaauaagagagaaaagaagaguaagaagaaauauaagagccaccauggccggucccgcgacccaaagccccaugaaacuuauggcccugcaguugcugcuuuggcacucggcccucuggacaguccaagaagcgacuccucucggaccugccucaucguugccgcagucauuccuuuugaagugucuggagcaggugcgaaagauucagggcgauggagccgcacuccaagagaagcucugcgcgacauacaaacuuugccaucccgaggagcucguacugcucgggcacagcuuggggauucccugggcuccucucucguccuguccgucgcaggcuuugcaguuggcagggugccuuucccagcuccacuccgguuuguucuuguaucagggacugcugcaagcccuugagggaaucucgccagaauugggcccgacgcuggacacguugcagcucgacguggcggauuucgcaacaaccaucuggcagcagauggaggaacuggggauggcacccgcgcugcagcccacgcagggggcaaugccggccuuugcguccgcguuucagcgcagggcggguggaguccucguagcgagccaccuucaaucauuuuuggaagucucguaccgggugcugagacaucuugcgcagccgugaagcgcugccuucugcggggcuugccuucuggccaugcccuucuucucucccuugcaccuguaccucuuggucuuugaauaaagccugaguaggaaggcggccgcucgagcaugcaucuagagggcccaauucgcccuauucgaagucg

SEQ ID NO: 249032 - RNA, 758 nt, Artificial Sequence
  derived and/or modified sequence
gggaaauaagagagaaaagaagaguaagaagaaauauaagagccaccauggccggucccgcgacccaaagccccaugaaacuuauggcccugcaguugcugcuuuggcacucggcccucuggacaguccaagaagcgacuccucucggaccugccucaucguugccgcagucauuccuuuugaagugucuggagcaggugcgaaagauucagggcgauggagccgcacuccaagagaagcucugcgcgacauacaaacuuugccaucccgaggagcucguacugcucgggcacagcuuggggauucccugggcuccucucucguccuguccgucgcaggcuuugcaguuggcagggugccuuucccagcuccacuccgguuuguucuuguaucagggacugcugcaagcccuugagggaaucucgccagaauugggcccgacgcuggacacguugcagcucgacguggcggauuucgcaacaaccaucuggcagcagauggaggaacuggggauggcacccgcgcugcagcccacgcagggggcaaugccggccuuugcguccgcguuucagcgcagggcggguggaguccucguagcgagccaccuucaaucauuuuuggaagucucguaccgggugcugagacaucuugcgcagccgugaagcgcugccuucugcggggcuugccuucuggccaugcccuucuucucucccuugcaccuguaccucuuggucuuugaauaaagccugaguaggaag

SEQ ID NO: 249033 - RNA, 758 nt, Artificial Sequence
  derived and/or modified sequence
gggaaauaagagagaaaagaagaguaagaagaaauauaagagccaccauggccggucccgcgacccaaagccccaugaaacuuauggcccugcaguugcugcuuuggcacucggcccucuggacaguccaagaagcgacuccucucggaccugccucaucguugccgcagucauuccuuuugaagugucuggagcaggugcgaaagauucagggcgauggagccgcacuccaagagaagcucugcgcgacauacaaacuuugccaucccgaggagcucguacugcucgggcacagcuuggggauucccugggcuccucucucguccuguccgucgcaggcuuugcaguuggcagggugccuuucccagcuccacuccgguuuguucuuguaucagggacugcugcaagcccuugagggaaucucgccagaauugggcccgacgcuggacacguugcagcucgacguggcggauuucgcaacaaccaucuggcagcagauggaggaacuggggauggcacccgcgcugcagcccacgcagggggcaaugccggccuuugcguccgcguuucagcgcagggcggguggaguccucguagcgagccaccuucaaucauuuuuggaagucucguaccgggugcugagacaucuugcgcagccgugauaagcugccuucugcggggcuugccuucuggccaugcccuucuucucucccuugcaccuguaccucuuggucuuugaauaaagccugaguaggaag

SEQ ID NO: 249034 - RNA, 780 nt, Artificial Sequence
  derived and/or modified sequence
gggaaauaagagagaaaagaagaguaagaagaaauauaagagccaccauggccggucccgcgacccaaagccccaugaaacuuauggcccugcaguugcugcuuuggcacucggcccucuggacaguccaagaagcgacuccucucggaccugccucaucguugccgcagucauuccuuuugaagugucuggagcaggugcgaaagauucagggcgauggagccgcacuccaagagaagcucugcgcgacauacaaacuuugccaucccgaggagcucguacugcucgggcacagcuuggggauucccugggcuccucucucguccuguccgucgcaggcuuugcaguuggcagggugccuuucccagcuccacuccgguuuguucuuguaucagggacugcugcaagcccuugagggaaucucgccagaauugggcccgacgcuggacacguugcagcucgacguggcggauuucgcaacaaccaucuggcagcagauggaggaacuggggauggcacccgcgcugcagcccacgcagggggcaaugccggccuuugcguccgcguuucagcgcagggcggguggaguccucguagcgagccaccuucaaucauuuuuggaagucucguaccgggugcugagacaucuugcgcagccgugauaagcugccuucugcggggcuugccuucuggccaugcccuucuucucucccuugcaccuguaccucucaaacaccauugucacacuccauggucuuugaauaaagccugaguaggaag

SEQ ID NO: 249035 - RNA, 818 nt, Artificial Sequence
  derived and/or modified sequence
gggaaauaagagagaaaagaagaguaagaagaaauauaagagccaccauggccggucccgcgacccaaagccccaugaaacuuauggcccugcaguugcugcuuuggcacucggcccucuggacaguccaagaagcgacuccucucggaccugccucaucguugccgcagucauuccuuuugaagugucuggagcaggugcgaaagauucagggcgauggagccgcacuccaagagaagcucugcgcgacauacaaacuuugccaucccgaggagcucguacugcucgggcacagcuuggggauucccugggcuccucucucguccuguccgucgcaggcuuugcaguuggcagggugccuuucccagcuccacuccgguuuguucuuguaucagggacugcugcaagcccuugagggaaucucgccagaauugggcccgacgcuggacacguugcagcucgacguggcggauuucgcaacaaccaucuggcagcagauggaggaacuggggauggcacccgcgcugcagcccacgcagggggcaaugccggccuuugcguccgcguuucagcgcagggcggguggaguccucguagcgagccaccuucaaucauuuuuggaagucucguaccgggugcugagacaucuugcgcagccgugauaagcugccuucugcggggcuugccuucuggccaugcccuucuucucucccuugcaccuguaccucucaaacaccauugucacaaacaccauugucacaaacaccauugucacaaacaccauugucauggucuuugaauaaagccugaguaggaag

SEQ ID NO: 249036 - RNA, 782 nt, Artificial Sequence
  derived and/or modified sequence
gggaaauaagagagaaaagaagaguaagaagaaauauaagagccaccauggccggucccgcgacccaaagccccaugaaacuuauggcccugcaguugcugcuuuggcacucggcccucuggacaguccaagaagcgacuccucucggaccugccucaucguugccgcagucauuccuuuugaagugucuggagcaggugcgaaagauucagggcgauggagccgcacuccaagagaagcucugcgcgacauacaaacuuugccaucccgaggagcucguacugcucgggcacagcuuggggauucccugggcuccucucucguccuguccgucgcaggcuuugcaguuggcagggugccuuucccagcuccacuccgguuuguucuuguaucagggacugcugcaagcccuugagggaaucucgccagaauugggcccgacgcuggacacguugcagcucgacguggcggauuucgcaacaaccaucuggcagcagauggaggaacuggggauggcacccgcgcugcagcccacgcagggggcaaugccggccuuugcguccgcguuucagcgcagggcggguggaguccucguagcgagccaccuucaaucauuuuuggaagucucguaccgggugcugagacaucuugcgcagccgugauaauaggcugccuucugcggggcuugccuucuggccaugcccuucuucucucccuugcaccuguaccucuaguagugcuuucuacuuuauguggucuuugaauaaagccugaguaggaag

SEQ ID NO: 249037 - RNA, 768 nt, Artificial Sequence
  derived and/or modified sequence
gggaaauaagagagaaaagaagaguaagaagaaauauaagagccaccauggccggucccgcgacccaaagccccaugaaacuuauggcccugcaguugcugcuuuggcacucggcccucuggacaguccaagaagcgacuccucucggaccugccucaucguugccgcagucauuccuuuugaagugucuggagcaggugcgaaagauucagggcgauggagccgcacuccaagagaagcucugcgcgacauacaaacuuugccaucccgaggagcucguacugcucgggcacagcuuggggauucccugggcuccucucucguccuguccgucgcaggcuuugcaguuggcagggugccuuucccagcuccacuccgguuuguucuuguaucagggacugcugcaagcccuugagggaaucucgccagaauugggcccgacgcuggacacguugcagcucgacguggcggauuucgcaacaaccaucuggcagcagauggaggaacuggggauggcacccgcgcugcagcccacgcagggggcaaugccggccuuugcguccgcguuucagcgcagggcggguggaguccucguagcgagccaccuucaaucauuuuuggaagucucguaccgggugcugagacaucuugcgcagccgugauaauaggcugccuucugcggggcuugccuucuggccaugcccuucuucucucccuugcaccuguaccucuacuuuauuggucuuugaauaaagccugaguaggaag

SEQ ID NO: 249038 - RNA, 775 nt, Artificial Sequence
  derived and/or modified sequence
gggaaauaagagagaaaagaagaguaagaagaaauauaagagccaccauggccggucccgcgacccaaagccccaugaaacuuauggcccugcaguugcugcuuuggcacucggcccucuggacaguccaagaagcgacuccucucggaccugccucaucguugccgcagucauuccuuuugaagugucuggagcaggugcgaaagauucagggcgauggagccgcacuccaagagaagcucugcgcgacauacaaacuuugccaucccgaggagcucguacugcucgggcacagcuuggggauucccugggcuccucucucguccuguccgucgcaggcuuugcaguuggcagggugccuuucccagcuccacuccgguuuguucuuguaucagggacugcugcaagcccuugagggaaucucgccagaauugggcccgacgcuggacacguugcagcucgacguggcggauuucgcaacaaccaucuggcagcagauggaggaacuggggauggcacccgcgcugcagcccacgcagggggcaaugccggccuuugcguccgcguuucagcgcagggcggguggaguccucguagcgagccaccuucaaucauuuuuggaagucucguaccgggugcugagacaucuugcgcagccgugauaauaggcugccuucugcggggcuugccuucuggccaugcccuucuucucucccuugcaccuguaccucuaguagugcuuucuguggucuuugaauaaagccugaguaggaag

SEQ ID NO: 249039 - RNA, 784 nt, Artificial Sequence
  derived and/or modified sequence
gggaaauaagagagaaaagaagaguaagaagaaauauaagagccaccauggccggucccgcgacccaaagccccaugaaacuuauggcccugcaguugcugcuuuggcacucggcccucuggacaguccaagaagcgacuccucucggaccugccucaucguugccgcagucauuccuuuugaagugucuggagcaggugcgaaagauucagggcgauggagccgcacuccaagagaagcucugcgcgacauacaaacuuugccaucccgaggagcucguacugcucgggcacagcuuggggauucccugggcuccucucucguccuguccgucgcaggcuuugcaguuggcagggugccuuucccagcuccacuccgguuuguucuuguaucagggacugcugcaagcccuugagggaaucucgccagaauugggcccgacgcuggacacguugcagcucgacguggcggauuucgcaacaaccaucuggcagcagauggaggaacuggggauggcacccgcgcugcagcccacgcagggggcaaugccggccuuugcguccgcguuucagcgcagggcggguggaguccucguagcgagccaccuucaaucauuuuuggaagucucguaccgggugcugagacaucuugcgcagccgugauaauaggcugccuucugcggggcuugccuucuggccaugcccuucuucucucccuugcaccuguaccucuuccauaaaguaggaaacacuacauggucuuugaauaaagccugaguaggaag

SEQ ID NO: 249040 - RNA, 768 nt, Artificial Sequence
  derived and/or modified sequence
gggaaauaagagagaaaagaagaguaagaagaaauauaagagccaccauggccggucccgcgacccaaagccccaugaaacuuauggcccugcaguugcugcuuuggcacucggcccucuggacaguccaagaagcgacuccucucggaccugccucaucguugccgcagucauuccuuuugaagugucuggagcaggugcgaaagauucagggcgauggagccgcacuccaagagaagcucugcgcgacauacaaacuuugccaucccgaggagcucguacugcucgggcacagcuuggggauucccugggcuccucucucguccuguccgucgcaggcuuugcaguuggcagggugccuuucccagcuccacuccgguuuguucuuguaucagggacugcugcaagcccuugagggaaucucgccagaauugggcccgacgcuggacacguugcagcucgacguggcggauuucgcaacaaccaucuggcagcagauggaggaacuggggauggcacccgcgcugcagcccacgcagggggcaaugccggccuuugcguccgcguuucagcgcagggcggguggaguccucguagcgagccaccuucaaucauuuuuggaagucucguaccgggugcugagacaucuugcgcagccgugauaauaggcugccuucugcggggcuugccuucuggccaugcccuucuucucucccuugcaccuguaccucuacacuacuggucuuugaauaaagccugaguaggaag

SEQ ID NO: 249041 - RNA, 777 nt, Artificial Sequence
  derived and/or modified sequence
gggaaauaagagagaaaagaagaguaagaagaaauauaagagccaccauggccggucccgcgacccaaagccccaugaaacuuauggcccugcaguugcugcuuuggcacucggcccucuggacaguccaagaagcgacuccucucggaccugccucaucguugccgcagucauuccuuuugaagugucuggagcaggugcgaaagauucagggcgauggagccgcacuccaagagaagcucugcgcgacauacaaacuuugccaucccgaggagcucguacugcucgggcacagcuuggggauucccugggcuccucucucguccuguccgucgcaggcuuugcaguuggcagggugccuuucccagcuccacuccgguuuguucuuguaucagggacugcugcaagcccuugagggaaucucgccagaauugggcccgacgcuggacacguugcagcucgacguggcggauuucgcaacaaccaucuggcagcagauggaggaacuggggauggcacccgcgcugcagcccacgcagggggcaaugccggccuuugcguccgcguuucagcgcagggcggguggaguccucguagcgagccaccuucaaucauuuuuggaagucucguaccgggugcugagacaucuugcgcagccgugauaauaggcugccuucugcggggcuugccuucuggccaugcccuucuucucucccuugcaccuguaccucuuccauaaaguaggaaauggucuuugaauaaagccugaguaggaag

SEQ ID NO: 249042 - RNA, 783 nt, Artificial Sequence
  derived and/or modified sequence
gggaaauaagagagaaaagaagaguaagaagaaauauaagagccaccauggccggucccgcgacccaaagccccaugaaacuuauggcccugcaguugcugcuuuggcacucggcccucuggacaguccaagaagcgacuccucucggaccugccucaucguugccgcagucauuccuuuugaagugucuggagcaggugcgaaagauucagggcgauggagccgcacuccaagagaagcucugcgcgacauacaaacuuugccaucccgaggagcucguacugcucgggcacagcuuggggauucccugggcuccucucucguccuguccgucgcaggcuuugcaguuggcagggugccuuucccagcuccacuccgguuuguucuuguaucagggacugcugcaagcccuugagggaaucucgccagaauugggcccgacgcuggacacguugcagcucgacguggcggauuucgcaacaaccaucuggcagcagauggaggaacuggggauggcacccgcgcugcagcccacgcagggggcaaugccggccuuugcguccgcguuucagcgcagggcggguggaguccucguagcgagccaccuucaaucauuuuuggaagucucguaccgggugcugagacaucuugcgcagccgugauaauaggcugccuucugcggggcuugccuucuggccaugcccuucuucucucccuugcaccuguaccucuaacccauggaauucaguucucauggucuuugaauaaagccugaguaggaag

SEQ ID NO: 249043 - RNA, 768 nt, Artificial Sequence
  derived and/or modified sequence
gggaaauaagagagaaaagaagaguaagaagaaauauaagagccaccauggccggucccgcgacccaaagccccaugaaacuuauggcccugcaguugcugcuuuggcacucggcccucuggacaguccaagaagcgacuccucucggaccugccucaucguugccgcagucauuccuuuugaagugucuggagcaggugcgaaagauucagggcgauggagccgcacuccaagagaagcucugcgcgacauacaaacuuugccaucccgaggagcucguacugcucgggcacagcuuggggauucccugggcuccucucucguccuguccgucgcaggcuuugcaguuggcagggugccuuucccagcuccacuccgguuuguucuuguaucagggacugcugcaagcccuugagggaaucucgccagaauugggcccgacgcuggacacguugcagcucgacguggcggauuucgcaacaaccaucuggcagcagauggaggaacuggggauggcacccgcgcugcagcccacgcagggggcaaugccggccuuugcguccgcguuucagcgcagggcggguggaguccucguagcgagccaccuucaaucauuuuuggaagucucguaccgggugcugagacaucuugcgcagccgugauaauaggcugccuucugcggggcuugccuucuggccaugcccuucuucucucccuugcaccuguaccucuaguucucuggucuuugaauaaagccugaguaggaag

SEQ ID NO: 249044 - RNA, 776 nt, Artificial Sequence
  derived and/or modified sequence
gggaaauaagagagaaaagaagaguaagaagaaauauaagagccaccauggccggucccgcgacccaaagccccaugaaacuuauggcccugcaguugcugcuuuggcacucggcccucuggacaguccaagaagcgacuccucucggaccugccucaucguugccgcagucauuccuuuugaagugucuggagcaggugcgaaagauucagggcgauggagccgcacuccaagagaagcucugcgcgacauacaaacuuugccaucccgaggagcucguacugcucgggcacagcuuggggauucccugggcuccucucucguccuguccgucgcaggcuuugcaguuggcagggugccuuucccagcuccacuccgguuuguucuuguaucagggacugcugcaagcccuugagggaaucucgccagaauugggcccgacgcuggacacguugcagcucgacguggcggauuucgcaacaaccaucuggcagcagauggaggaacuggggauggcacccgcgcugcagcccacgcagggggcaaugccggccuuugcguccgcguuucagcgcagggcggguggaguccucguagcgagccaccuucaaucauuuuuggaagucucguaccgggugcugagacaucuugcgcagccgugauaauaggcugccuucugcggggcuugccuucuggccaugcccuucuucucucccuugcaccuguaccucuaacccauggaauucauggucuuugaauaaagccugaguaggaag

SEQ ID NO: 249045 - RNA, 1413 nt, Artificial Sequence
  derived and/or modified sequence
gggaaauaagagagaaaagaagaguaagaagaaauauaagagccaccucgugaggaucuauuuccggugaauuccucgagacuaguucuagagcggccgcggaucccgccccucucccuccccccccccuaacguuacuggccgaagccgcuuggaauaaggccggugugcguuugucuauauguuauuuuccaccauauugccgucuuuuggcaaugugagggcccggaaaccuggcccugucuucuugacgagcauuccuaggggucuuuccccucucgccaaaggaaugcaaggucuguugaaugucgugaaggaagcaguuccucuggaagcuucuugaagacaaacaacgucuguagcgacccuuugcaggcagcggaaccccccaccuggcgacaggugccucugcggccaaaagccacguguauaagauacaccugcaaaggcggcacaaccccagugccacguugugaguuggauaguuguggaaagagucaaauggcucaccucaagcguauucaacaaggggcugaaggaugcccagaagguaccccauuguaugggaucugaucuggggccucggugcacaugcuuuacauguguuuagucgagguuaaaaaacgucuaggccccccgaaccacggggacgugguuuuccuuugaaaaacacgaugauaauauggccggucccgcgacccaaagccccaugaaacuuauggcccugcaguugcugcuuuggcacucggcccucuggacaguccaagaagcgacuccucucggaccugccucaucguugccgcagucauuccuuuugaagugucuggagcaggugcgaaagauucagggcgauggagccgcacuccaagagaagcucugcgcgacauacaaacuuugccaucccgaggagcucguacugcucgggcacagcuuggggauucccugggcuccucucucguccuguccgucgcaggcuuugcaguuggcagggugccuuucccagcuccacuccgguuuguucuuguaucagggacugcugcaagcccuugagggaaucucgccagaauugggcccgacgcuggacacguugcagcucgacguggcggauuucgcaacaaccaucuggcagcagauggaggaacuggggauggcacccgcgcugcagcccacgcagggggcaaugccggccuuugcguccgcguuucagcgcagggcggguggaguccucguagcgagccaccuucaaucauuuuuggaagucucguaccgggugcugagacaucuugcgcagccgugauaauaggcuggagccucgguggccaugcuucuugccccuugggccuccccccagccccuccuccccuuccugcacccguacccccguggucuuugaauaaagucugagugggcggc

SEQ ID NO: 249046 - RNA, 1407 nt, Artificial Sequence
  derived and/or modified sequence
gggaaauaagagagaaaagaagaguaagaagaaauauaagaucgugaggaucuauuuccggugaauuccucgagacuaguucuagagcggccgcggaucccgccccucucccuccccccccccuaacguuacuggccgaagccgcuuggaauaaggccggugugcguuugucuauauguuauuuuccaccauauugccgucuuuuggcaaugugagggcccggaaaccuggcccugucuucuugacgagcauuccuaggggucuuuccccucucgccaaaggaaugcaaggucuguugaaugucgugaaggaagcaguuccucuggaagcuucuugaagacaaacaacgucuguagcgacccuuugcaggcagcggaaccccccaccuggcgacaggugccucugcggccaaaagccacguguauaagauacaccugcaaaggcggcacaaccccagugccacguugugaguuggauaguuguggaaagagucaaauggcucaccucaagcguauucaacaaggggcugaaggaugcccagaagguaccccauuguaugggaucugaucuggggccucggugcacaugcuuuacauguguuuagucgagguuaaaaaacgucuaggccccccgaaccacggggacgugguuuuccuuugaaaaacacgaugauaauauggccggucccgcgacccaaagccccaugaaacuuauggcccugcaguugcugcuuuggcacucggcccucuggacaguccaagaagcgacuccucucggaccugccucaucguugccgcagucauuccuuuugaagugucuggagcaggugcgaaagauucagggcgauggagccgcacuccaagagaagcucugcgcgacauacaaacuuugccaucccgaggagcucguacugcucgggcacagcuuggggauucccugggcuccucucucguccuguccgucgcaggcuuugcaguuggcagggugccuuucccagcuccacuccgguuuguucuuguaucagggacugcugcaagcccuugagggaaucucgccagaauugggcccgacgcuggacacguugcagcucgacguggcggauuucgcaacaaccaucuggcagcagauggaggaacuggggauggcacccgcgcugcagcccacgcagggggcaaugccggccuuugcguccgcguuucagcgcagggcggguggaguccucguagcgagccaccuucaaucauuuuuggaagucucguaccgggugcugagacaucuugcgcagccgugauaauaggcuggagccucgguggccaugcuucuugccccuugggccuccccccagccccuccuccccuuccugcacccguacccccguggucuuugaauaaagucugagugggcggc

SEQ ID NO: 249047 - RNA, 772 nt, Artificial Sequence
  derived and/or modified sequence
gggaaauaagagagaaaagaagaguaagaagaaauauaagaauggccggucccgcgacccaaagccccaugaaacuuauggcccugcaguugcugcuuuggcacucggcccucuggacaguccaagaagcgacuccucucggaccugccucaucguugccgcagucauuccuuuugaagugucuggagcaggugcgaaagauucagggcgauggagccgcacuccaagagaagcucugcgcgacauacaaacuuugccaucccgaggagcucguacugcucgggcacagcuuggggauucccugggcuccucucucguccuguccgucgcaggcuuugcaguuggcagggugccuuucccagcuccacuccgguuuguucuuguaucagggacugcugcaagcccuugagggaaucucgccagaauugggcccgacgcuggacacguugcagcucgacguggcggauuucgcaacaaccaucuggcagcagauggaggaacuggggauggcacccgcgcugcagcccacgcagggggcaaugccggccuuugcguccgcguuucagcgcagggcggguggaguccucguagcgagccaccuucaaucauuuuuggaagucucguaccgggugcugagacaucuugcgcagccgugauaauaggcuggagccucgguggccaugcuucuugccccuugggccuccccccagccccuccuccccuuccugcacccguacccccguggucuuugaauaaagucugagugggcggc

SEQ ID NO: 249048 - RNA, 1493 nt, Artificial Sequence
  derived and/or modified sequence
gggaaauaagagagaaaagaagaguaagaagaaauauaagagccaccucgugaggaucuauuuccggugaauuccucgagacuaguucuagagcggccgcggaucccgccccucucccuccccccccccuaacguuacuggccgaagccgcuuggaauaaggccggugugcguuugucuauauguuauuuuccaccauauugccgucuuuuggcaaugugagggcccggaaaccuggcccugucuucuugacgagcauuccuaggggucuuuccccucucgccaaaggaaugcaaggucuguugaaugucgugaaggaagcaguuccucuggaagcuucuugaagacaaacaacgucuguagcgacccuuugcaggcagcggaaccccccaccuggcgacaggugccucugcggccaaaagccacguguauaagauacaccugcaaaggcggcacaaccccagugccacguugugaguuggauaguuguggaaagagucaaauggcucaccucaagcguauucaacaaggggcugaaggaugcccagaagguaccccauuguaugggaucugaucuggggccucggugcacaugcuuuacauguguuuagucgagguuaaaaaacgucuaggccccccgaaccacggggacgugguuuuccuuugaaaaacacgaugauaauauggccggucccgcgacccaaagccccaugaaacuuauggcccugcaguugcugcuuuggcacucggcccucuggacaguccaagaagcgacuccucucggaccugccucaucguugccgcagucauuccuuuugaagugucuggagcaggugcgaaagauucagggcgauggagccgcacuccaagagaagcucugcgcgacauacaaacuuugccaucccgaggagcucguacugcucgggcacagcuuggggauucccugggcuccucucucguccuguccgucgcaggcuuugcaguuggcagggugccuuucccagcuccacuccgguuuguucuuguaucagggacugcugcaagcccuugagggaaucucgccagaauugggcccgacgcuggacacguugcagcucgacguggcggauuucgcaacaaccaucuggcagcagauggaggaacuggggauggcacccgcgcugcagcccacgcagggggcaaugccggccuuugcguccgcguuucagcgcagggcggguggaguccucguagcgagccaccuucaaucauuuuuggaagucucguaccgggugcugagacaucuugcgcagccgugauaauaggcuggagccucgguggccaugcuucuugccccuugggccuccccccagccccuccuccccuuccugcacccguacccccguggucuuugaauaaagucugagugggcggcaaaaaaaaaaaaaaaaaaaaaaaaaaaaaaaaaaaaaaaaaaaaaaaaaaaaaaaaaaaaaaaaaaaaaaaaaaaaaaaa

SEQ ID NO: 249049 - RNA, 1487 nt, Artificial Sequence
  derived and/or modified sequence
gggaaauaagagagaaaagaagaguaagaagaaauauaagaucgugaggaucuauuuccggugaauuccucgagacuaguucuagagcggccgcggaucccgccccucucccuccccccccccuaacguuacuggccgaagccgcuuggaauaaggccggugugcguuugucuauauguuauuuuccaccauauugccgucuuuuggcaaugugagggcccggaaaccuggcccugucuucuugacgagcauuccuaggggucuuuccccucucgccaaaggaaugcaaggucuguugaaugucgugaaggaagcaguuccucuggaagcuucuugaagacaaacaacgucuguagcgacccuuugcaggcagcggaaccccccaccuggcgacaggugccucugcggccaaaagccacguguauaagauacaccugcaaaggcggcacaaccccagugccacguugugaguuggauaguuguggaaagagucaaauggcucaccucaagcguauucaacaaggggcugaaggaugcccagaagguaccccauuguaugggaucugaucuggggccucggugcacaugcuuuacauguguuuagucgagguuaaaaaacgucuaggccccccgaaccacggggacgugguuuuccuuugaaaaacacgaugauaauauggccggucccgcgacccaaagccccaugaaacuuauggcccugcaguugcugcuuuggcacucggcccucuggacaguccaagaagcgacuccucucggaccugccucaucguugccgcagucauuccuuuugaagugucuggagcaggugcgaaagauucagggcgauggagccgcacuccaagagaagcucugcgcgacauacaaacuuugccaucccgaggagcucguacugcucgggcacagcuuggggauucccugggcuccucucucguccuguccgucgcaggcuuugcaguuggcagggugccuuucccagcuccacuccgguuuguucuuguaucagggacugcugcaagcccuugagggaaucucgccagaauugggcccgacgcuggacacguugcagcucgacguggcggauuucgcaacaaccaucuggcagcagauggaggaacuggggauggcacccgcgcugcagcccacgcagggggcaaugccggccuuugcguccgcguuucagcgcagggcggguggaguccucguagcgagccaccuucaaucauuuuuggaagucucguaccgggugcugagacaucuugcgcagccgugauaauaggcuggagccucgguggccaugcuucuugccccuugggccuccccccagccccuccuccccuuccugcacccguacccccguggucuuugaauaaagucugagugggcggcaaaaaaaaaaaaaaaaaaaaaaaaaaaaaaaaaaaaaaaaaaaaaaaaaaaaaaaaaaaaaaaaaaaaaaaaaaaaaaaa

SEQ ID NO: 249050 - RNA, 858 nt, Artificial Sequence
  derived and/or modified sequence
gggaaauaagagagaaaagaagaguaagaagaaauauaagagccaccauggccggucccgcgacccaaagccccaugaaacuuauggcccugcaguugcugcuuuggcacucggcccucuggacaguccaagaagcgacuccucucggaccugccucaucguugccgcagucauuccuuuugaagugucuggagcaggugcgaaagauucagggcgauggagccgcacuccaagagaagcucugcgcgacauacaaacuuugccaucccgaggagcucguacugcucgggcacagcuuggggauucccugggcuccucucucguccuguccgucgcaggcuuugcaguuggcagggugccuuucccagcuccacuccgguuuguucuuguaucagggacugcugcaagcccuugagggaaucucgccagaauugggcccgacgcuggacacguugcagcucgacguggcggauuucgcaacaaccaucuggcagcagauggaggaacuggggauggcacccgcgcugcagcccacgcagggggcaaugccggccuuugcguccgcguuucagcgcagggcggguggaguccucguagcgagccaccuucaaucauuuuuggaagucucguaccgggugcugagacaucuugcgcagccgugauaauaggcuggagccucgguggccaugcuucuugccccuugggccuccccccagccccuccuccccuuccugcacccguacccccguggucuuugaauaaagucugagugggcggcaaaaaaaaaaaaaaaaaaaaaaaaaaaaaaaaaaaaaaaaaaaaaaaaaaaaaaaaaaaaaaaaaaaaaaaaaaaaaaaa

SEQ ID NO: 249051 - RNA, 852 nt, Artificial Sequence
  derived and/or modified sequence
gggaaauaagagagaaaagaagaguaagaagaaauauaagaauggccggucccgcgacccaaagccccaugaaacuuauggcccugcaguugcugcuuuggcacucggcccucuggacaguccaagaagcgacuccucucggaccugccucaucguugccgcagucauuccuuuugaagugucuggagcaggugcgaaagauucagggcgauggagccgcacuccaagagaagcucugcgcgacauacaaacuuugccaucccgaggagcucguacugcucgggcacagcuuggggauucccugggcuccucucucguccuguccgucgcaggcuuugcaguuggcagggugccuuucccagcuccacuccgguuuguucuuguaucagggacugcugcaagcccuugagggaaucucgccagaauugggcccgacgcuggacacguugcagcucgacguggcggauuucgcaacaaccaucuggcagcagauggaggaacuggggauggcacccgcgcugcagcccacgcagggggcaaugccggccuuugcguccgcguuucagcgcagggcggguggaguccucguagcgagccaccuucaaucauuuuuggaagucucguaccgggugcugagacaucuugcgcagccgugauaauaggcuggagccucgguggccaugcuucuugccccuugggccuccccccagccccuccuccccuuccugcacccguacccccguggucuuugaauaaagucugagugggcggcaaaaaaaaaaaaaaaaaaaaaaaaaaaaaaaaaaaaaaaaaaaaaaaaaaaaaaaaaaaaaaaaaaaaaaaaaaaaaaaa

SEQ ID NO: 249052 - RNA, 800 nt, Artificial Sequence
  derived and/or modified sequence
gggaaauaagagagaaaagaagaguaagaagaaauauaagagccaccauggccggucccgcgacccaaagccccaugaaacuuauggcccugcaguugcugcuuuggcacucggcccucuggacaguccaagaagcgacuccucucggaccugccucaucguugccgcagucauuccuuuugaagugucuggagcaggugcgaaagauucagggcgauggagccgcacuccaagagaagcucugcgcgacauacaaacuuugccaucccgaggagcucguacugcucgggcacagcuuggggauucccugggcuccucucucguccuguccgucgcaggcuuugcaguuggcagggugccuuucccagcuccacuccgguuuguucuuguaucagggacugcugcaagcccuugagggaaucucgccagaauugggcccgacgcuggacacguugcagcucgacguggcggauuucgcaacaaccaucuggcagcagauggaggaacuggggauggcacccgcgcugcagcccacgcagggggcaaugccggccuuugcguccgcguuucagcgcagggcggguggaguccucguagcgagccaccuucaaucauuuuuggaagucucguaccgggugcugagacaucuugcgcagccgugauaauaggcuggagccucgguggccaugcuucuugccccuugggccuccccccagccccuccuccccuuccugcacccguaccccccaaacaccauugucacacuccaguggucuuugaauaaagucugagugggcggc

SEQ ID NO: 249053 - RNA, 785 nt, Artificial Sequence
  derived and/or modified sequence
gggaaauaagagagaaaagaagaguaagaagaaauauaagagccaccauggccggucccgcgacccaaagccccaugaaacuuauggcccugcaguugcugcuuuggcacucggcccucuggacaguccaagaagcgacuccucucggaccugccucaucguugccgcagucauuccuuuugaagugucuggagcaggugcgaaagauucagggcgauggagccgcacuccaagagaagcucugcgcgacauacaaacuuugccaucccgaggagcucguacugcucgggcacagcuuggggauucccugggcuccucucucguccuguccgucgcaggcuuugcaguuggcagggugccuuucccagcuccacuccgguuuguucuuguaucagggacugcugcaagcccuugagggaaucucgccagaauugggcccgacgcuggacacguugcagcucgacguggcggauuucgcaacaaccaucuggcagcagauggaggaacuggggauggcacccgcgcugcagcccacgcagggggcaaugccggccuuugcguccgcguuucagcgcagggcggguggaguccucguagcgagccaccuucaaucauuuuuggaagucucguaccgggugcugagacaucuugcgcagccgugauaauaggcuggagccucgguggccaugcuucuugccccuugggccuccccccagccccuccuccccuuccugcacccguacccccacacuccguggucuuugaauaaagucugagugggcggc

SEQ ID NO: 249054 - RNA, 793 nt, Artificial Sequence
  derived and/or modified sequence
gggaaauaagagagaaaagaagaguaagaagaaauauaagagccaccauggccggucccgcgacccaaagccccaugaaacuuauggcccugcaguugcugcuuuggcacucggcccucuggacaguccaagaagcgacuccucucggaccugccucaucguugccgcagucauuccuuuugaagugucuggagcaggugcgaaagauucagggcgauggagccgcacuccaagagaagcucugcgcgacauacaaacuuugccaucccgaggagcucguacugcucgggcacagcuuggggauucccugggcuccucucucguccuguccgucgcaggcuuugcaguuggcagggugccuuucccagcuccacuccgguuuguucuuguaucagggacugcugcaagcccuugagggaaucucgccagaauugggcccgacgcuggacacguugcagcucgacguggcggauuucgcaacaaccaucuggcagcagauggaggaacuggggauggcacccgcgcugcagcccacgcagggggcaaugccggccuuugcguccgcguuucagcgcagggcggguggaguccucguagcgagccaccuucaaucauuuuuggaagucucguaccgggugcugagacaucuugcgcagccgugauaauaggcuggagccucgguggccaugcuucuugccccuugggccuccccccagccccuccuccccuuccugcacccguaccccccaaacaccauugucaguggucuuugaauaaagucugagugggcggc

SEQ ID NO: 249055 - RNA, 783 nt, Artificial Sequence
  derived and/or modified sequence
gggaaauaagagagaaaagaagaguaagaagaaauauaagagccaccauggccggucccgcgacccaaagccccaugaaacuuauggcccugcaguugcugcuuuggcacucggcccucuggacaguccaagaagcgacuccucucggaccugccucaucguugccgcagucauuccuuuugaagugucuggagcaggugcgaaagauucagggcgauggagccgcacuccaagagaagcucugcgcgacauacaaacuuugccaucccgaggagcucguacugcucgggcacagcuuggggauucccugggcuccucucucguccuguccgucgcaggcuuugcaguuggcagggugccuuucccagcuccacuccgguuuguucuuguaucagggacugcugcaagcccuugagggaaucucgccagaauugggcccgacgcuggacacguugcagcucgacguggcggauuucgcaacaaccaucuggcagcagauggaggaacuggggauggcacccgcgcugcagcccacgcagggggcaaugccggccuuugcguccgcguuucagcgcagggcggguggaguccucguagcgagccaccuucaaucauuuuuggaagucucguaccgggugcugagacaucuugcgcagccgugauaauaggcugccuucugcggggcuugccuucuggccaugcccuucuucucucccuugcaccuguaccucucaaacaccauugucacacuccauggucuuugaauaaagccugaguaggaag

SEQ ID NO: 249056 - RNA, 768 nt, Artificial Sequence
  derived and/or modified sequence
gggaaauaagagagaaaagaagaguaagaagaaauauaagagccaccauggccggucccgcgacccaaagccccaugaaacuuauggcccugcaguugcugcuuuggcacucggcccucuggacaguccaagaagcgacuccucucggaccugccucaucguugccgcagucauuccuuuugaagugucuggagcaggugcgaaagauucagggcgauggagccgcacuccaagagaagcucugcgcgacauacaaacuuugccaucccgaggagcucguacugcucgggcacagcuuggggauucccugggcuccucucucguccuguccgucgcaggcuuugcaguuggcagggugccuuucccagcuccacuccgguuuguucuuguaucagggacugcugcaagcccuugagggaaucucgccagaauugggcccgacgcuggacacguugcagcucgacguggcggauuucgcaacaaccaucuggcagcagauggaggaacuggggauggcacccgcgcugcagcccacgcagggggcaaugccggccuuugcguccgcguuucagcgcagggcggguggaguccucguagcgagccaccuucaaucauuuuuggaagucucguaccgggugcugagacaucuugcgcagccgugauaauaggcugccuucugcggggcuugccuucuggccaugcccuucuucucucccuugcaccuguaccucuacacuccuggucuuugaauaaagccugaguaggaag

SEQ ID NO: 249057 - RNA, 776 nt, Artificial Sequence
  derived and/or modified sequence
gggaaauaagagagaaaagaagaguaagaagaaauauaagagccaccauggccggucccgcgacccaaagccccaugaaacuuauggcccugcaguugcugcuuuggcacucggcccucuggacaguccaagaagcgacuccucucggaccugccucaucguugccgcagucauuccuuuugaagugucuggagcaggugcgaaagauucagggcgauggagccgcacuccaagagaagcucugcgcgacauacaaacuuugccaucccgaggagcucguacugcucgggcacagcuuggggauucccugggcuccucucucguccuguccgucgcaggcuuugcaguuggcagggugccuuucccagcuccacuccgguuuguucuuguaucagggacugcugcaagcccuugagggaaucucgccagaauugggcccgacgcuggacacguugcagcucgacguggcggauuucgcaacaaccaucuggcagcagauggaggaacuggggauggcacccgcgcugcagcccacgcagggggcaaugccggccuuugcguccgcguuucagcgcagggcggguggaguccucguagcgagccaccuucaaucauuuuuggaagucucguaccgggugcugagacaucuugcgcagccgugauaauaggcugccuucugcggggcuugccuucuggccaugcccuucuucucucccuugcaccuguaccucucaaacaccauugucauggucuuugaauaaagccugaguaggaag

SEQ ID NO: 249058 - RNA, 778 nt, Artificial Sequence
  derived and/or modified sequence
gggaaauaagagagaaaagaagaguaagaagaaauauaagagccaccauggccggucccgcgacccaaagccccaugaaacuuauggcccugcaguugcugcuuuggcacucggcccucuggacaguccaagaagcgacuccucucggaccugccucaucguugccgcagucauuccuuuugaagugucuggagcaggugcgaaagauucagggcgauggagccgcacuccaagagaagcucugcgcgacauacaaacuuugccaucccgaggagcucguacugcucgggcacagcuuggggauucccugggcuccucucucguccuguccgucgcaggcuuugcaguuggcagggugccuuucccagcuccacuccgguuuguucuuguaucagggacugcugcaagcccuugagggaaucucgccagaauugggcccgacgcuggacacguugcagcucgacguggcggauuucgcaacaaccaucuggcagcagauggaggaacuggggauggcacccgcgcugcagcccacgcagggggcaaugccggccuuugcguccgcguuucagcgcagggcggguggaguccucguagcgagccaccuucaaucauuuuuggaagucucguaccgggugcugagacaucuugcgcagccgugauaauaggcuggagccucgguggccaugcuucuugccccuugggccuccccccagccccuccuccccuuccugcacccguacccccguggucuuugaauaaagucugagugggcggc

SEQ ID NO: 249059 - RNA, 761 nt, Artificial Sequence
  derived and/or modified sequence
gggaaauaagagagaaaagaagaguaagaagaaauauaagagccaccauggccggucccgcgacccaaagccccaugaaacuuauggcccugcaguugcugcuuuggcacucggcccucuggacaguccaagaagcgacuccucucggaccugccucaucguugccgcagucauuccuuuugaagugucuggagcaggugcgaaagauucagggcgauggagccgcacuccaagagaagcucugcgcgacauacaaacuuugccaucccgaggagcucguacugcucgggcacagcuuggggauucccugggcuccucucucguccuguccgucgcaggcuuugcaguuggcagggugccuuucccagcuccacuccgguuuguucuuguaucagggacugcugcaagcccuugagggaaucucgccagaauugggcccgacgcuggacacguugcagcucgacguggcggauuucgcaacaaccaucuggcagcagauggaggaacuggggauggcacccgcgcugcagcccacgcagggggcaaugccggccuuugcguccgcguuucagcgcagggcggguggaguccucguagcgagccaccuucaaucauuuuuggaagucucguaccgggugcugagacaucuugcgcagccgugauaauaggcugccuucugcggggcuugccuucuggccaugcccuucuucucucccuugcaccuguaccucuuggucuuugaauaaagccugaguaggaag

SEQ ID NO: 249060 - RNA, 809 nt, Artificial Sequence
  derived and/or modified sequence
gggaaauaagagagaaaagaagaguaagaagaaauauaagagccaccauggccggucccgcgacccaaagccccaugaaacuuauggcccugcaguugcugcuuuggcacucggcccucuggacaguccaagaagcgacuccucucggaccugccucaucguugccgcagucauuccuuuugaagugucuggagcaggugcgaaagauucagggcgauggagccgcacuccaagagaagcucugcgcgacauacaaacuuugccaucccgaggagcucguacugcucgggcacagcuuggggauucccugggcuccucucucguccuguccgucgcaggcuuugcaguuggcagggugccuuucccagcuccacuccgguuuguucuuguaucagggacugcugcaagcccuugagggaaucucgccagaauugggcccgacgcuggacacguugcagcucgacguggcggauuucgcaacaaccaucuggcagcagauggaggaacuggggauggcacccgcgcugcagcccacgcagggggcaaugccggccuuugcguccgcguuucagcgcagggcggguggaguccucguagcgagccaccuucaaucauuuuuggaagucucguaccgggugcugagacaucuugcgcagccgugauaauaggauucgucaguaggguuguaaagguuuuucuuuuccugagaaaacaaccuuuuguuuucucagguuuugcuuuuuggccuuucccuagcuuuaaaaaaaaaaaagcaaaaguggucuuugaauaaagucugagugggcggc

SEQ ID NO: 249061 - RNA, 811 nt, Artificial Sequence
  derived and/or modified sequence
gggaaauaagagagaaaagaagaguaagaagaaauauaagagccaccauggccggucccgcgacccaaagccccaugaaacuuauggcccugcaguugcugcuuuggcacucggcccucuggacaguccaagaagcgacuccucucggaccugccucaucguugccgcagucauuccuuuugaagugucuggagcaggugcgaaagauucagggcgauggagccgcacuccaagagaagcucugcgcgacauacaaacuuugccaucccgaggagcucguacugcucgggcacagcuuggggauucccugggcuccucucucguccuguccgucgcaggcuuugcaguuggcagggugccuuucccagcuccacuccgguuuguucuuguaucagggacugcugcaagcccuugagggaaucucgccagaauugggcccgacgcuggacacguugcagcucgacguggcggauuucgcaacaaccaucuggcagcagauggaggaacuggggauggcacccgcgcugcagcccacgcagggggcaaugccggccuuugcguccgcguuucagcgcagggcggguggaguccucguagcgagccaccuucaaucauuuuuggaagucucguaccgggugcugagacaucuugcgcagccgugauaauagugcucuucaguagggucaugaagguuuuucuuuuccugagaaaacaacacguauuguuuucucagguuuugcuuuuuggccuuuuucuagcuuaaaaaaaaaaaaagcaaaaguggucuuugaauaaagucugagugggcggc

SEQ ID NO: 249062 - RNA, 780 nt, Artificial Sequence
  derived and/or modified sequence
gggaaauaagagagaaaagaagaguaagaagaaauauaagagccaccauggccggucccgcgacccaaagccccaugaaacuuauggcccugcaguugcugcuuuggcacucggcccucuggacaguccaagaagcgacuccucucggaccugccucaucguugccgcagucauuccuuuugaagugucuggagcaggugcgaaagauucagggcgauggagccgcacuccaagagaagcucugcgcgacauacaaacuuugccaucccgaggagcucguacugcucgggcacagcuuggggauucccugggcuccucucucguccuguccgucgcaggcuuugcaguuggcagggugccuuucccagcuccacuccgguuuguucuuguaucagggacugcugcaagcccuugagggaaucucgccagaauugggcccgacgcuggacacguugcagcucgacguggcggauuucgcaacaaccaucuggcagcagauggaggaacuggggauggcacccgcgcugcagcccacgcagggggcaaugccggccuuugcguccgcguuucagcgcagggcggguggaguccucguagcgagccaccuucaaucauuuuuggaagucucguaccgggugcugagacaucuugcgcagccgugauaagcugccuucugcggggcuugccuucuggccaugcccuucuucucucccuugcaccuguaccucuuccauaaaguaggaacacuacauggucuuugaauaaagccugaguaggaag

SEQ ID NO: 249063 - RNA, 765 nt, Artificial Sequence
  derived and/or modified sequence
gggaaauaagagagaaaagaagaguaagaagaaauauaagagccaccauggccggucccgcgacccaaagccccaugaaacuuauggcccugcaguugcugcuuuggcacucggcccucuggacaguccaagaagcgacuccucucggaccugccucaucguugccgcagucauuccuuuugaagugucuggagcaggugcgaaagauucagggcgauggagccgcacuccaagagaagcucugcgcgacauacaaacuuugccaucccgaggagcucguacugcucgggcacagcuuggggauucccugggcuccucucucguccuguccgucgcaggcuuugcaguuggcagggugccuuucccagcuccacuccgguuuguucuuguaucagggacugcugcaagcccuugagggaaucucgccagaauugggcccgacgcuggacacguugcagcucgacguggcggauuucgcaacaaccaucuggcagcagauggaggaacuggggauggcacccgcgcugcagcccacgcagggggcaaugccggccuuugcguccgcguuucagcgcagggcggguggaguccucguagcgagccaccuucaaucauuuuuggaagucucguaccgggugcugagacaucuugcgcagccgugauaagcugccuucugcggggcuugccuucuggccaugcccuucuucucucccuugcaccuguaccucuacacuacuggucuuugaauaaagccugaguaggaag

SEQ ID NO: 249064 - RNA, 773 nt, Artificial Sequence
  derived and/or modified sequence
gggaaauaagagagaaaagaagaguaagaagaaauauaagagccaccauggccggucccgcgacccaaagccccaugaaacuuauggcccugcaguugcugcuuuggcacucggcccucuggacaguccaagaagcgacuccucucggaccugccucaucguugccgcagucauuccuuuugaagugucuggagcaggugcgaaagauucagggcgauggagccgcacuccaagagaagcucugcgcgacauacaaacuuugccaucccgaggagcucguacugcucgggcacagcuuggggauucccugggcuccucucucguccuguccgucgcaggcuuugcaguuggcagggugccuuucccagcuccacuccgguuuguucuuguaucagggacugcugcaagcccuugagggaaucucgccagaauugggcccgacgcuggacacguugcagcucgacguggcggauuucgcaacaaccaucuggcagcagauggaggaacuggggauggcacccgcgcugcagcccacgcagggggcaaugccggccuuugcguccgcguuucagcgcagggcggguggaguccucguagcgagccaccuucaaucauuuuuggaagucucguaccgggugcugagacaucuugcgcagccgugauaagcugccuucugcggggcuugccuucuggccaugcccuucuucucucccuugcaccuguaccucuuccauaaaguaggaauggucuuugaauaaagccugaguaggaag

SEQ ID NO: 249065 - RNA, 778 nt, Artificial Sequence
  derived and/or modified sequence
gggaaauaagagagaaaagaagaguaagaagaaauauaagagccuccauggccggucccgcgacccaaagccccaugaaacuuauggcccugcaguugcugcuuuggcacucggcccucuggacaguccaagaagcgacuccucucggaccugccucaucguugccgcagucauuccuuuugaagugucuggagcaggugcgaaagauucagggcgauggagccgcacuccaagagaagcucugcgcgacauacaaacuuugccaucccgaggagcucguacugcucgggcacagcuuggggauucccugggcuccucucucguccuguccgucgcaggcuuugcaguuggcagggugccuuucccagcuccacuccgguuuguucuuguaucagggacugcugcaagcccuugagggaaucucgccagaauugggcccgacgcuggacacguugcagcucgacguggcggauuucgcaacaaccaucuggcagcagauggaggaacuggggauggcacccgcgcugcagcccacgcagggggcaaugccggccuuugcguccgcguuucagcgcagggcggguggaguccucguagcgagccaccuucaaucauuuuuggaagucucguaccgggugcugagacaucuugcgcagccgugauaauaggcuggagccucgguggccaugcuucuugccccuugggccuccccccagccccuccuccccuuccugcacccguacccccguggucuuugaauaaagucugagugggcggc

SEQ ID NO: 249066 - RNA, 778 nt, Artificial Sequence
  derived and/or modified sequence
gggaaauaagagagaaaagaagaguaagaagaaauauaugagccaccauggccggucccgcgacccaaagccccaugaaacuuauggcccugcaguugcugcuuuggcacucggcccucuggacaguccaagaagcgacuccucucggaccugccucaucguugccgcagucauuccuuuugaagugucuggagcaggugcgaaagauucagggcgauggagccgcacuccaagagaagcucugcgcgacauacaaacuuugccaucccgaggagcucguacugcucgggcacagcuuggggauucccugggcuccucucucguccuguccgucgcaggcuuugcaguuggcagggugccuuucccagcuccacuccgguuuguucuuguaucagggacugcugcaagcccuugagggaaucucgccagaauugggcccgacgcuggacacguugcagcucgacguggcggauuucgcaacaaccaucuggcagcagauggaggaacuggggauggcacccgcgcugcagcccacgcagggggcaaugccggccuuugcguccgcguuucagcgcagggcggguggaguccucguagcgagccaccuucaaucauuuuuggaagucucguaccgggugcugagacaucuugcgcagccgugauaauaggcuggagccucgguggccaugcuucuugccccuugggccuccccccagccccuccuccccuuccugcacccguacccccguggucuuugaauaaagucugagugggcggc

SEQ ID NO: 249067 - RNA, 769 nt, Artificial Sequence
  derived and/or modified sequence
gggaaauaagagagaaaagaagaguaagaagaaauauaauggccggucccgcgacccaaagccccaugaaacuuauggcccugcaguugcugcuuuggcacucggcccucuggacaguccaagaagcgacuccucucggaccugccucaucguugccgcagucauuccuuuugaagugucuggagcaggugcgaaagauucagggcgauggagccgcacuccaagagaagcucugcgcgacauacaaacuuugccaucccgaggagcucguacugcucgggcacagcuuggggauucccugggcuccucucucguccuguccgucgcaggcuuugcaguuggcagggugccuuucccagcuccacuccgguuuguucuuguaucagggacugcugcaagcccuugagggaaucucgccagaauugggcccgacgcuggacacguugcagcucgacguggcggauuucgcaacaaccaucuggcagcagauggaggaacuggggauggcacccgcgcugcagcccacgcagggggcaaugccggccuuugcguccgcguuucagcgcagggcggguggaguccucguagcgagccaccuucaaucauuuuuggaagucucguaccgggugcugagacaucuugcgcagccgugauaauaggcuggagccucgguggccaugcuucuugccccuugggccuccccccagccccuccuccccuuccugcacccguacccccguggucuuugaauaaagucugagugggcggc

SEQ ID NO: 249068 - RNA, 893 nt, Artificial Sequence
  derived and/or modified sequence
gggaaauucugacauccggcggaauucugacauccggcggaauucugacauccggcggaauucugacauccggcggaauucugacauccggcggaagacucacaaccccagaaacagacauuaagagagaaaagaagaguaagaagaaauauaagagccaccauggccggucccgcgacccaaagccccaugaaacuuauggcccugcaguugcugcuuuggcacucggcccucuggacaguccaagaagcgacuccucucggaccugccucaucguugccgcagucauuccuuuugaagugucuggagcaggugcgaaagauucagggcgauggagccgcacuccaagagaagcucugcgcgacauacaaacuuugccaucccgaggagcucguacugcucgggcacagcuuggggauucccugggcuccucucucguccuguccgucgcaggcuuugcaguuggcagggugccuuucccagcuccacuccgguuuguucuuguaucagggacugcugcaagcccuugagggaaucucgccagaauugggcccgacgcuggacacguugcagcucgacguggcggauuucgcaacaaccaucuggcagcagauggaggaacuggggauggcacccgcgcugcagcccacgcagggggcaaugccggccuuugcguccgcguuucagcgcagggcggguggaguccucguagcgagccaccuucaaucauuuuuggaagucucguaccgggugcugagacaucuugcgcagccgugauaauaggcuggagccucgguggccaugcuucuugccccuugggccuccccccagccccuccuccccuuccugcacccguacccccguggucuuugaauaaagucugagugggcggc

SEQ ID NO: 249069 - RNA, 603 nt, Artificial Sequence
  derived and/or modified sequence
auguccccugaaccagcccucagcccugcacuacaacugcuuuuguggcacagcgcucucuggacaguucaggaggcaacaccccugggacccgcauccucuuuaccacaaucuuuucugcugaagugccuggaacaagugcgcaaaauccaaggcgauggcgcugccuugcaggagaaacugugugcaacuuacaaguugugccaccccgaagagcucguuuuauugggacacucucuggguauuccaugggcgccccucucaagcuguccuucccaggcccugcaacuagcuggaugccuuucccaguuacacucaggguuguuuuuguaucagggguugcuccaggcacuggaggggauaucaccugagcucggcccgacccucgacacgcuucagcuggacgucgccgacuucgccacuacaaucuggcagcagauggaagagcuuggcauggcgccugcacuccagccuacucagggggcuaugccugcuuucgcuucagccuuucaaaggagagcaggaggaguuuuaguggcuucccaccuucagagcuuccucgaggucagcuaccggguucugcggcaucuggcucaaccauag

SEQ ID NO: 249070 - RNA, 615 nt, Artificial Sequence
  derived and/or modified sequence
auggcaggaccugcuacucaaagcccaaugaaacuuauggcccuucagcuauuauuguggcacuccgcgcucuggaccguucaggaggccaccccucucggcccugcaagcucccucccucagaguuuccuacuuaagugcuuagagcaaguccgcaaaauucagggcgauggagcugccuuacaggaaaaacugugcgccaccuacaaauuaugucauccggaggagcugguacuucucgggcauucccugggaauuccaugggcuccacucagcucuuguccaagucaagcauugcaauuagcugggugccuuucucagcugcauucaggccuguuucucuaucaaggguuguuacaggcucuagagggcauuagcccagagcugggaccuacccucgacacacugcaacuugauguugccgauuucgcaacaacgaucuggcagcaaauggaggaacugggcauggccccagcucugcagccaacccaaggagcaaugccugccuucgcaagcgccuuccaacgcagagcuggcggcguguugguggcuucccaccuccaguccuuucuagaaguaucuuaccgggucuugagacaucuggcccagcccuag

SEQ ID NO: 249071 - RNA, 603 nt, Artificial Sequence
  derived and/or modified sequence
augucccccgaaccagcccucuccccugcucugcaacuccucuuguggcauucugcucuguggaccguucaagaggccacuccccucggucccgcuuccucacuuccucaaagcuuccuucucaagugucuagaacaggugcgcaaaauucaaggggauggcgcugcgcugcaggaaaagcugugugcaacauacaagcucugucaccccgaagaacucgugcugcuugggcauucauugggaaucccuugggccccucugucuagcugucccucucaggcccuccagcuugcuggcugucucucacaacuucacuccggacucuuccucuaccaggggcugcuccaggcccucgaaggaaucucacccgaacugggaccaacacuggauacucugcagcuugaugucgccgacuuugcaaccaccauuuggcagcagauggaggaauuggguauggcucccgcccugcaaccuacccaaggcgcaaugccagcguucgccucugcauuucagcgcagggccggcggcguccucguagcgucucaucuccaguccuuucuagaaguuaguuaucgcguccugcggcaucuggcucagccguag

SEQ ID NO: 249072 - RNA, 615 nt, Artificial Sequence
  derived and/or modified sequence
auggcaggaccugcuacucaaagcccaaugaaacuuauggcccuucagcuauuauuguggcacuccgcgcucuggaccguucaggaggccaccccucucggcccugcaagcucccucccucagaguuuccuacuuaagugcuuagagcaaguccgcaaaauucagggcgauggagcugccuuacaggaaaaacugugcgccaccuacaaauuaugucauccggaggagcugguacuucucgggcauucccugggaauuccaugggcuccacucagcucuuguccaagucaagcauugcaacucgccgggugccugagccaacugcacuccggcuuauuucuguaucagggucuucuccaggcacucgaagguauuuccccugaacucggccccacucuagauacccugcagcucgaugucgcugauuucgcuaccacaauuuggcagcaaauggaggaacuggggauggcuccugcccugcagccuacacagggagcuaugccugcauuugccagugcauuccaaaggagggccgggggcgugcugguggcaucacauuugcaguccuuccuggaaguuagcuaucggguucuccggcaccuugcucagccauag

SEQ ID NO: 249073 - RNA, 784 nt, Artificial Sequence
  derived and/or modified sequence
gggagaucagagagaaaagaagaguaagaagaaauauaagagccaccauggccggucccgcgacccaaagccccaugaaacuuauggcccugcaguugcugcuuuggcacucggcccucuggacaguccaagaagcgacuccucucggaccugccucaucguugccgcagucauuccuuuugaagugucuggagcaggugcgaaagauucagggcgauggagccgcacuccaagagaagcucugcgcgacauacaaacuuugccaucccgaggagcucguacugcucgggcacagcuuggggauucccugggcuccucucucguccuguccgucgcaggcuuugcaguuggcagggugccuuucccagcuccacuccgguuuguucuuguaucagggacugcugcaagcccuugagggaaucucgccagaauugggcccgacgcuggacacguugcagcucgacguggcggauuucgcaacaaccaucuggcagcagauggaggaacuggggauggcacccgcgcugcagcccacgcagggggcaaugccggccuuugcguccgcguuucagcgcagggcggguggaguccucguagcgagccaccuucaaucauuuuuggaagucucguaccgggugcugagacaucuugcgcagccgugauaauaggcuggagccucgguggccaugcuucuugccccuugggccuccccccagccccuccuccccuuccugcacccguacccccguggucuuugaauaaagucugagugggcggcucuaga

SEQ ID NO: 249074 - protein, 30 aa, Artificial Sequence
  derived and/or modified sequence
MAGPATQSPMKLMALQLLLWHSALWTVQEA

SEQ ID NO: 249075 - protein, 171 aa, Artificial Sequence
  derived and/or modified sequence
MAGPATQSPMKLMALQLLLWHSALWTVQEATPLGPASSLPQSFLLKCLEQVRKIQGDGAALQEKLVSEAGCLSQLHSGLFLYQGLLQALEGISPELGPTLDTLQLDVADFATTIWQQMEELGMAPALQPTQGAMPAFASAFQRRAGGVLVASHLQSFLEVSYRVLRHLAQP

SEQ ID NO: 249076 - protein, 29 aa, Artificial Sequence
  derived and/or modified sequence
MAGPATQSPMKLMALQLLLWHSALWTVQE

SEQ ID NO: 249077 - DNA, 1494 bp, Artificial Sequence
  derived and/or modified sequence
agtcgtggccccaggtaatttcctcccaggcctccatggggttatgtataaaggcccccctagagctgggccccaaaacagcccggagcctgcagcccagccccacccagacccatggctggacctgccacccagagccccatgaagctgatggccctgcagctgctgctgtggcacagtgcactctggacagtgcaggaagccacccccctgggccctgccagctccctgccccagagcttcctgctcaagtgcttagagcaagtgaggaagatccagggcgatggcgcagcgctccaggagaagctggtgagtgaggcaggctgcttgagccaactccatagcggccttttcctctaccaggggctcctgcaggccctggaagggatctcccccgagttgggtcccaccttggacacactgcagctggacgtcgccgactttgccaccaccatctggcagcagatggaagaactgggaatggcccctgccctgcagcccacccagggtgccatgccggccttcgcctctgctttccagcgccgggcaggaggggtcctggttgcctcccatctgcagagcttcctggaggtgtcgtaccgcgttctacgccaccttgcccagccctgagccaagccctccccatcccatgtatttatctctatttaatatttatgtctatttaagcctcatatttaaagacagggaagagcagaacggagccccaggcctctgtgtccttccctgcatttctgagtttcattctcctgcctgtagcagtgagaaaaagctcctgtcctcccatcccctggactgggaggtagataggtaaataccaagtatttattactatgactgctccccagccctggctctgcaatgggcactgggatgagccgctgtgagcccctggtcctgagggtccccacctgggacccttgagagtatcaggtctcccacgtgggagacaagaaatccctgtttaatatttaaacagcagtgttccccatctgggtccttgcacccctcactctggcctcagccgactgcacagcggcccctgcatccccttggctgtgaggcccctggacaagcagaggtggccagagctgggaggcatggccctggggtcccacgaatttgctggggaatctcgtttttcttcttaagacttttgggacatggtttgactcccgaacatcaccgacgcgtctcctgtttttctgggtggcctcgggacacctgccctgcccccacgagggtcaggactgtgactctttttagggccaggcaggtgcctggacatttgccttgctggacggggactggggatgtgggagggagcagacaggaggaatcatgtcaggcctgtgtgtgaaaggaagctccactgtcaccctccacctcttcaccccccactcaccagtgtcccctccactgtcacattgtaactgaacttcaggataataaagtgtttgcctccaaaaaaaaaaa

SEQ ID NO: 249078 - DNA, 516 bp, Artificial Sequence
  derived and/or modified sequence
atggccggccccgccacccagagccccatgaagctgatggccctgcagctgctgctgtggcacagcgccctgtggaccgtgcaggaggccacccccctgggccccgccagcagcctgccccagagcttcctgctgaagtgcctggagcaggtgagaaagatccagggcgacggcgccgccctgcaggagaagctggtgagcgaggccggctgcctgagccagctgcacagcggcctgttcctgtaccagggcctgctgcaggccctggagggcatcagccccgagctgggccccaccctggacaccctgcagctggacgtggccgacttcgccaccaccatctggcagcagatggaggagctgggcatggcccccgccctgcagcccacccagggcgccatgcccgccttcgccagcgccttccagagaagagccggcggcgtgctggtggccagccacctgcagagcttcctggaggtgagctacagagtgctgagacacctggcccagccctag

SEQ ID NO: 249079 - DNA, 516 bp, Artificial Sequence
  derived and/or modified sequence
atggcagggcctgcgactcagagccccatgaagctgatggccctgcaattactgctgtggcactccgccctctggaccgtccaggaagctacacctttgggccccgcctcttcattgccacagagctttcttttgaagtgcctggaacaggtcaggaagatacaaggggacggggccgccctgcaagaaaagctcgtgtccgaagccgggtgtctgagccagctccacagcgggctcttcttgtaccagggcctgctccaagcactggagggaatctctccagaactggggccgacactggacaccttacagttagacgtggcagacttcgctacaaccatttggcaacagatggaagagttgggaatggctcctgctcttcagcctacgcagggcgctatgccagccttcgcctctgcctttcagagaagagctgggggggtcctcgtggcctcccacctgcagagctttcttgaggtgtcttatagggttctgaggcatctggcgcagccttag

SEQ ID NO: 249080 - DNA, 516 bp, Artificial Sequence
  derived and/or modified sequence
atggccggccctgccacccagagccccatgaagctgatggccctgcagctgctgctgtggcacagcgccctgtggacagtgcaggaggccacccccctgggccctgccagcagcctgccccagagcttcctgctgaagtgcctggagcaggtgaggaagatccagggagatggagctgccctgcaggagaagctggtgtctgaggccggctgcctgagccagctgcacagcggcctcttcctgtaccagggcctgctgcaggccctggagggcatcagccctgagctgggccccaccctggacaccctgcagctggatgtggccgactttgccaccaccatctggcagcagatggaggagctgggcatggccccagccctgcagcccacccagggcgccatgcctgcctttgccagcgccttccagaggagagctggaggagtgctggtggccagccacctgcagagcttcctggaggtgtcctacagagtgctgcggcacctggcccagccctag

SEQ ID NO: 249081 - DNA, 622 bp, Artificial Sequence
  derived and/or modified sequence
ccagacccatggctggacctgccacccagagccccatgaagctgatggccctgcagctgctgctgtggcacagtgcactctggacagtgcaggaagccacccccctgggccctgccagctccctgccccagagcttcctgctcaagtgcttagagcaagtgaggaagatccagggcgatggcgcagcgctccaggagaagctggtgagtgaggcaggctgcttgagccaactccatagcggccttttcctctaccaggggctcctgcaggccctggaagggatctcccccgagttgggtcccaccttggacacactgcagctggacgtcgccgactttgccaccaccatctggcagcagatggaagaactgggaatggcccctgccctgcagcccacccagggtgccatgccggccttcgcctctgctttccagcgccgggcaggaggggtcctggttgcctcccatctgcagagcttcctggaggtgtcgtaccgcgttctacgccaccttgcccagccctgagccaagccctccccatcccatgtatttatctctatttaatatttatgtctatttaagcctcatatttaaagacagggaagagcagaacggagccccag

SEQ ID NO: 249082 - DNA, 516 bp, Artificial Sequence
  derived and/or modified sequence
atggccggccccgccacccagagccccatgaagctgatggccctgcagctgctgctgtggcatagtgccctgtggactgtgcaggaggccaccccactgggaccagcctcctctctgccgcaaagcttcctcttaaaatgcttggaacaggtccgcaagattcagggcgacggtgccgcactgcaggaaaaactggtctctgaagccggctgcctctcacagctgcacagcggactgtttctgtatcagggcctgcttcaggccctggaaggaatctctccagaactgggtccaacgttggacaccctgcaactggatgtggccgactttgccacgacaatctggcagcaaatggaagaactaggtatggccccagcacttcagcctacccaaggggccatgcccgcattcgcgtccgcattccaacgaagggccggaggcgtgcttgtcgccagccacttgcagtcttttttagaggttagctacagggtcctgagacatcttgcccagccttag

SEQ ID NO: 249083 - DNA, 516 bp, Artificial Sequence
  derived and/or modified sequence
atggccggacccgctacccagtctccaatgaagctcatggcactccagctccttttgtggcacagcgccctgtggactgtgcaggaagctacacctctgggacccgctagctctctgccacaaagttttctcctcaaatgtctggagcaggttcgtaagattcagggcgacggtgccgctctccaggagaaattagtgtctgaggcgggttgcttatcccaactgcattcaggcttatttctgtatcagggtctgttacaggccctggaagggatcagcccagagctggggcctaccttagacaccctacagctcgacgtggccgactttgccacaaccatctggcagcagatggaggaattgggcatggcaccagctttgcagcccactcaaggagcaatgccagcgttcgcgtctgcatttcagagacgggctgggggagtcttagtggccagccatttacaatcgttcctcgaggtgtcgtaccgagtactgcggcatttggctcagccctag

SEQ ID NO: 249084 - DNA, 516 bp, Artificial Sequence
  derived and/or modified sequence
atggcgggtcctgctacacagtccccaatgaaactgatggctctccagttactgctgtggcactcggccctttggactgttcaggaggctacccccctgggccccgctagttcccttccccaaagctttttactgaaatgcctggaacaggtgcggaagatccaaggcgacggcgccgctctccaggagaaattggtatccgaagctggttgtctcagccagttgcactctggtctgtttttataccaagggttgctgcaggcccttgaaggaatttctcccgagctgggacctacgctcgacactctccagctggatgtggcagactttgcaactactatctggcagcaaatggaagaactggggatggccccagcactccagcccacacagggggccatgccggctttcgcttctgccttccaaagacgagcaggaggtgtgttggtcgcttcccacttacaatccttcttagaggtctcatacagggtcctacgacatctggcacaaccttag

SEQ ID NO: 249085 - DNA, 516 bp, Artificial Sequence
  derived and/or modified sequence
atggccggacccgcaactcaaagccccatgaaactaatggctctgcagctgctgctgtggcattcagctttatggacggtgcaggaagctacacccttgggcccagcctccagtctgcctcagtcctttctactgaagtgtttggaacaggtgcgaaaaatccaaggagatggagcagccctgcaggaaaagctggtgtctgaggccgggtgcttgtcacaacttcactccggactgtttctttatcaaggactactccaagccctcgagggaatcagcccagaacttggaccaaccctggataccctccagctggacgtggcagactttgcaaccacaatctggcagcaaatggaagaactcggcatggcacctgcactccagcccacacagggggcaatgcctgcgttcgcctccgcattccaaagacgcgcaggcggtgtcctagttgccagccatctacagtcattcctcgaagtatcctaccgagtcctaagacatctggcccagccttag

SEQ ID NO: 249086 - RNA, 516 nt, Artificial Sequence
  derived and/or modified sequence
auggcggguccugcuacacaguccccaaugaaacugauggcucuccaguuacugcuguggcacucggcccuuuggacuguucaggaggcuaccccccugggccccgcuaguucccuuccccaaagcuuuuuacugaaaugccuggaacaggugcggaagauccaaggcgacggcgccgcucuccaggagaaauugguauccgaagcugguugucucagccaguugcacucuggucuguuuuuauaccaaggguugcugcaggcccuugaaggaauuucucccgagcugggaccuacgcucgacacucuccagcuggauguggcagacuuugcaacuacuaucuggcagcaaauggaagaacuggggauggccccagcacuccagcccacacagggggccaugccggcuuucgcuucugccuuccaaagacgagcaggagguguguuggucgcuucccacuuacaauccuucuuagaggucucauacaggguccuacgacaucuggcacaaccuuag

SEQ ID NO: 249087 - RNA, 516 nt, Artificial Sequence
  derived and/or modified sequence
auggccggacccgcaacucaaagccccaugaaacuaauggcucugcagcugcugcuguggcauucagcuuuauggacggugcaggaagcuacacccuugggcccagccuccagucugccucaguccuuucuacugaaguguuuggaacaggugcgaaaaauccaaggagauggagcagcccugcaggaaaagcuggugucugaggccgggugcuugucacaacuucacuccggacuguuucuuuaucaaggacuacuccaagcccucgagggaaucagcccagaacuuggaccaacccuggauacccuccagcuggacguggcagacuuugcaaccacaaucuggcagcaaauggaagaacucggcauggcaccugcacuccagcccacacagggggcaaugccugcguucgccuccgcauuccaaagacgcgcaggcgguguccuaguugccagccaucuacagucauuccucgaaguauccuaccgaguccuaagacaucuggcccagccuuag

SEQ ID NO: 249088 - protein, 541 aa, Artificial Sequence
  derived and/or modified sequence
MSSCVSSQPSSNRAAPQDELGGRGSSSSESQKPCEALRGLSSLSIHLGMESFIVVTECEPGCAVDLGLARDRPLEADGQEVPLDTSGSQARPHLSGRKLSLQERSQGGLAAGGSLDMNGRCICPSLPYSPVSSPQSSPRLPRRPTVESHHVSITGMQDCVQLNQYTLKDEIGKGSYGVVKLAYNENDNTYYAMKVLSKKKLIRQAGFPRRPPPRGTRPAPGGCIQPRGPIEQVYQEIAILKKLDHPNVVKLVEVLDDPNEDHLYMVFELVNQGPVMEVPTLKPLSEDQARFYFQDLIKGIEYLHYQKIIHRDIKPSNLLVGEDGHIKIADFGVSNEFKGSDALLSNTVGTPAFMAPESLSETRKIFSGKALDVWAMGVTLYCFVFGQCPFMDERIMCLHSKIKSQALEFPDQPDIAEDLKDLITRMLDKNPESRIVVPEIKLHPWVTRHGAEPLPSEDENCTLVEVTEEEVENSVKHIPSLATVILVKTMIRKRSFGNPFEGSRREERSLSAPGNLLTKQGSEDNLQGTDPPPVGEEEVLL

SEQ ID NO: 249089 - protein, 524 aa, Artificial Sequence
  derived and/or modified sequence
MSSCVSSQPSSNRAAPQDELGGRGSSSIHLGMESFIVVTECEPGCAVDLGLARDRPLEADGQEVPLDTSGSQARPHLSGRKLSLQERSQGGLAAGGSLDMNGRCICPSLPYSPVSSPQSSPRLPRRPTVESHHVSITGMQDCVQLNQYTLKDEIGKGSYGVVKLAYNENDNTYYAMKVLSKKKLIRQAGFPRRPPPRGTRPAPGGCIQPRGPIEQVYQEIAILKKLDHPNVVKLVEVLDDPNEDHLYMVFELVNQGPVMEVPTLKPLSEDQARFYFQDLIKGIEYLHYQKIIHRDIKPSNLLVGEDGHIKIADFGVSNEFKGSDALLSNTVGTPAFMAPESLSETRKIFSGKALDVWAMGVTLYCFVFGQCPFMDERIMCLHSKIKSQALEFPDQPDIAEDLKDLITRMLDKNPESRIVVPEIKLHPWVTRHGAEPLPSEDENCTLVEVTEEEVENSVKHIPSLATVILVKTMIRKRSFGNPFEGSRREERSLSAPGNLLTKQGSEDNLQGTDPPPVGEEEVLL

SEQ ID NO: 249090 - DNA, 1626 bp, Artificial Sequence
  derived and/or modified sequence
atgagcagctgcgtgagcagccagcccagcagcaacagagccgccccccaggacgagctgggcggcagaggcagcagcagcagcgagagccagaagccctgcgaggccctgagaggcctgagcagcctgagcatccacctgggcatggagagcttcatcgtggtgaccgagtgcgagcccggctgcgccgtggacctgggcctggccagagacagacccctggaggccgacggccaggaggtgcccctggacaccagcggcagccaggccagaccccacctgagcggcagaaagctgagcctgcaggagagaagccagggcggcctggccgccggcggcagcctggacatgaacggcagatgcatctgccccagcctgccctacagccccgtgagcagcccccagagcagccccagactgcccagaagacccaccgtggagagccaccacgtgagcatcaccggcatgcaggactgcgtgcagctgaaccagtacaccctgaaggacgagatcggcaagggcagctacggcgtggtgaagctggcctacaacgagaacgacaacacctactacgccatgaaggtgctgagcaagaagaagctgatcagacaggccggcttccccagaagacccccccccagaggcaccagacccgcccccggcggctgcatccagcccagaggccccatcgagcaggtgtaccaggagatcgccatcctgaagaagctggaccaccccaacgtggtgaagctggtggaggtgctggacgaccccaacgaggaccacctgtacatggtgttcgagctggtgaaccagggccccgtgatggaggtgcccaccctgaagcccctgagcgaggaccaggccagattctacttccaggacctgatcaagggcatcgagtacctgcactaccagaagatcatccacagagacatcaagcccagcaacctgctggtgggcgaggacggccacatcaagatcgccgacttcggcgtgagcaacgagttcaagggcagcgacgccctgctgagcaacaccgtgggcacccccgccttcatggcccccgagagcctgagcgagaccagaaagatcttcagcggcaaggccctggacgtgtgggccatgggcgtgaccctgtactgcttcgtgttcggccagtgccccttcatggacgagagaatcatgtgcctgcacagcaagatcaagagccaggccctggagttccccgaccagcccgacatcgccgaggacctgaaggacctgatcaccagaatgctggacaagaaccccgagagcagaatcgtggtgcccgagatcaagctgcacccctgggtgaccagacacggcgccgagcccctgcccagcgaggacgagaactgcaccctggtggaggtgaccgaggaggaggtggagaacagcgtgaagcacatccccagcctggccaccgtgatcctggtgaagaccatgatcagaaagagaagcttcggcaaccccttcgagggcagcagaagagaggagagaagcctgagcgcccccggcaacctgctgaccaagcagggcagcgaggacaacctgcagggcaccgaccccccccccgtgggcgaggaggaggtgctgctgtag

SEQ ID NO: 249091 - DNA, 1575 bp, Artificial Sequence
  derived and/or modified sequence
atgagcagctgcgtgagcagccagcccagcagcaacagagccgccccccaggacgagctgggcggcagaggcagcagcagcatccacctgggcatggagagcttcatcgtggtgaccgagtgcgagcccggctgcgccgtggacctgggcctggccagagacagacccctggaggccgacggccaggaggtgcccctggacaccagcggcagccaggccagaccccacctgagcggcagaaagctgagcctgcaggagagaagccagggcggcctggccgccggcggcagcctggacatgaacggcagatgcatctgccccagcctgccctacagccccgtgagcagcccccagagcagccccagactgcccagaagacccaccgtggagagccaccacgtgagcatcaccggcatgcaggactgcgtgcagctgaaccagtacaccctgaaggacgagatcggcaagggcagctacggcgtggtgaagctggcctacaacgagaacgacaacacctactacgccatgaaggtgctgagcaagaagaagctgatcagacaggccggcttccccagaagacccccccccagaggcaccagacccgcccccggcggctgcatccagcccagaggccccatcgagcaggtgtaccaggagatcgccatcctgaagaagctggaccaccccaacgtggtgaagctggtggaggtgctggacgaccccaacgaggaccacctgtacatggtgttcgagctggtgaaccagggccccgtgatggaggtgcccaccctgaagcccctgagcgaggaccaggccagattctacttccaggacctgatcaagggcatcgagtacctgcactaccagaagatcatccacagagacatcaagcccagcaacctgctggtgggcgaggacggccacatcaagatcgccgacttcggcgtgagcaacgagttcaagggcagcgacgccctgctgagcaacaccgtgggcacccccgccttcatggcccccgagagcctgagcgagaccagaaagatcttcagcggcaaggccctggacgtgtgggccatgggcgtgaccctgtactgcttcgtgttcggccagtgccccttcatggacgagagaatcatgtgcctgcacagcaagatcaagagccaggccctggagttccccgaccagcccgacatcgccgaggacctgaaggacctgatcaccagaatgctggacaagaaccccgagagcagaatcgtggtgcccgagatcaagctgcacccctgggtgaccagacacggcgccgagcccctgcccagcgaggacgagaactgcaccctggtggaggtgaccgaggaggaggtggagaacagcgtgaagcacatccccagcctggccaccgtgatcctggtgaagaccatgatcagaaagagaagcttcggcaaccccttcgagggcagcagaagagaggagagaagcctgagcgcccccggcaacctgctgaccaagcagggcagcgaggacaacctgcagggcaccgaccccccccccgtgggcgaggaggaggtgctgctgtag

SEQ ID NO: 249092 - DNA, 5304 bp, Artificial Sequence
  derived and/or modified sequence
cccatctctacgaaaaatacaaaaattagccaagtatggtggccggcgcctgtaatcccagctactcgggagactgaggcagagaactgcttgaacctgggaggcagaggttgcagtgatccgagatcgcgtcactgcactccagcgtgggcgacagagcgagactccgtttcagaaaagaaaaaaaaaaaaaaaaaaaagggagtcggggtggagctctcattggctcgttgcatgtgagtgtccctacggcctagaaatacaagagaagcacatcggaacgggctggaaatccacccagttaactagagggctttgaaccttttattaacttggaggttgactctcctgtcaactcgattcccttttggctgtttggcagggtcagtgagacatcccctgggtcgctcgaccccgtaggacggttcagggagccctccaggtcttcgtttctcctcttccccgcacagtgctgttatccagctgggggatccaacgcacacttaaggctccagcaaagtggctccgctgccggatgggagtgccccagtgtgctggatgaagctggcgcatgcaccatgtcatcatgtgtctctagccagcccagcagcaaccgggccgccccccaggatgagctggggggcaggggcagcagcagcagcgaaagccagaagccctgtgaggccctgcggggcctctcatccttgagcatccacctgggcatggagtccttcattgtggtcaccgagtgtgagccgggctgtgctgtggacctcggcttggcgcgggaccggcccctggaggccgatggccaagaggtcccccttgacacctccgggtcccaggcccggccccacctctccggtcgcaagctgtctctgcaagagcggtcccagggtgggctggcagccggtggcagcctggacatgaacggacgctgcatctgcccgtccctgccctactcacccgtcagctccccgcagtcctcgcctcggctgccccggcggccgacagtggagtctcaccacgtctccatcacgggtatgcaggactgtgtgcagctgaatcagtataccctgaaggatgaaattggaaagggctcctatggtgtcgtcaagttggcctacaatgaaaatgacaatacctactatgcaatgaaggtgctgtccaaaaagaagctgatccggcaggccggctttccacgtcgccctccaccccgaggcacccggccagctcctggaggctgcatccagcccaggggccccattgagcaggtgtaccaggaaattgccatcctcaagaagctggaccaccccaatgtggtgaagctggtggaggtcctggatgaccccaatgaggaccatctgtacatggtgttcgaactggtcaaccaagggcccgtgatggaagtgcccaccctcaaaccactctctgaagaccaggcccgtttctacttccaggatctgatcaaaggcatcgagtacttacactaccagaagatcatccaccgtgacatcaaaccttccaacctcctggtcggagaagatgggcacatcaagatcgctgactttggtgtgagcaatgaattcaagggcagtgacgcgctcctctccaacaccgtgggcacgcccgccttcatggcacccgagtcgctctctgagacccgcaagatcttctctgggaaggccttggatgtttgggccatgggtgtgacactatactgctttgtctttggccagtgcccattcatggacgagcggatcatgtgtttacacagtaagatcaagagtcaggccctggaatttccagaccagcccgacatagctgaggacttgaaggacctgatcacccgtatgctggacaagaaccccgagtcgaggatcgtggtgccggaaatcaagctgcacccctgggtcacgaggcatggggcggagccgttgccgtcggaggatgagaactgcacgctggtcgaagtgactgaagaggaggtcgagaactcagtcaaacacattcccagcttggcaaccgtgatcctggtgaagaccatgatacgtaaacgctcctttgggaacccattcgagggcagccggcgggaggaacgctcactgtcagcgcctggaaacttgctcacgaagcaaggcagcgaagacaacctccagggcaccgacccgccccccgtgggggaggaggaagtgctcttgtgagaggcagtccctgcgtggaaagttgctgggcccccgcccccggctcccccgcacgcatgcatccactgcggccggaggaggccatggagcccgagtagctgcctggatcgctcgacctcgcatgcgcgccgcgtcgcctctggggggctgctgcaccgcgtttccatagcagcatgtcctacggaaacccagcacgtgtgtagagcctcgatcgtcatctctggttatttgttttttcctttgttgttttaaaggggacaaaaaaaaaaaaaggacttgactccatgacgtcgaccgtggccgctggctggctggacaggcgggtgtgaggagttgcagacccaaacccacgtgcattttgggacaattgctttttaaaacgtttttatgccaaaaatccttcattgtgattttcagaaccacgtcagatataccaagtgactgtgtgtggggtttgacaactgtggaaaggcgagcagaaaactccggcggtctgaggccatggaggtggttgctgcatttgagagggagtagggggctagatgtggctcctagtgcaaaccggaaaccatggcaccttccagagccgtggtctcaaggagtcagagcagggctggccctcagtagctgcagggagctttgatgcaacttatttgtaagaaggatttttaaattttttatgggtagaattgtagtcaggaaaacagaaagggcttgaaatttaataagtgctgctggaaggggattttccaagcctggaagggtattcagcagctgtggtggggaaacatttctcctgaaagactgaacgtgtttcttcatgacagctgctcaaagcaggtttctgagatagctgaccgagctctggtaaatctctttgtcaaattacgaaaacttcagggtgaaatcctatgcttccatgtacattacatggcttaagattaaacaaaaacatttttcaagtctctaactagagtgaactctagagcacagtagttcagaaactatttagagcttccaggatatatttcacagcttcaggcatgtgatcagttagagccgatgaaacctatgcccgcctgtatatatattagcagcttagctagttcataacctgtatattctaaagactgctaaggttttgttttcattttaaatcctagctgattgttgtggtcaatgaaatacccagtttctggagggccaggtgggaaatgctttcactggaccaacacacaaatgatcatcctgaggatctgagcttccctagactccacacaataaccttggggcacccttttagagaagactgttgaaacccacagcactcgttggggtatgaggaaaccagggcttggcacaggaagttcccctttgtagctaaaagtccagaaagaaagggttcatctttttgacttccaactgatattgggaagtttggttgaggttcaagtgtgactccttccagagccacaggtaggggagtgtgaagttgagggggaggaaagctggaaggactctgccttgggagattcccagctctgctttccagcgcttggtggaatctgggctggggaaagacggcaccgggaaactctgcttccccattgtttccatctgatcagctgtggtgtgaggacttctcagacaaaggcaaggcctcgtgcccctgcccagcccattcatggagccctgggccttcttggcttccatagatcctaagctcttgactgtagtttagccagacttgttttgctatcttataagcagttcagaattagggaatgctggttttgaagagcaaaggacaggtagtctagagagggtcgtctggcctgcttgctgggtctttgtaacccagcacttcctcttgccctcctggctttatgtttatggggagaggactcaatagctccaccccttctggcaccagatggggcttggttagtttgcaataagcaccttgcagaggttaaagccagcgggtccctagtcttaggcccagcctgcttgtgtgggctctggcctggcctggtggctggcccagggggcagcagtgcttagagcttctgcagggcttctcttgtttacacagctgcatcagacaatgccatttctccccaccacggaaccttccatctaagatttcttccagggaatgccagcaatcaggcagcacccagctgtgggggcagtggggtgggggagacccacattgatgactttttttttttcttttaatgaagaaacaccaaagaaagctgtggaaaggacctgccccacatgaaaaggataagccaagatggctgtaaacacagagcatttgagctgccactcttggagcacattgatttttcaaaagccagctctgtcaggaaaggaggtgctgttatgagcagctcttccagtgggcaaagaggacgcccataatttcttccattgctagctcatctgtgggaccaatttggtgtaagcaacctgtggcctgcacttgtggcctcgaaggaagcacaaaccctccatccacttcccatttcctctgcccttttccacctcccccttccatcccaccagctgccagtggctcccagaaagccttattgagccccttgttgacacttggggctgcggaggcctctccctactggtctggcctttcctgagaggcaggtcttccgtcctcagagcctttctggaacaaggagaatgcctgtgcaggtggacacacaggcctggcctgtcgctctcacttgtcttccagcggggagcttcacgttgccgagtggaagaaccatgacctccacttgcttccaaggtgctagggaagtttcagggtacgctggttcccctctccagctggaggccgagtttctggggactgcagatttttctactctgtgatcgattcaatgcccgatgcttctgtttcattcccgaccctttctactatgcattttccttttatcaggtgtataaagttaaatactgtgtatttatcactaaaaagtacatgaacttaagagacaactaagcctttcgtgtttttccacaggtgtttaagcttctctgtacagttgaaataaacagacagcaaaatggt

SEQ ID NO: 249093 - DNA, 1626 bp, Artificial Sequence
  derived and/or modified sequence
atgagctcttgcgttagttcgcagcccagctctaatcgggcggcccctcaggacgagctgggcggtagagggtcctcatcaagtgaaagtcagaagccatgcgaggcgctgagaggcctgtctagccttagcatccacctgggcatggagtcatttattgtagttaccgaatgtgagcctggatgtgcagttgacctgggcttggctagagacaggccactcgaggcggatgggcaggaggtgcccctcgacacgtccggatcccaggctagacctcacctcagtgggcgcaaactctcgctgcaggagagatcgcagggcggcctcgccgccggtggcagcctagacatgaatgggcgatgcatctgcccttctcttccttacagccccgtttcatcaccccagagctcacccaggctccccagaagacccacagttgagtcacaccatgtcagcattactggcatgcaggactgtgtgcaattgaatcaatatacgctgaaggatgaaattggaaagggatcttatggcgttgttaagctggcctacaatgagaacgacaatacttactacgctatgaaagtcctgagtaagaaaaagttgatcaggcaggctggatttccacgacgcccgcccccaagaggcacacgaccagccccaggcggctgcatacagccaaggggtcctattgagcaagtgtaccaggagatagccatcttgaaaaagctggaccacccgaacgttgtcaagctcgtggaagtgctggatgacccaaatgaggatcacctctacatggtgttcgagcttgtcaaccagggacccgtaatggaggtgcccacactcaagcccttgagtgaagaccaggctagattctactttcaggatctcattaaaggcattgaataccttcactatcaaaaaattattcatcgggacatcaagccctccaaccttctggtgggcgaagatggccatattaagatcgctgacttcggcgtgagcaatgaattcaaaggctcagacgcccttttgagtaatacagtgggcactccagctttcatggcacctgaaagcttatctgagaccagaaagattttctcgggtaaagccctagatgtttgggcaatgggtgtgactttatactgttttgtatttggccagtgtccttttatggacgaacggatcatgtgcctacattcaaaaatcaagagccaagctttggaatttccagatcaacctgacattgctgaggacctgaaggatctcatcacccgaatgctcgacaaaaaccctgagagtcgcatcgttgtccctgagatcaagctgcatccatgggtgaccagacacggagccgagccccttccctccgaggatgaaaactgcaccttggtcgaggtcaccgaggaagaggttgaaaactcagtcaagcacataccttccttggccacggttatcctggtcaagacaatgatcagaaagagaagcttcggaaacccatttgagggttccagacgggaggaaaggtcactctccgccccaggcaatctcctgactaagcaggggagcgaggacaatctccaaggtactgatcccccacctgtgggcgaagaggaagtgctcttgtag

SEQ ID NO: 249094 - DNA, 1960 bp, Artificial Sequence
  derived and/or modified sequence
aagctgagccgagccgagccgagctgggggcgcagagcgcgggaggcggcggcggcgcggagcccaggtggctccgctgccggatgggagtgccccagtgtgctggatgaagctggcgcatgcaccatgtcatcatgtgtctctagccagcccagcagcaaccgggccgccccccaggatgagctggggggcaggggcagcagcagcatccacctgggcatggagtccttcattgtggtcaccgagtgtgagccgggctgtgctgtggacctcggcttggcgcgggaccggcccctggaggccgatggccaagaggtcccccttgacacctccgggtcccaggcccggccccacctctccggtcgcaagctgtctctgcaagagcggtcccagggtgggctggcagccggtggcagcctggacatgaacggacgctgcatctgcccgtccctgccctactcacccgtcagctccccgcagtcctcgcctcggctgccccggcggccgacagtggagtctcaccacgtctccatcacgggtatgcaggactgtgtgcagctgaatcagtataccctgaaggatgaaattggaaagggctcctatggtgtcgtcaagttggcctacaatgaaaatgacaatacctactatgcaatgaaggtgctgtccaaaaagaagctgatccggcaggccggctttccacgtcgccctccaccccgaggcacccggccagctcctggaggctgcatccagcccaggggccccattgagcaggtgtaccaggaaattgccatcctcaagaagctggaccaccccaatgtggtgaagctggtggaggtcctggatgaccccaatgaggaccatctgtacatggtgttcgaactggtcaaccaagggcccgtgatggaagtgcccaccctcaaaccactctctgaagaccaggcccgtttctacttccaggatctgatcaaaggcatcgagtacttacactaccagaagatcatccaccgtgacatcaaaccttccaacctcctggtcggagaagatgggcacatcaagatcgctgactttggtgtgagcaatgaattcaagggcagtgacgcgctcctctccaacaccgtgggcacgcccgccttcatggcacccgagtcgctctctgagacccgcaagatcttctctgggaaggccttggatgtttgggccatgggtgtgacactatactgctttgtctttggccagtgcccattcatggacgagcggatcatgtgtttacacagtaagatcaagagtcaggccctggaatttccagaccagcccgacatagctgaggacttgaaggacctgatcacccgtatgctggacaagaaccccgagtcgaggatcgtggtgccggaaatcaagctgcacccctgggtcacgaggcatggggcggagccgttgccgtcggaggatgagaactgcacgctggtcgaagtgactgaagaggaggtcgagaactcagtcaaacacattcccagcttggcaaccgtgatcctggtgaagaccatgatacgtaaacgctcctttgggaacccattcgagggcagccggcgggaggaacgctcactgtcagcgcctggaaacttgctcacgaagcaaggcagcgaagacaacctccagggcaccgacccgccccccgtgggggaggaggaagtgctcttgtgagaggcagtccctgcgtggaaagttgctgggcccccgcccccggctcccccgcacgcatgcatccactgcggccggaggaggccatggagcccgagtagctgcctggatcgctcgacctcgcatgcgcgccgcgtcgcctctggggggctgctgcaccgcgtttccatagcagcatgtcctacggaaacccagcacgtgtgtagagcctcgatcgtcatctctggttatttgttttttcctttgttgttttaaaggggac

SEQ ID NO: 249095 - DNA, 1575 bp, Artificial Sequence
  derived and/or modified sequence
atgtcctcatgtgtgagcagccagcctagttcaaatcgggccgctccccaagacgagctggggggccgtggcagttcttctatacatctcggcatggagtccttcattgtggtcacggagtgtgagccaggttgcgctgtcgatttgggcctggcccgggatcgccctctagaagccgatggtcaagaagtgccgctggacacaagtggcagtcaggcaagacctcatctatctggacgcaagctgagcctgcaggagagaagccagggaggccttgcagccgggggtagccttgacatgaacggtcgctgtatttgtcccagcttgccctattccccggtatcatcgccccaatcaagtccccggcttccacggcgaccaaccgttgagtcacatcacgtgagcatcacgggaatgcaggactgcgtgcagttgaatcagtatactcttaaggacgagatcggaaaagggtcttacggtgtggtgaagttggcctataacgagaatgataatacctattacgccatgaaagtgcttagcaaaaaaaagctgattcgccaggccgggttccctagacgccctccgcctcgaggaactagacctgcccccggcggctgtatccagccgcggggccctatcgagcaggtctaccaggaaatagccatactgaagaaactcgatcacccaaatgtagtgaagctcgtggaagtgctcgacgatccaaacgaggatcacctctatatggtgttcgagttagtaaaccagggcccagtgatggaagtccccaccttgaagccgctgtcagaggatcaggctagattctactttcaggacttaattaaggggatagagtacctgcactaccagaaaataatacaccgcgatataaaacctagcaaccttctggtcggggaggacggacacatcaagatagctgacttcggcgtgtcgaacgagttcaagggatctgacgccttattatcaaatacggtcgggactccagccttcatggcccccgagagccttagcgaaacccggaagattttctccggaaaagcactggacgtctgggctatgggagtcacgctttactgcttcgtgttcggtcagtgtccctttatggatgagcgaataatgtgtctacactcaaagattaagtcacaagccttggaattccctgaccagccggacattgctgaagaccttaaagacctcattacccgaatgctagataagaatcccgagtcgcgcattgtggtcccggagattaaacttcatccatgggtgactaggcacggggcagagccactgccatcagaggatgagaactgtacacttgtggaggtaactgaggaggaggtagaaaactcagttaagcacatccccagtctcgctactgtgattttggtgaagacaatgataaggaaacgatcatttggcaatccgtttgaaggtagtagaagggaggaacggtccctgagtgctccggggaaccttctgaccaagcagggatcagaggataatttacaggggacagacccaccccccgtgggggaggaggaagtcctcctgtag

SEQ ID NO: 249096 - DNA, 1626 bp, Artificial Sequence
  derived and/or modified sequence
atgtcttcgtgtgttagtagccagccatcgtctaaccgtgctgccccccaggatgagttggggggcaggggaagctcatcttctgagtcccagaagccctgtgaagcacttaggggtctgtcctccctcagcattcatctaggcatggaaagctttatagtggttaccgagtgtgagccaggatgcgctgtagatctgggcctagctcgtgataggcctctggaagctgacggccaggaagtccccctagatacatctggcagccaagccaggccacatctgtcggggcgcaaactgtcactccaggaacgcagccaagggggattagctgccggagggagcctcgatatgaatggtcgctgtatctgtccgtctcttccttattcccctgtttcctcaccgcagtcttctccaagacttccccgtcggcctacagttgaatcacatcatgttagtataaccggaatgcaggactgcgtgcagctgaaccaatacacccttaaggacgagatcggcaaaggatcctacggtgtggtgaaattagcttacaacgaaaatgacaacacctattatgccatgaaagtgctgtcaaagaaaaagctgatccgacaggccggcttccctcggagacctcctcctcgtgggaccaggccagccccgggtggctgtattcaaccgaggggcccaattgaacaggtttaccaggaaattgccattttgaagaaacttgaccatcctaacgttgttaaattggtcgaggttctggatgaccccaacgaagatcatttgtacatggttttcgagctagttaatcaaggtccagtcatggaggtccccaccctgaaaccgctatcagaagaccaggctagattctactttcaagatttgattaagggaattgagtatctgcattatcagaagatcattcaccgcgacatcaaacccagcaatttgctggttggagaagacggacacatcaagatcgccgatttcggggtgtccaatgaattcaagggcagtgatgctctgttatcaaacacggtgggcacaccagcattcatggccccagagtcattgtccgagaccaggaagattttttccggaaaggcattagatgtgtgggccatgggcgtcacactgtactgtttcgttttcggccaatgcccttttatggacgagcgaatcatgtgtctgcacagtaagatcaagtcccaagctctcgagtttccagatcagcctgatatcgcagaggacttaaaggacctgatcacgcggatgctggataagaatcccgagtctagaattgttgtgccagagatcaagctacacccttgggtgacacggcatggtgctgagccgctgccgagtgaggacgagaactgtacactcgtggaagttacagaggaggaggtcgagaatagcgtaaagcacataccctccctggctaccgtaatcctcgttaaaacgatgattcggaagcggtccttcggaaatccattcgagggctccaggcgggaagagagaagcttgtcagctcccggaaaccttctgaccaaacagggcagcgaggataatttgcagggtaccgacccaccccctgtaggcgaagaggaagtacttctatag

SEQ ID NO: 249097 - DNA, 1626 bp, Artificial Sequence
  derived and/or modified sequence
atgagcagctgtgtgagcagccagcccagcagcaacagagctgccccccaggatgagctgggcggccggggcagcagcagcagcgagagccagaagccctgtgaggccctgcggggcctgagcagcctgagcatccacctgggcatggagagcttcatcgtggtgacagaatgtgagcccggctgtgctgtggacctgggcctggcccgggaccggcccctggaggctgatggccaggaggtgcccctggacaccagcggcagccaggcccggccccacctgagcggcaggaagctgagcctgcaggagaggagccagggcggcctggccgccggcggcagcctggacatgaatggccgctgcatctgccccagcctgccctacagccctgtgagcagcccccagagcagcccccggctgccccggcggcccaccgtggagagccaccacgtgtccatcaccggcatgcaggactgtgtgcagctgaaccagtacaccctgaaggatgaaattggcaagggcagctatggagtggtgaagctggcctacaatgaaaatgacaacacctactatgccatgaaggtgctgagcaagaagaagctgatccggcaggccggcttcccccggcggcccccaccccggggcaccaggcctgcccctgggggctgcatccagccccggggccccatcgagcaggtgtaccaggagatcgccatcctgaagaagctggaccaccccaacgtggtgaagctggtggaggtgctggatgaccccaatgaagaccacctgtacatggtgtttgagctggtgaaccagggccctgtgatggaggtgcccaccctgaagcccctgtctgaggaccaggcccgcttctacttccaggacctgatcaagggcatcgagtacctgcactaccagaagatcatccaccgggacatcaagcccagcaacctgctggtgggggaggatggccacatcaagattgctgactttggagtgtccaatgagttcaagggcagtgatgccctgctgagcaacacagtgggcaccccagccttcatggcccctgagagcctgtctgagaccaggaagatcttcagcggcaaggccctggatgtgtgggccatgggcgtgaccctgtactgctttgtgtttggccagtgccccttcatggatgagcgcatcatgtgcctgcacagcaagatcaagagccaggccctggagttcccagaccagcctgacattgctgaggacctgaaggacctgatcaccaggatgctggacaagaaccctgagagcagaattgtggtgcctgagatcaagctgcacccctgggtgaccaggcatggagctgagcccctgcccagtgaagatgagaactgcaccctggtggaggtgacagaggaggaggtggagaacagcgtgaagcacatccccagcctggccaccgtcatcctggtgaagaccatgatcaggaagaggagctttggaaacccctttgagggcagccggcgggaggagaggagcctgagcgcccctggcaacctgctgaccaagcagggcagcgaggacaacctgcagggcacagatcctcctcctgtgggggaggaggaggtgctgctgtag

SEQ ID NO: 249098 - DNA, 1575 bp, Artificial Sequence
  derived and/or modified sequence
atgagcagctgtgtgagcagccagcccagcagcaacagagctgccccccaggatgagctgggcggccggggcagcagcagcatccacctgggcatggagagcttcatcgtggtgacagaatgtgagcccggctgtgctgtggacctgggcctggcccgggaccggcccctggaggctgatggccaggaggtgcccctggacaccagcggcagccaggcccggccccacctgagcggcaggaagctgagcctgcaggagaggagccagggcggcctggccgccggcggcagcctggacatgaatggccgctgcatctgccccagcctgccctacagccctgtgagcagcccccagagcagcccccggctgccccggcggcccaccgtggagagccaccacgtgtccatcaccggcatgcaggactgtgtgcagctgaaccagtacaccctgaaggatgagatcggcaagggcagctatggagtggtgaagctggcctacaatgaaaatgacaacacctactatgccatgaaggtgctgagcaagaagaagctgatccggcaggccggcttcccccggcggcccccaccccggggcaccaggcctgcccctgggggctgcatccagccccggggccccatcgagcaggtgtaccaggagatcgccatcctgaagaagctggaccaccccaacgtggtgaagctggtggaggtgctggatgaccccaatgaagaccacctgtacatggtgtttgagctggtgaaccagggccctgtgatggaggtgcccaccctgaagcccctgtctgaggaccaggcccgcttctacttccaggacctgatcaagggcatcgagtacctgcactaccagaagatcatccaccgggacatcaagcccagcaacctgctggtgggagaagatggccacatcaagattgctgactttggagtgtccaatgagttcaagggcagtgatgccctgctgagcaacacagtgggcaccccagccttcatggcccctgagagcctgtctgagaccaggaagatcttcagcggcaaggccctggatgtgtgggccatgggcgtgaccctgtactgctttgtgtttggccagtgccccttcatggatgagcgcatcatgtgcctgcacagcaagatcaagagccaggccctggagttcccagaccagcctgacattgctgaggacctgaaggacctgatcaccaggatgctggacaagaaccctgagagccgcatcgtggtgcctgagatcaagctgcacccctgggtgaccaggcatggagctgagcccctgcccagtgaagatgagaactgcaccctggtggaggtgacagaggaggaggtggagaacagcgtgaagcacatccccagcctggccaccgtcatcctggtgaagaccatgatcaggaagaggagctttggaaacccctttgagggcagcagaagagaggagaggagcctgagcgcccctggcaacctgctgaccaagcagggcagcgaggacaacctgcagggcacagaccccccacctgtgggggaggaggaggtgctgctgtag

SEQ ID NO: 249099 - DNA, 1626 bp, Artificial Sequence
  derived and/or modified sequence
atgagcagctgcgtgagcagccagcccagcagcaaccgggccgccccccaggatgagctagggggccgcgggtcaagctctagcgagagccagaagccctgcgaagcattgagaggattgagctccctgtccatacatttgggaatggagtcattcatcgttgtaacagaatgtgagccaggctgcgctgtggatctggggctggctcgtgatcgtccattggaggccgatgggcaggaggttccactagatacctccggctcccaggccaggccccatctgtccggacgcaagcttagtctgcaggagcgtagtcaggggggtcttgctgctggtggtagcctggatatgaatggcaggtgcatctgtccttccctgccctatagcccggtgtcttctcctcagtcatcaccacgattacctcgcagaccgaccgtggaatcacatcatgtgtctattacagggatgcaggattgcgtgcagctgaatcagtatacgctgaaagacgagattggcaaaggctcatatggggtggttaagctggcctacaacgagaatgacaatacatactacgctatgaaggtgctttctaaaaagaagctgattcggcaggccggctttcctcgcaggcctccacctagagggacgagacccgccccaggaggctgtattcagcccagaggtccaattgagcaggtctaccaggaaatcgccatcttaaaaaaacttgaccaccccaacgttgtgaagctggtcgaagtcctggacgatcccaacgaggaccacctttatatggtattcgaactagttaatcaaggacctgtgatggaagttccaactctgaagcctctatccgaagatcaagccaggttctactttcaggatctgatcaaaggaatcgagtatctccactatcaaaaaatcattcaccgggacatcaaaccatctaacctgctcgttggagaggacggacatataaaaatcgctgatttcggtgtgagtaacgaattcaaaggctccgacgcactgctaagcaacacagtggggacccctgccttcatggctcctgagtctctctcggaaacaaggaagattttttcaggaaaggcactggatgtctgggccatgggggtaaccctgtattgcttcgtcttcggtcagtgtcctttcatggacgagagaatcatgtgccttcactcaaaaataaagagccaagctctggagttccccgatcagccagacatagcagaggacttaaaggatctgataactcggatgctcgacaagaaccctgaatctcggattgttgttcctgaaattaaactgcatccatgggtcacaagacacggggctgagccattgcccagcgaagatgagaattgtactctggtggaggttactgaagaagaggttgaaaattcagtcaaacatattccctccctagccaccgttattctggtgaagacaatgatccgtaaacggtcttttggtaaccccttcgaaggaagtcggagagaggagcgaagcctctcggcccctggtaatttgctgactaaacagggttcagaggacaatctccaggggactgacccacctcctgttggagaagaggaggtactgctttag

SEQ ID NO: 249100 - DNA, 1575 bp, Artificial Sequence
  derived and/or modified sequence
atgagcagctgcgtgagcagccagcccagcagcaaccgggccgcccctcaagatgaattgggcggcaggggctcatcatccatccatctgggaatggagagctttattgttgtaacggaatgtgagcccggctgtgcagtggacctcgggcttgccagagataggcccttggaggccgatggacaggaagtccccctcgacacctcaggtagtcaggcaaggcctcacctgtcaggacgcaaactgtctctacaggaaagaagtcagggaggtttggctgcgggcggaagtctagatatgaacgggaggtgtatctgcccgagcctcccatatagcccagtttcctcaccccagagttccccgcggctgccccggcgtcctacagttgagtcgcaccacgtgtcaattaccggtatgcaggactgcgtccagctaaaccaatataccctgaaggacgagataggcaagggttcttacggagtggtcaaattggcctacaatgaaaatgacaatacatattacgccatgaaagtcctttccaaaaagaagcttattcgacaggctgggttcccgcggaggcccccaccccggggcactcgacctgcgccaggggggtgcatccagccacgtggtcctatcgaacaggtctaccaggagattgccatcctgaagaagctggatcatcctaacgtggtgaagctggtggaggtgttggatgaccccaatgaagaccacttatatatggtattcgagctggtcaatcagggacccgttatggaggtgcccacactcaagccgctgtcagaggatcaagcccgattttattttcaagaccttatcaagggcatagagtatcttcactaccagaagataatccatcgcgacattaagccaagcaatttgcttgtcggggaggacgggcacattaaaatcgctgatttcggagtgagcaacgaattcaagggcagcgatgcactgctcagcaatactgtggggacccccgcttttatggccccagaaagcctatctgaaactagaaaaatattctctgggaaggccctggatgtgtgggctatgggcgttactctgtactgcttcgtgttcggccaatgccctttcatggatgagcgaataatgtgtctgcacagcaagatcaagagtcaggccttggagtttcctgaccagcctgacatcgctgaagatctgaaagaccttatcacccgcatgctggataagaaccccgaatctcggatcgttgtccctgaaattaaactccatccatgggtgacccgccacggcgccgaaccattaccttccgaagacgagaactgtacgttggtggaagtaactgaggaggaggtggagaattctgtcaaacatattccgtctttggccaccgtgatcctggtgaagacaatgattaggaaacgctcatttggcaatcctttcgagggcagccgcagggaggaacggagtctgtctgcgcctggcaatctgctcaccaagcagggatcagaggataatctgcaaggcaccgatcccccacccgtgggcgaggaggaggttctgttgtag

SEQ ID NO: 249101 - DNA, 1626 bp, Artificial Sequence
  derived and/or modified sequence
atgagcagctgcgtgagcagccagcccagcagcaaccgggccgcccctcaggacgagctgggcggacgcgggtctagtagtagtgagagccagaagccttgcgaggccctccgcggcctgtcctcgcttagtattcacttgggaatggaatcctttattgtagtgacagagtgcgaaccaggttgtgccgttgacctgggcctggctcgtgaccgcccacttgaggcagatgggcaggaggtgcccttggacacttcagggtcacaagcacggccgcacttgagtggtcgcaagctttcgttgcaggaaagatcacaagggggcctagcagctgggggaagcctcgatatgaatggcagatgcatttgtcctagtctgccttactcaccagtgagcagtcctcaaagttcacccaggctccctaggaggccgaccgtcgaatcacatcacgtttctataacaggaatgcaagattgcgtgcagctgaaccagtacacactgaaagatgaaattgggaaaggatcgtacggggtggtgaagctcgcctataatgagaatgataatacatattacgccatgaaggtgctttctaagaagaagttgattcgacaagccggattcccacgacggcccccgcctagaggcacgcggcctgcacccggtggctgcattcaaccccggggtcccatcgaacaggtataccaggagattgccatactcaaaaagctggaccatcctaatgtggtcaaactggtggaggtgctggacgatcctaacgaggaccacttgtacatggtctttgagctggtcaatcaaggccctgtcatggaagtgccgactttgaagcccttgagcgaggatcaggctcgtttctactttcaagatctcatcaagggtatagaatatcttcactatcagaagatcattcacagagacattaaacccagtaatctgctggtcggtgaggacggtcatatcaagattgccgatttcggcgtgagcaatgagtttaaggggtccgacgctctgctgagtaacacggtgggtaccccagcattcatggcccccgaatctttaagtgaaacgaggaagatcttttcagggaaggccctggatgtttgggcaatgggcgtaaccctgtactgtttcgtgttcggccagtgtccctttatggacgagcgcatcatgtgcctgcattctaagataaagtcacaagccttggagtttccagaccaacctgacatcgccgaagatctcaaggatctcataacccgaatgctggataagaatcccgagtcccgaattgtggtccccgagattaagctacacccttgggtgactaggcatggggcagagcctttgccttccgaggatgaaaactgtaccctggtggaggtcactgaggaagaagtggaaaattctgtgaagcatattccatctttagccacagtgattctggttaaaacgatgatccgcaaacgttcatttggtaatcctttcgagggatccagaagagaggaaaggagtctgtcagcacccggaaaccttctaaccaaacaaggatctgaggataatctacaagggacggacccacctcccgtaggcgaggaagaagtcttgttgtag

SEQ ID NO: 249102 - DNA, 2006 bp, Artificial Sequence
  derived and/or modified sequence
ccgagctgggggcgcagagcgcgggaggcggcggcggcgcggagcccaggtggctccgctgccggatgggagtgccccagtgtgctggatgaagctggcgcatgcaccatgtcatcatgtgtctctagccagcccagcagcaaccgggccgccccccaggatgagctggggggcaggggcagcagcagcagcgaaagccagaagccctgtgaggccctgcggggcctctcatccttgagcatccacctgggcatggagtccttcattgtggtcaccgagtgtgagccgggctgtgctgtggacctcggcttggcgcgggaccggcccctggaggccgatggccaagaggtcccccttgacacctccgggtcccaggcccggccccacctctccggtcgcaagctgtctctgcaagagcggtcccagggtgggctggcagccggtggcagcctggacatgaacggacgctgcatctgcccgtccctgccctactcacccgtcagctccccgcagtcctcgcctcggctgccccggcggccgacagtggagtctcaccacgtctccatcacgggtatgcaggactgtgtgcagctgaatcagtataccctgaaggatgaaattggaaagggctcctatggtgtcgtcaagttggcctacaatgaaaatgacaatacctactatgcaatgaaggtgctgtccaaaaagaagctgatccggcaggccggctttccacgtcgccctccaccccgaggcacccggccagctcctggaggctgcatccagcccaggggccccattgagcaggtgtaccaggaaattgccatcctcaagaagctggaccaccccaatgtggtgaagctggtggaggtcctggatgaccccaatgaggaccatctgtacatggtgttcgaactggtcaaccaagggcccgtgatggaagtgcccaccctcaaaccactctctgaagaccaggcccgtttctacttccaggatctgatcaaaggcatcgagtacttacactaccagaagatcatccaccgtgacatcaaaccttccaacctcctggtcggagaagatgggcacatcaagatcgctgactttggtgtgagcaatgaattcaagggcagtgacgcgctcctctccaacaccgtgggcacgcccgccttcatggcacccgagtcgctctctgagacccgcaagatcttctctgggaaggccttggatgtttgggccatgggtgtgacactatactgctttgtctttggccagtgcccattcatggacgagcggatcatgtgtttacacagtaagatcaagagtcaggccctggaatttccagaccagcccgacatagctgaggacttgaaggacctgatcacccgtatgctggacaagaaccccgagtcgaggatcgtggtgccggaaatcaagctgcacccctgggtcacgaggcatggggcggagccgttgccgtcggaggatgagaactgcacgctggtcgaagtgactgaagaggaggtcgagaactcagtcaaacacattcccagcttggcaaccgtgatcctggtgaagaccatgatacgtaaacgctcctttgggaacccattcgagggcagccggcgggaggaacgctcactgtcagcgcctggaaacttgctcacgaagcaaggcagcgaagacaacctccagggcaccgacccgccccccgtgggggaggaggaagtgctcttgtgagaggcagtccctgcgtggaaagttgctgggcccccgcccccggctcccccgcacgcatgcatccactgcggccggaggaggccatggagcccgagtagctgcctggatcgctcgacctcgcatgcgcgccgcgtcgcctctggggggctgctgcaccgcgtttccatagcagcatgtcctacggaaacccagcacgtgtgtagagcctcgatcgtcatctctggttatttgttttttcctttgttgttttaaaggggacaaaaaaaaaaaaa

SEQ ID NO: 249103 - DNA, 1626 bp, Artificial Sequence
  derived and/or modified sequence
atgtcctcctgcgtgagcagccaaccctcaagtaatagagcggctccccaggacgaattaggtggtcgtgggagtagctcatctgagtcacagaagccctgtgaggccctccgaggactcagctcgctgagtatacacttgggtatggagtccttcatagtagtgaccgaatgtgagcccggatgcgccgtcgacttgggtctggccagagatagaccacttgaggccgacggccaggaggtgccgctggataccagtgggagtcaggctcgcccacatttgtcgggaaggaagctgtccttgcaagaacgcagtcagggcggtctcgcggctggcggatccctggatatgaacgggagatgcatatgccccagtttgccctattctcccgtgtcctccccgcagagctctcctcgactgccccgacggcctactgtcgaaagccatcatgtctctattaccggcatgcaggattgcgtccagcttaatcagtacaccctgaaagacgagataggtaagggctcgtacggagtggtgaagctggcctataacgaaaacgacaacacgtactatgcgatgaaagtcctgagcaaaaagaagctaatccgccaagctggttttccaaggcggccacctccgaggggtacccggcctgcccctggcggttgtattcaaccccgtgggccaatcgaacaggtgtaccaggaaattgctattttgaagaaactcgaccatccgaacgtggtgaaactcgtggaggtgctcgacgaccccaatgaggaccatttatatatggtgtttgaactggtcaatcagggaccagtgatggaggtcccaacgctcaaaccgttaagcgaggatcaggcacgcttttatttccaggacctcataaaggggatcgagtacctccactaccagaagataatacatagagatatcaaaccttccaacctcctggtgggcgaggacggtcacataaagatcgccgatttcggtgtgagcaacgagtttaagggttcagacgccctgctgtctaatactgtggggacccctgcctttatggcccctgaatccctctcagaaacccggaagatcttttcagggaaagcactggatgtgtgggccatgggagtaacactgtactgctttgttttcgggcaatgtccctttatggatgagcgcattatgtgtctccactccaagatcaaatctcaggccctggagttcccggatcagcccgatatagctgaggaccttaaagaccttatcaccagaatgctcgacaaaaatccagaatcccggatcgtcgtgccggagataaagctgcatccgtgggtgacccggcacggagccgaacctctgccctctgaagatgaaaattgtactcttgttgaagtcaccgaagaggaggtggagaacagcgttaaacacatcccgagtttagcaaccgtaattctcgtaaaaactatgattcggaagcggtcattcggaaacccctttgagggatcccggcgagaagagcgctccttgagcgctcccggtaatcttctgaccaagcagggatctgaggataatctgcaagggaccgaccccccaccggtcggcgaggaggaggtcttgctttag

SEQ ID NO: 249104 - DNA, 1575 bp, Artificial Sequence
  derived and/or modified sequence
atgagcagttgcgtgtcaagccaaccctccagcaaccgtgctgccccacaagacgagttgggtggaagaggcagctcaagcattcatctggggatggagtcattcattgtagtaacagaatgtgagccaggttgtgctgtggatctcggccttgcaagggaccgtccattagaggccgatggtcaggaagtgcccttagataccagcgggagccaagccagacctcacctgtccggaagaaaactttccctccaggagcgctcccaggggggactggccgctggcggaagtctggatatgaacggacggtgtatatgcccatccttaccatactcccccgtctcttccccgcagtccagccctagacttccccgacgccctacagtcgaatcccatcacgtgagcattacaggaatgcaggattgtgttcagctgaaccagtacactttaaaggatgagatcggcaagggttcctatggtgtcgtcaagctcgcctataacgaaaatgacaacacctactacgctatgaaagtactgtccaaaaagaaattgattcgtcaggcaggcttccctcggcgacctcctcctagaggcacgcgccctgcccctggagggtgcatccagccacgcggacccatagaacaggtgtatcaggagatagccatccttaaaaagctggatcaccctaacgtggtcaagcttgtcgaagtgcttgacgatcccaatgaggatcatctgtatatggtgtttgagttggtgaaccaggggcctgtgatggaggtccctacgctaaagccgctgtcagaagaccaggctcgcttctatttccaggatctcatcaaaggtattgagtatctccattaccaaaaaattatccacagggatattaaacctagtaacctcctagttggtgaggatggacatattaaaattgcggacttcggagtcagtaacgagttcaagggatctgacgccctcctgtccaataccgtgggaactcctgcctttatggccccagagagtttgtccgaaacccggaagatctttagcgggaaagctctcgacgtatgggccatgggagtaactctgtactgcttcgtcttcggccaatgccccttcatggatgagcggattatgtgcttgcactctaagattaaatcacaagccctggagttccccgaccagccggatatcgccgaggatctcaaggatttgataacccggatgttagataagaacccagagtccaggatcgtcgtgccagagataaagttacacccatgggtgacaaggcatggcgctgagcccctgccctctgaggacgagaattgcaccctagtagaggtaacagaagaagaggtcgagaatagcgtaaaacatattccatccctagcgactgtgattctagtgaaaacgatgattcggaagcggagctttggcaaccctttcgaagggtcccgccgagaggaacgtagcctttccgctcctggcaacctgctgactaaacaggggtccgaagacaacctccaaggtactgatcctccaccagttggcgaggaggaggtgctgctgtag

SEQ ID NO: 249105 - DNA, 1626 bp, Artificial Sequence
  derived and/or modified sequence
atgtcctcttgcgtttcctcccagccatcgtcaaatcgtgcagcccctcaggatgagctaggcggacgcggatcctctagctctgagagtcagaagccgtgtgaagctttacgaggacttagttccctgagcatccacctgggaatggaatcttttatcgtggtaaccgagtgtgaaccaggctgcgctgtggatctcggactggcaagagatagaccgctcgaagccgacgggcaagaagtgcccctggacactagcggttctcaagccagacctcaccttagtggcaggaaactgagcctccaggaacgcagtcaggggggtcttgccgctggcggatccttggacatgaatggacggtgcatttgtccgagcctcccgtattcgcctgtgtctagcccccagagcagtcctcgtctcccccgaagacccacagtggaatctcaccatgtctccatcaccgggatgcaagattgtgtgcagctgaaccagtatacgcttaaggatgaaatcggcaaggggagctatggggtagtgaaactggcctataatgaaaacgataatacttactacgctatgaaagtactctccaaaaagaagctgatcagacaggccggatttccacgtagaccccctccgaggggcactagaccagctcccggaggatgcatccagcctaggggacctatcgagcaggtataccaggaaatcgctatcctcaagaaactggaccatcccaatgtcgtgaagctggtggaggtgcttgatgatcctaatgaagatcatttatacatggtcttcgaactagtcaaccagggaccagtcatggaagttccaacactgaaacccttgtcagaggatcaggcaagattctattttcaggacctgattaagggcattgagtacctccattatcaaaagattatccatcgtgacatcaaaccctctaacttactcgtcggcgaggacggccacattaagatcgccgatttcggggtaagcaatgaatttaaggggagcgatgctcttctgtcaaatacggtgggcacccccgcattcatggccccagagtccctttccgagactagaaagatttttagtggcaaggcactggatgtgtgggccatgggtgtaaccctgtattgtttcgtatttggccagtgtccctttatggatgagagaataatgtgcctgcactctaagattaaaagccaggccctggaattccccgaccagccagatattgcagaggacctaaaagacctcattacccggatgctggacaagaaccccgagagtaggattgttgttccggagatcaaactacatccatgggtgacacggcacggcgctgaaccccttcccagtgaagacgaaaactgcaccctcgtagaggtgacagaagaggaagtggagaactccgtgaagcacatcccctcactagcaactgtgatcctagtcaagaccatgatcagaaaacggtcatttggtaacccatttgagggctctaggcgcgaggagagatctctatcggctcctgggaatctactcaccaagcaggggagcgaggataacctgcagggaaccgatcctccccctgtgggggaggaggaagtcctcctgtag

SEQ ID NO: 249106 - protein, 617 aa, Artificial Sequence
  derived and/or modified sequence
MFRTAVMMAASLALTGAVVAHAYYLKHQFYPTVVYLTKSSPSMAVLYIQAFVLVFLLGKVMGKVFFGQLRAAEMEHLLERSWYAVTETCLAFTVFRDDFSPRFVALFTLLLFLKCFHWLAEDRVDFMERSPNISWLFHCRIVSLMFLLGILDFLFVSHAYHSILTRGASVQLVFGFEYAILMTMVLTIFIKYVLHSVDLQSENPWDNKAVYMLYTELFTGFIKVLLYMAFMTIMIKVHTFPLFAIRPMYLAMRQFKKAVTDAIMSRRAIRNMNTLYPDATPEELQAMDNVCIICREEMVTGAKRLPCNHIFHTSCLRSWFQRQQTCPTCRMDVLRASLPAQSPPPPEPADQGPPPAPHPPPLLPQPPNFPQGLLPPFPPGMFPLWPPMGPFPPVPPPPSSGEAVAPPSTSAAALSRPSGAATTTAAGTSATAASATASGPGSGSAPEAGPAPGFPFPPPWMGMPLPPPFAFPPMPVPPAGFAGLTPEELRALEGHERQHLEARLQSLRNIHTLLDAAMLQINQYLTVLASLGPPRPATSVNSTEETATTVVAAASSTSIPSSEATTPTPGASPPAPEMERPPAPESVGTEEMPEDGEPDAAELRRRRLQKLESPVAH

SEQ ID NO: 249107 - protein, 629 aa, Artificial Sequence
  derived and/or modified sequence
MFRTAVMMAASLALTGAVVAHAYYLKHQFYPTVVYLTKSSPSMAVLYIQAFVLVFLLGKVMGKVFFGQLRAAEMEHLLERSWYAVTETCLAFTVFRDDFSPRFVALFTLLLFLKCFHWLAEDRVDFMERSPNISWLFHCRIVSLMFLLGILDFLFVSHAYHSILTRGASVQLVFGFEYAILMTMVLTIFIKYVLHSVDLQSENPWDNKAVYMLYTELFTGFIKVLLYMAFMTIMIKVHTFPLFAIRPMYLAMRQFKKAVTDAIMSRRAIRNMNTLYPDATPEELQAMDNVCIICREEMVTGAKRLPCNHIFHTSCLRSWFQRQQTCPTCRMDVLRASLPAQSPPPPEPADQGPPPAPHPPPLLPQPPNFPQGLLPPFPPGMFPLWPPMGPFPPVPPPPSSGEAVAPPSTSAAALSRPSGAATTTAAGTSATAASATASGPGSGSAPEAGPAPGFPFPPPWMGMPLPPPFAFPPMPVPPAGFAGLTPEELRALEGHERQHLEARLQSLRNIHTLLDAAMLQINQYLTVLASLGPPGLPLQSTPLRRLPLQLLLLPPPPASLAQRPRPQPQEPPHQPLKWKGLQLLSQWAQRRCLRMESPMQQSSAGAACRSWSLLLPTDTAPAQPQPLLF

SEQ ID NO: 249108 - protein, 645 aa, Artificial Sequence
  derived and/or modified sequence
MSLKMDNRDVAGKANRWFGVAPPKSGKMNMNILHQEELIAQKKREIEAKMEQKAKQNQVASPQPPHPGEITNAHNSSCISNKFANDGSFLQQFLKLQKAQTSTDAPTSAPSAPPSTPTPSAGKRSLLISRRTGLGLASLPGPVKSYSHAKQLPVAHRPSVFQSPDEDEEEDYEQWLEIKVSPPEGAETRKVIEKLARFVAEGGPELEKVAMEDYKDNPAFAFLHDKNSREFLYYRKKVAEIRKEAQKSQAASQKVSPPEDEEVKNLAEKLARFIADGGPEVETIALQNNRENQAFSFLYEPNSQGYKYYRQKLEEFRKAKASSTGSFTAPDPGLKRKSPPEALSGSLPPATTCPASSTPAPTIIPAPAAPGKPASAATVKRKRKSRWGPEEDKVELPPAELVQRDVDASPSPLSVQDLKGLGYEKGKPVGLVGVTELSDAQKKQLKEQQEMQQMYDMIMQHKRAMQDMQLLWEKAVQQHQHGYDSDEEVDSELGTWEHQLRRMEMDKTREWAEQLTKMGRGKHFIGDFLPPDELEKFMETFKALKEGREPDYSEYKEFKLTVENIGYQMLMKMGWKEGEGLGSEGQGIKNPVNKGTTTVDGAGFGIDRPAELSKEDDEYEAFRKRMMLAYRFRPNPLNNPRRPYY

SEQ ID NO: 249109 - protein, 222 aa, Artificial Sequence
  derived and/or modified sequence
MSLKMDNRDVAGKANRWFGVAPPKSGKMNMNILHQEELIAQKKREIEAKMEQKAKQNQVASPQPPHPGEITNAHNSSCISNKFANDGSFLQQFLKLQKAQTSTDAPTSAPSAPPSTPTPSAGKRSLLISRRTGLGLASLPGPVKSYSHAKQLPVAHRPSVFQSPDEDEEEDYEQWLEIKVCLTKTVRPTPPSSWCFVPGLGTPDSLLHLTLFSPHPLCRCGP

SEQ ID NO: 249110 - protein, 185 aa, Artificial Sequence
  derived and/or modified sequence
MSLKMDNRDVAGKANRWFGVAPPKSGKMNMNILHQEELIAQKKREIEAKMEQKAKQNQVASPQPPHPGEITNAHNSSCISNKFANDGSFLQQFLKLQKAQTSTDAPTSAPSAPPSTPTPSAGKRSLLISRRTGLGLASLPGPVKSYSHAKQLPVAHRPSVFQSPDEDEEEDYEQWLEIKGRRWLR

SEQ ID NO: 249111 - DNA, 1938 bp, Artificial Sequence
  derived and/or modified sequence
atgagtttgaaaatggacaacagagacgtggctgggaaggccaatcgatggttcggcgtggcgccccccaaatcaggcaaaatgaatatgaatatcctgcatcaagaagagctcatagcacaaaagaagcgcgagatagaagcaaaaatggaacagaaagcgaaacagaaccaggtggcttctcctcaaccgccccacccaggcgagataaccaacgcacataacagttcttgcatcagcaataagttcgccaacgacggttccttcctgcaacagttcttaaagctgcagaaggcccagactagtaccgatgccccaacatcggccccaagtgcaccgccatctacccctacgccctccgcaggcaagaggtccctactgatttcaaggcgcacggggcttggcctggcttctctccccgggccagttaagagttattcacacgctaagcagcttcccgtcgctcatcgccccagtgtttttcagtctcctgacgaggacgaggaggaggattacgaacagtggctggagataaaggtcagtccacccgaaggcgctgaaacccgaaaagttatagaaaaattggcacgatttgtggctgaagggggaccagaactcgaaaaagtcgcaatggaggactataaagacaatccagctttcgcgttcctgcatgataagaatagccgagaattcctgtactaccggaagaaagtggccgaaatccgtaaagaggctcagaaaagccaggccgcgagccagaaggtgtcccctccagaagatgaagaggtgaagaacctggcagagaaattggctcgattcattgcagacggaggccccgaagtggagactatcgcacttcagaataatagagagaaccaggccttctcctttctatatgaacctaactcccagggttacaagtattaccggcagaaactcgaagaatttagaaaggccaaagctagttcgactggcagctttactgccccagatccgggactaaagaggaaatcgcctcccgaggcgttatccggcagcttacccccggccaccacctgccccgcgtccagcaccccggctccaacaatcatccccgctccagcagcccctggtaaacctgctagcgctgctacagttaaacgaaagaggaagtccaggtggggtcccgaggaggacaaggtggagttaccacccgctgaactggtgcagcgggatgtggatgccagcccatccccgctgagcgtgcaagatctgaagggtttggggtatgaaaaggggaagcctgtggggctggtgggggtgactgagctcagtgatgcccagaaaaagcagctcaaggagcaacaagagatgcaacagatgtacgatatgatcatgcagcataagcgcgcaatgcaagatatgcagttactgtgggaaaaagccgtgcagcagcaccagcatggctatgacagcgacgaggaggtggatagcgaactggggacctgggaacatcaattgcgacgcatggagatggacaaaaccagggaatgggcagagcagctcacaaagatgggaaggggaaaacacttcataggagattttttgccccccgacgagctcgagaagttcatggaaacatttaaagcccttaaggagggtagggagcctgattattcagaatataaggagttcaagctcacggtcgagaacatcgggtaccagatgctcatgaagatgggctggaaagagggagagggcctagggtcagaaggacaggggattaagaatccagtaaacaaggggaccaccacagtggacggagctggattcgggatcgaccgacctgcggagttatcgaaggaggatgatgaatacgaggcgtttcgcaaacgaatgatgcttgcctacaggttccgccctaatcctctcaataacccccgcaggccttattactag

SEQ ID NO: 249112 - DNA, 669 bp, Artificial Sequence
  derived and/or modified sequence
atgtcactgaagatggataaccgagacgttgcagggaaggcaaaccgctggtttggtgtcgctccaccaaagtccggaaaaatgaacatgaacatcctgcatcaggaagaacttatagcacagaaaaaaagagaaattgaagccaaaatggaacaaaaggccaaacagaaccaggtcgcttcccctcagcccccccaccctggtgagattactaacgcccacaatagctcctgtatctcaaataagtttgcaaatgacggttcatttctgcagcaattcctcaaactccagaaggcccagacctctacagatgcccctacaagcgccccttcagcccccccctctactcctaccccatctgctggtaaacggtctcttctgatctcgcggcgcactgggctcgggctggccagcctgcctggccctgtcaaaagctacagtcatgccaagcagcttccagtagctcaccgccctagcgtatttcaatcacccgacgaggacgaggaggaagattatgaacagtggcttgaaattaaggtctgcctgacaaagacagtcagaccgacccccccctcatcttggtgcttcgttcctggactggggactcctgatagtctgctgcacttaacacttttcagcccccacccactctgcagatgtggaccttag

SEQ ID NO: 249113 - DNA, 558 bp, Artificial Sequence
  derived and/or modified sequence
atgtcactcaaaatggacaatcgcgacgttgctggcaaggccaacaggtggtttggcgtagcacctccaaaatccggaaagatgaacatgaatatccttcaccaggaggagctgatagcccagaagaagcgggagattgaagccaaaatggaacaaaaagcgaagcagaatcaggttgcttccccccagccaccccatcccggagagatcactaacgcacacaattccagctgtatttccaataagttcgccaacgacgggtctttcctccagcagtttttgaagctgcagaaagctcaaacctccactgacgctcctacatcggccccttcagccccgccttccaccccgacaccttctgctggaaagcgttccctgctgatttcccgacgtaccggcttggggctggcaagtctccctggacccgtcaaaagctacagccatgccaagcagcttccagtggcgcacagaccctcagtgtttcagtcccctgacgaggatgaggaagaggattacgagcagtggctggaaatcaagggacgccggtggctgcgatag

SEQ ID NO: 249114 - DNA, 1938 bp, Artificial Sequence
  derived and/or modified sequence
atgagcctgaagatggacaacagagatgtggccggcaaggccaaccgctggtttggagtggccccacccaagagcggcaagatgaacatgaacatcctgcaccaggaggagctgattgcccagaagaagcgggagattgaggccaagatggagcagaaggccaagcagaaccaggtggccagcccccagcccccccaccctggagagatcaccaatgcccacaacagcagctgcatcagcaacaagtttgccaatgatggcagcttcctgcagcagttcctgaagctgcagaaggcccagaccagcacagatgcccccaccagcgcccccagcgccccacccagcacccccacccccagcgctgggaagaggagcctgctgatcagcagaagaacaggcctgggcctggccagcctgcccggccctgtgaagagctacagccacgccaagcagctgcctgtggcccaccggcccagcgtcttccagagcccagatgaagatgaggaggaggactatgagcagtggctggagatcaaggtgagccccccagagggcgctgagaccaggaaggtgattgagaagctggccaggtttgtggccgagggcggccctgagctggagaaggtggccatggaggactacaaggacaacccagcctttgccttcctgcatgacaagaacagccgggagttcctgtactacaggaagaaggtggccgagatcaggaaggaggcccagaagagccaggccgccagccagaaggtgtccccaccagaagatgaggaggtgaagaacctggccgagaagctggcccgcttcatcgcagatggcggccctgaggtggagaccatcgccctgcagaacaaccgggagaaccaggccttctccttcctgtatgagcccaacagccagggctacaagtactaccggcagaagctggaggagttcaggaaggccaaggccagcagcacaggcagcttcaccgccccagaccccggcctgaagaggaagagccccccagaggccctgagcggcagcctgcccccagccaccacctgcccagccagcagcaccccagcccccaccatcatcccagccccagctgcccctgggaagccagccagcgctgccaccgtgaagaggaagaggaagagccgctggggccctgaggaggacaaggtggagctgcccccagctgagctggtgcagagagatgtggatgccagccccagccccctgtctgtgcaggacctgaagggcctgggctatgagaagggcaagcctgtgggcctggtgggcgtgacagagctgagtgatgcccagaagaagcagctgaaggagcagcaggagatgcagcagatgtatgacatgatcatgcagcacaagagggccatgcaggacatgcagctgctgtgggagaaggctgtgcagcagcaccagcacggctatgacagtgatgaggaggtggacagcgagctgggcacctgggagcaccagctgcggaggatggagatggacaagacccgggagtgggccgagcagctgaccaagatgggccggggcaagcacttcatcggggacttcctgcccccagatgagctggagaagttcatggagaccttcaaggccctgaaggagggccgggagccagactacagcgagtacaaggagttcaagctgactgtggagaacatcggctaccagatgctgatgaagatgggctggaaggagggggagggcctgggcagcgagggccagggcatcaagaaccctgtgaacaagggcaccaccaccgtggatggagctggcttcggcatcgacaggcctgctgagctgagcaaagaagatgatgaatatgaggccttcaggaagaggatgatgctggcctaccgcttccggcccaaccccctgaacaacccccggcggccctactactag

SEQ ID NO: 249115 - DNA, 669 bp, Artificial Sequence
  derived and/or modified sequence
atgagcctgaagatggacaacagagatgtggccggcaaggccaaccgctggtttggagtggccccacccaagagcggcaagatgaacatgaacatcctgcaccaggaggagctgattgcccagaagaagcgggagattgaggccaagatggagcagaaggccaagcagaaccaggtggccagcccccagcccccccaccctggagagatcaccaatgcccacaacagcagctgcatcagcaacaagtttgccaatgatggcagcttcctgcagcagttcctgaagctgcagaaggcccagaccagcacagatgcccccaccagcgcccccagcgccccacccagcacccccacccccagcgctgggaagaggagcctgctgatcagcagaagaacaggcctgggcctggccagcctgcccggccctgtgaagagctacagccacgccaagcagctgcctgtggcccaccggcccagcgtcttccagagcccagatgaagatgaggaggaggactatgagcagtggctggagatcaaggtgtgcctgaccaagacagtgcggcccaccccacccagctcctggtgctttgtgcccggcctgggcaccccagacagcctgctgcacctgaccctcttcagcccccaccccctgtgccgctgtggcccctag

SEQ ID NO: 249116 - DNA, 558 bp, Artificial Sequence
  derived and/or modified sequence
atgagcctgaagatggacaacagagatgtggccggcaaggccaaccgctggtttggagtggccccacccaagagcggcaagatgaacatgaacatcctgcaccaggaggagctgattgcccagaagaagcgggagattgaggccaagatggagcagaaggccaagcagaaccaggtggccagcccccagcccccccaccctggagagatcaccaatgcccacaacagcagctgcatcagcaacaagtttgccaatgatggcagcttcctgcagcagttcctgaagctgcagaaggcccagaccagcacagatgcccccaccagcgcccccagcgccccacccagcacccccacccccagcgctgggaagaggagcctgctgatcagcagaagaacaggcctgggcctggccagcctgcccggccctgtgaagagctacagccacgccaagcagctgcctgtggcccaccggcccagcgtcttccagagcccagatgaagatgaggaggaggactatgagcagtggctggagatcaagggccgccgctggctgaggtag

SEQ ID NO: 249117 - DNA, 1938 bp, Artificial Sequence
  derived and/or modified sequence
atgagcctgaagatggacaaccgggacgtggccggcaaggccaacaggtggttcggtgttgctcctcctaagagcggcaagatgaatatgaacatcctgcatcaggaagaattgattgcacagaaaaagagagagatcgaggcaaaaatggagcaaaaggctaaacaaaaccaggtggcttctccccagccaccccaccccggcgaaatcaccaacgcacacaacagtagttgtattagcaacaagttcgccaacgatggatcatttctccagcagtttctgaagttgcaaaaagcccagacctctactgatgcgcccacttcggccccctcagctcccccgtccacaccaaccccttctgctggcaagaggtctctgctcatctctcgaaggaccggtttaggcctggccagtctccctgggccggtcaaatcttattcccacgcaaagcaactgccagtggcccaccgcccttctgtcttccagtcacctgatgaggatgaggaagaggattatgagcagtggctagagatcaaagtctccccaccagaaggtgccgaaacccgaaaggttatagagaaacttgcgagatttgttgccgaaggagggcctgagttggaaaaggtcgcaatggaggattacaaagataacccagcctttgccttcctgcatgataagaattctagggagttcctgtattatcggaaaaaggtggcagaaattaggaaagaggctcagaagagtcaagccgcctcccaaaaggtatcccctcccgaagacgaggaggtgaagaacttagcagagaaactggcgaggttcatcgctgacggagggcctgaggtggagaccattgcactccagaataacagagagaatcaagcattcagcttcttatacgaacctaactctcagggctataagtactaccgtcaaaagcttgaggaatttcgcaaggccaaagccagttctactggttcatttaccgctccagaccccgggctcaagcgcaagtcacctccggaagcactgagcggatccctgccaccagcaaccacatgccccgccagctctacacctgctccaactattatacccgcacccgctgcccccgggaagccggcaagtgcggcaaccgtaaagaggaagcgcaaatccagatgggggcccgaggaggataaggtcgagttaccgcctgccgaactggtgcagagggacgtggacgcttccccctcacccctatccgtccaggatctgaagggactgggatatgaaaaaggcaagcccgttggcctcgtgggagtcacagaactgtccgatgcgcaaaagaagcagctgaaagagcagcaagaaatgcagcagatgtatgatatgatcatgcagcataagcgggcaatgcaggacatgcagctcctgtgggagaaagcagtccagcaacatcagcatggctacgactctgatgaagaagtggactccgaactcggaacatgggagcatcagctgcgtcgcatggagatggacaagaccagggagtgggctgaacaactgaccaaaatgggacgtggcaagcattttattggtgatttcctgcctcccgacgaactagagaaatttatggagacattcaaggcactcaaagaagggcgggagcctgactacagcgagtataaagagttcaagttgactgtggagaatattggttaccagatgctgatgaagatgggctggaaggaaggcgaagggttgggaagcgagggccaaggtataaaaaaccccgttaacaagggtaccacgacagtagacggagcagggttcggaattgaccggcctgcagagctgtccaaagaggacgatgaatatgaggcctttaggaagaggatgatgctagcataccgttttaggcctaatccgctcaataacccgaggcgcccctattactag

SEQ ID NO: 249118 - DNA, 669 bp, Artificial Sequence
  derived and/or modified sequence
atgagcctgaagatggacaaccgggacgtggccggcaaggccaacagatggttcggcgtggccccccccaagtccggcaaaatgaacatgaatattctccaccaggaagagcttatagcccagaagaaaagagaaatcgaggcaaaaatggaacaaaaagcaaagcagaatcaagttgctagcccacaacctccacacccgggggaaattactaacgcacacaacagctcttgtattagcaataaattcgccaacgacggtagcttcctccaacaattcctcaagctgcagaaagctcaaacctcgaccgatgccccaacttccgcaccgtccgccccgcccagtactccaaccccttcagctgggaagagaagcctgcttatctccagacgtacagggttaggcttggcctccctccctggccccgtgaagtcttactctcacgctaagcagttgccagtggcgcaccggccatccgtgtttcaaagtcctgacgaggacgaggaggaggattacgagcagtggctggaaattaaggtttgtcttaccaaaactgtcagacccacaccacccagttcctggtgctttgttcctgggctcggcacacctgattcccttctccatcttaccctgttctctccacaccctttgtgcagatgcggcccgtag

SEQ ID NO: 249119 - DNA, 558 bp, Artificial Sequence
  derived and/or modified sequence
atgagcctgaagatggacaaccgggacgtggccggcaaggccaacaggtggttcggagtagccccccctaagtccgggaagatgaacatgaatatcctgcaccaggaggaactgatagcccaaaagaaacgagaaattgaggcaaagatggagcagaaggctaagcagaatcaggtggcttccccacaaccgccccatcccggcgaaattaccaatgcgcacaactcaagttgcatctcaaataagttcgctaatgatggaagcttccttcagcaatttctgaagctacagaaggcacaaacttccaccgacgctcccaccagtgcaccttctgcgcctccctctaccccgacccctagtgccgggaagaggagcttgctgatctcccggcgaacgggcctaggcctggcatctctgcctggccctgtaaaatcgtacagccatgctaagcagctcccggtcgcacatcgtccatctgtgtttcagtcacccgatgaggatgaggaagaagactacgaacaatggctggagatcaagggacggaggtggttacgctag

SEQ ID NO: 249120 - DNA, 2085 bp, Artificial Sequence
  derived and/or modified sequence
attgtgggattggatgagtctcaagatggacaaccgggatgttgcaggaaaggctaaccggtggtttggggttgctccccctaaatctggaaaaatgaacatgaacatccttcaccaggaagagctcatcgctcagaagaaacgggaaattgaagccaaaatggaacagaaagccaagcagaatcaggtggccagccctcagcccccacatcctggcgaaatcacaaatgcacacaactcttcctgcatttccaacaagtttgccaacgatggtagcttcttgcagcagtttctgaagttgcagaaggcacagaccagcacagacgccccgaccagtgcgcccagcgcccctcccagcacacccacccccagcgctgggaagaggtccctgctcatcagcaggcggacaggcctggggctggccagcctgccgggccctgtgaagagctactcccacgccaagcagctgcccgtggcgcaccgcccgagtgtcttccagtcccctgacgaggacgaggaggaggactatgagcagtggctggagatcaaagtttcacccccagagggagccgagactcggaaagtgatagagaaattggcccgctttgtggcagaaggaggccccgagttagaaaaagtagctatggaggactacaaggataacccagcatttgcatttttgcacgataagaatagcagggaattcctctactacaggaagaaggtggctgagataagaaaggaagcacagaagtcgcaggcagcctctcagaaagtttcacccccagaggacgaagaggtcaagaaccttgcagaaaagttggccaggttcatagcggacgggggtcccgaggtggaaaccattgccctccagaacaaccgtgagaaccaggcattcagctttctgtatgagcccaatagccaagggtacaagtactaccgacagaagctggaggagttccggaaagccaaggccagctccacaggcagcttcacagcacctgatcccggcctgaagcgcaagtcccctcctgaggccctgtcagggtccttacccccagccaccacctgccccgcctcgtccacgcctgcgcccactatcatccctgctccagctgcccccgggaagccagcctccgcagccaccgtgaagaggaagcggaagagccggtgggggcctgaagaggataaggtagagctcccacctgctgaactggtgcagagggacgtggatgcctctccctcgcctctgtcagttcaggacctcaaggggctcggctatgagaaggggaagcctgtgggtctagtgggcgtcacagagctttcagacgcccagaagaagcagctgaaggagcagcaggagatgcagcagatgtacgacatgatcatgcagcacaagcgggccatgcaggacatgcagctgctgtgggagaaggcagtccaacagcaccagcacggctatgacagtgatgaggaggtggacagcgagctgggcacctgggagcaccagctgcggcgcatggagatggataagaccagggaatgggccgagcagctgacaaagatgggccggggcaagcacttcatcggagacttcctgcctccagacgagctggaaaagtttatggagaccttcaaggccctgaaggagggccgtgagcctgactactcagagtacaaggagttcaagctgactgtggagaacatcggctaccagatgctgatgaagatgggctggaaggagggcgaggggctgggctcagagggccagggcatcaagaacccagtgaacaagggcaccaccacagtggacggcgctggcttcggcattgaccggccggcggagctctccaaggaggacgacgagtatgaggcgttccgcaagaggatgatgctggcctaccgcttccggcccaaccccctgaacaatcccagacggccttactactgagtgttctggaaatacatactttctgaatgaccaaccgtccctggactgtggaatgttccggcctgcatttctgcccaccccttccgttgtcacgagtgccgtgccgtgtaataaagtcccagtgctcatccacc

SEQ ID NO: 249121 - DNA, 682 bp, Artificial Sequence
  derived and/or modified sequence
attgtgggattggatgagtctcaagatggacaaccgggatgttgcaggaaaggctaaccggtggtttggggttgctccccctaaatctggaaaaatgaacatgaacatccttcaccaggaagagctcatcgctcagaagaaacgggaaattgaagccaaaatggaacagaaagccaagcagaatcaggtggccagccctcagcccccacatcctggcgaaatcacaaatgcacacaactcttcctgcatttccaacaagtttgccaacgatggtagcttcttgcagcagtttctgaagttgcagaaggcacagaccagcacagacgccccgaccagtgcgcccagcgcccctcccagcacacccacccccagcgctgggaagaggtccctgctcatcagcaggcggacaggcctggggctggccagcctgccgggccctgtgaagagctactcccacgccaagcagctgcccgtggcgcaccgcccgagtgtcttccagtcccctgacgaggacgaggaggaggactatgagcagtggctggagatcaaagtgtgtctcaccaagacagtgagaccgactcccccctcgtcatggtgttttgtgcctggactcgggacgcccgacagcctcctgcatctcacactcttctccccccaccccctctgtcgttgtggtccatag

SEQ ID NO: 249122 - DNA, 1094 bp, Artificial Sequence
  derived and/or modified sequence
attgtgggattggatgagtctcaagatggacaaccgggatgttgcaggaaaggctaaccggtggtttggggttgctccccctaaatctggaaaaatgaacatgaacatccttcaccaggaagagctcatcgctcagaagaaacgggaaattgaagccaaaatggaacagaaagccaagcagaatcaggtggccagccctcagcccccacatcctggcgaaatcacaaatgcacacaactcttcctgcatttccaacaagtttgccaacgatggtagcttcttgcagcagtttctgaagttgcagaaggcacagaccagcacagacgccccgaccagtgcgcccagcgcccctcccagcacacccacccccagcgctgggaagaggtccctgctcatcagcaggcggacaggcctggggctggccagcctgccgggccctgtgaagagctactcccacgccaagcagctgcccgtggcgcaccgcccgagtgtcttccagtcccctgacgaggacgaggaggaggactatgagcagtggctggagatcaaaggaagaaggtggctgagataagaaaggaagcacagaagtcgcaggcagcctctcagaaagtttcacccccagaggacgaagaggtcaagaaccttgcagaaaagttggccaggttcatagcggacgggggtcccgaggtggaaaccattgccctccagaacaaccgtgagaaccaggcattcaggtgcctcatggagaaagtctctagcacttgcccagttgcctttgggacacacagcagcccttggccgggggcaagtcaggctctcaagtggaaattcacagtactgttcagtttatgttgtgtacgttctcagggtctcccctttatgatgagggaaatggcagggaatggggaactttaggatctgtggagggggaacacccagcctgtgtgcgagttccacagaagggtgggtgtgtgacaagcagcctagcctccctgccatccccggccatgcggtcgtaccctagccccagtggctgggtctgtgttcactggctcatccattcattgggtgggtttggcacttgctctgtgccc

SEQ ID NO: 249123 - DNA, 1938 bp, Artificial Sequence
  derived and/or modified sequence
atgtctctcaaaatggataaccgggacgtagctggaaaagctaatcgctggtttggcgtggcccctcctaagtccgggaagatgaatatgaatatcctccatcaggaggaactaatcgcccagaaaaagagagaaatcgaggccaagatggagcagaaggctaagcagaaccaggtagcctccccacaacctccccacccaggggagatcaccaacgcgcataatagctcctgtatcagtaataagttcgccaacgatgggtctttcctccagcagtttctaaaacttcaaaaggctcagacctccactgacgctcctacaagtgctccatccgcacccccatcaactcccactccatccgctggtaaaaggtctctgcttattagccgaaggacagggcttggcctggcgtcactccccggtccagtgaaatcttattcacacgccaaacaactaccagttgcccatcgtccgagtgtctttcaatccccagatgaggatgaagaggaggactacgaacaatggctggagatcaaggtatccccgcctgaaggagcagagactagaaaagttatcgaaaagctggctcgctttgtcgccgaggggggacccgagctcgagaaagttgccatggaggattacaaggacaacccagccttcgccttcctccatgacaagaattccagggaatttctgtactataggaagaaagtggcggaaatcaggaaggaggcccagaagtctcaagcggcatcccagaaggtatcacctcccgaggacgaagaagtcaaaaatctggctgaaaagcttgctcgttttatcgccgacggtggacccgaggtagagacaattgccttacaaaacaatagggagaatcaggcgtttagcttcctgtatgaaccaaactcacagggatacaagtactaccgtcagaagcttgaggaattcaggaaggccaaggccagttcgactggaagctttaccgcaccagaccccggactaaaacggaagtctcctccagaggcactttctgggtctcttcccccagcaaccacatgccctgcctcgtccacaccggcaccaaccattattcctgccccagccgcaccagggaaaccagcctccgccgctactgtcaaaagaaagaggaagtctcggtggggaccggaggaagataaggtggagttaccacccgctgaactcgtacaaagggatgtggacgctagtccgtcacccctgtcagtgcaggatttgaaggggctggggtacgaaaaaggcaagcccgtcgggctggtgggcgtcactgaattgagtgatgcacagaaaaagcagctgaaagagcaacaggaaatgcagcaaatgtacgatatgattatgcagcacaaacgggctatgcaagacatgcagctgctctgggagaaggcagtgcaacagcatcaacatgggtatgactctgacgaggaagtggactccgagctggggacttgggagcatcagctgcgacgtatggagatggacaaaacgagggagtgggccgagcagcttacaaaaatgggcagaggaaagcatttcattggggactttctccccccagatgaactagaaaagttcatggagacatttaaggcactgaaggaaggtcgtgagcctgactactccgaatacaaggaatttaagttaacagtagagaacattggttatcagatgctcatgaaaatgggctggaaagagggtgagggcctgggaagtgagggccagggcatcaagaatccagttaataaaggcaccacaacggtggacggggcaggctttggtatcgatcgccctgccgaactctcaaaagaagacgacgaatacgaggcatttcgcaaaaggatgatgctggcctaccgcttccgcccaaacccccttaataaccctcgccgaccatactattag

SEQ ID NO: 249124 - DNA, 669 bp, Artificial Sequence
  derived and/or modified sequence
atgtcactgaagatggacaacagggatgttgccggtaaagcgaatcgctggtttggagttgcgccacccaagtcaggaaaaatgaatatgaatatccttcaccaggaggaactcatcgcccagaaaaagcgcgaaatagaagcaaagatggaacaaaaagcaaagcagaatcaggtcgccagccctcagccccctcatccgggagagattacgaacgctcacaactccagctgtatcagtaacaagtttgccaatgatgggtcgtttctccaacagttcctcaaacttcagaaggcgcaaacatccactgacgcgcctacctctgcgccaagcgccccaccttcaactcctacccctagtgccggaaagagaagcctactgatttcgaggcggaccggcctcggccttgcaagcctacccggtccagtgaaatcgtactcacacgcaaaacagttgccggtcgcacatcgtccttccgtttttcagagccctgacgaggatgaggaggaagactatgaacagtggttggaaatcaaagtctgcctcaccaagaccgttaggcctactccaccaagctcttggtgtttcgtccctggattgggcacgcctgactccctgctacacctgacgcttttctctcctcatccgctatgccgatgtgggccttag

SEQ ID NO: 249125 - DNA, 558 bp, Artificial Sequence
  derived and/or modified sequence
atgagtctgaagatggataacagggacgttgccggaaaggccaaccggtggtttggcgtagcccctcctaagtcagggaagatgaacatgaatatcttacaccaggaagaactcatcgctcagaagaaaagagaaattgaagcgaagatggagcagaaagctaaacaaaaccaagtggcaagcccccaacctccccaccctggcgaaatcacaaacgcacataattcaagttgtataagcaacaagttcgcaaatgacgggtcctttttacaacagtttcttaagctgcagaaagcccagacatccactgatgcgcctactagtgccccatccgccccaccaagtactccaacaccttctgccggaaaacgcagtctcctgattagcagaagaacaggactgggactcgcctctctcccaggaccggtgaagagctacagccatgctaagcagctgcctgtggcccaccgtcctagcgtctttcagtctccagacgaggacgaagaggaggattatgagcagtggctggaaatcaaaggcagacgatggctgaggtag

SEQ ID NO: 249126 - DNA, 1938 bp, Artificial Sequence
  derived and/or modified sequence
atgagcctgaagatggacaacagagacgtggccggcaaggccaacagatggttcggcgtggccccccccaagagcggcaagatgaacatgaacatcctgcaccaggaggagctgatcgcccagaagaagagagagatcgaggccaagatggagcagaaggccaagcagaaccaggtggccagcccccagcccccccaccccggcgagatcaccaacgcccacaacagcagctgcatcagcaacaagttcgccaacgacggcagcttcctgcagcagttcctgaagctgcagaaggcccagaccagcaccgacgcccccaccagcgcccccagcgccccccccagcacccccacccccagcgccggcaagagaagcctgctgatcagcagaagaaccggcctgggcctggccagcctgcccggccccgtgaagagctacagccacgccaagcagctgcccgtggcccacagacccagcgtgttccagagccccgacgaggacgaggaggaggactacgagcagtggctggagatcaaggtgagcccccccgagggcgccgagaccagaaaggtgatcgagaagctggccagattcgtggccgagggcggccccgagctggagaaggtggccatggaggactacaaggacaaccccgccttcgccttcctgcacgacaagaacagcagagagttcctgtactacagaaagaaggtggccgagatcagaaaggaggcccagaagagccaggccgccagccagaaggtgagcccccccgaggacgaggaggtgaagaacctggccgagaagctggccagattcatcgccgacggcggccccgaggtggagaccatcgccctgcagaacaacagagagaaccaggccttcagcttcctgtacgagcccaacagccagggctacaagtactacagacagaagctggaggagttcagaaaggccaaggccagcagcaccggcagcttcaccgcccccgaccccggcctgaagagaaagagcccccccgaggccctgagcggcagcctgccccccgccaccacctgccccgccagcagcacccccgcccccaccatcatccccgcccccgccgcccccggcaagcccgccagcgccgccaccgtgaagagaaagagaaagagcagatggggccccgaggaggacaaggtggagctgccccccgccgagctggtgcagagagacgtggacgccagccccagccccctgagcgtgcaggacctgaagggcctgggctacgagaagggcaagcccgtgggcctggtgggcgtgaccgagctgagcgacgcccagaagaagcagctgaaggagcagcaggagatgcagcagatgtacgacatgatcatgcagcacaagagagccatgcaggacatgcagctgctgtgggagaaggccgtgcagcagcaccagcacggctacgacagcgacgaggaggtggacagcgagctgggcacctgggagcaccagctgagaagaatggagatggacaagaccagagagtgggccgagcagctgaccaagatgggcagaggcaagcacttcatcggcgacttcctgccccccgacgagctggagaagttcatggagaccttcaaggccctgaaggagggcagagagcccgactacagcgagtacaaggagttcaagctgaccgtggagaacatcggctaccagatgctgatgaagatgggctggaaggagggcgagggcctgggcagcgagggccagggcatcaagaaccccgtgaacaagggcaccaccaccgtggacggcgccggcttcggcatcgacagacccgccgagctgagcaaggaggacgacgagtacgaggccttcagaaagagaatgatgctggcctacagattcagacccaaccccctgaacaaccccagaagaccctactactag

SEQ ID NO: 249127 - DNA, 669 bp, Artificial Sequence
  derived and/or modified sequence
atgagcctgaagatggacaacagagacgtggccggcaaggccaacagatggttcggcgtggccccccccaagagcggcaagatgaacatgaacatcctgcaccaggaggagctgatcgcccagaagaagagagagatcgaggccaagatggagcagaaggccaagcagaaccaggtggccagcccccagcccccccaccccggcgagatcaccaacgcccacaacagcagctgcatcagcaacaagttcgccaacgacggcagcttcctgcagcagttcctgaagctgcagaaggcccagaccagcaccgacgcccccaccagcgcccccagcgccccccccagcacccccacccccagcgccggcaagagaagcctgctgatcagcagaagaaccggcctgggcctggccagcctgcccggccccgtgaagagctacagccacgccaagcagctgcccgtggcccacagacccagcgtgttccagagccccgacgaggacgaggaggaggactacgagcagtggctggagatcaaggtgtgcctgaccaagaccgtgagacccaccccccccagcagctggtgcttcgtgcccggcctgggcacccccgacagcctgctgcacctgaccctgttcagcccccaccccctgtgcagatgcggcccctag

SEQ ID NO: 249128 - DNA, 558 bp, Artificial Sequence
  derived and/or modified sequence
atgagcctgaagatggacaacagagacgtggccggcaaggccaacagatggttcggcgtggccccccccaagagcggcaagatgaacatgaacatcctgcaccaggaggagctgatcgcccagaagaagagagagatcgaggccaagatggagcagaaggccaagcagaaccaggtggccagcccccagcccccccaccccggcgagatcaccaacgcccacaacagcagctgcatcagcaacaagttcgccaacgacggcagcttcctgcagcagttcctgaagctgcagaaggcccagaccagcaccgacgcccccaccagcgcccccagcgccccccccagcacccccacccccagcgccggcaagagaagcctgctgatcagcagaagaaccggcctgggcctggccagcctgcccggccccgtgaagagctacagccacgccaagcagctgcccgtggcccacagacccagcgtgttccagagccccgacgaggacgaggaggaggactacgagcagtggctggagatcaagggcagaagatggctgagatag

SEQ ID NO: 249129 - protein, 1642 aa, Artificial Sequence
  derived and/or modified sequence
MSTAIREVGVWRQTRTLLLKNYLIKCRTKKSSVQEILFPLFFLFWLILISMMHPNKKYEEVPNIELNPMDKFTLSNLILGYTPVTNITSSIMQKVSTDHLPDVIITEEYTNEKEMLTSSLSKPSNFVGVVFKDSMSYELRFFPDMIPVSSIYMDSRAGCSKSCEAAQYWSSGFTVLQASIDAAIIQLKTNVSLWKELESTKAVIMGETAVVEIDTFPRGVILIYLVIAFSPFGYFLAIHIVAEKEKKIKEFLKIMGLHDTAFWLSWVLLYTSLIFLMSLLMAVIATASLLFPQSSSIVIFLLFFLYGLSSVFFALMLTPLFKKSKHVGIVEFFVTVAFGFIGLMIILIESFPKSLVWLFSPFCHCTFVIGIAQVMHLEDFNEGASFSNLTAGPYPLIITIIMLTLNSIFYVLLAVYLDQVIPGEFGLRRSSLYFLKPSYWSKSKRNYEELSEGNVNGNISFSEIIEPVSSEFVGKEAIRISGIQKTYRKKGENVEALRNLSFDIYEGQITALLGHSGTGKSTLMNILCGLCPPSDGFASIYGHRVSEIDEMFEARKMIGICPQLDIHFDVLTVEENLSILASIKGIPANNIIQEVQKVLLDLDMQTIKDNQAKKLSGGQKRKLSLGIAVLGNPKILLLDEPTAGMDPCSRHIVWNLLKYRKANRVTVFSTHFMDEADILADRKAVISQGMLKCVGSSMFLKSKWGIGYRLSMYIDKYCATESLSSLVKQHIPGATLLQQNDQQLVYSLPFKDMDKFSGLFSALDSHSNLGVISYGVSMTTLEDVFLKLEVEAEIDQADYSVFTQQPLEEEMDSKSFDEMEQSLLILSETKAALVSTMSLWKQQMYTIAKFHFFTLKRESKSVRSVLLLLLIFFTVQIFMFLVHHSFKNAVVPIKLVPDLYFLKPGDKPHKYKTSLLLQNSADSDISDLISFFTSQNIMVTMINDSDYVSVAPHSAALNVMHSEKDYVFAAVFNSTMVYSLPILVNIISNYYLYHLNVTETIQIWSTPFFQEITDIVFKIELYFQAALLGIIVTAMPPYFAMENAENHKIKAYTQLKLSGLLPSAYWIGQAVVDIPLFFIILILMLGSLLAFHYGLYFYTVKFLAVVFCLIGYVPSVILFTYIASFTFKKILNTKEFWSFIYSVAALACIAITEITFFMGYTIATILHYAFCIIIPIYPLLGCLISFIKISWKNVRKNVDTYNPWDRLSVAVISPYLQCVLWIFLLQYYEKKYGGRSIRKDPFFRNLSTKSKNRKLPEPPDNEDEDEDVKAERLKVKELMGCQCCEEKPSIMVSNLHKEYDDKKDFLLSRKVKKVATKYISFCVKKGEILGLLGPNGAGKSTIINILVGDIEPTSGQVFLGDYSSETSEDDDSLKCMGYCPQINPLWPDTTLQEHFEIYGAVKGMSASDMKEVISRITHALDLKEHLQKTVKKLPAGIKRKLCFALSMLGNPQITLLDEPSTGMDPKAKQHMWRAIRTAFKNRKRAAILTTHYMEEAEAVCDRVAIMVSGQLRCIGTVQHLKSKFGKGYFLEIKLKDWIENLEVDRLQREIQYIFPNASRQESFSSILAYKIPKEDVQSLSQSFFKLEEAKHAFAIEEYSFSQATLEQVFVELTKEQEEEDNSCGTLNSTLWWERTQEDRVVF

SEQ ID NO: 249130 - protein, 1643 aa, Artificial Sequence
  derived and/or modified sequence
MSTAIREVGVWRQTRTLLLKNYLIKCRTKKSSVQEILFPLFFLFWLILISMMHPNKKYEEVPNIELNPMDKFTLSNLILGYTPVTNITSSIMQKVSTDHLPDVIITEEYTNEKEMLTSSLSKPSNFVGVVFKDSMSYELRFFPDMIPVSSIYMDSRAGCSKSCEAAQYWSSGFTVLQASIDAAIIQLKTNVSLWKELESTKAVIMGETAVVEIDTFPRGVILIYLVIAFSPFGYFLAIHIVAEKEKKIKEFLKIMGLHDTAFWLSWVLLYTSLIFLMSLLMAVIATASLLFPQSSSIVIFLLFFLYGLSSVFFALMLTPLFKKSKHVGIVEFFVTVAFGFIGLMIILIESFPKSLVWLFSPFCHCTFVIGIAQVMHLEDFNEGASFSNLTAGPYPLIITIIMLTLNSIFYVLLAVYLDQVIPGEFGLRRSSLYFLKPSYWSKSKRNYEELSEGNVNGNISFSEIIEPVSSEFVGKEAIRISGIQKTYRKKGENVEALRNLSFDIYEGQITALLGHSGTGKSTLMNILCGLCPPSDGFASIYGHRVSEIDEMFEARKMIGICPQLDIHFDVLTVEENLSILASIKGIPANNIIQEVQKVLLDLDMQTIKDNQAKKLSGGQKRKLSLGIAVLGNPKILLLDEPTAGMDPCSRHIVWNLLKYRKANRVTVFSTHFMDEADILADRKAVISQGMLKCVGSSMFLKSKWGIGYRLSMYIDKYCATESLSSLVKQHIPGATLLQQNDQQLVYSLPFKDMDKFSGLFSALDSHSNLGVISYGVSMTTLEDVFLKLEVEAEIDQADYSVFTQQPLEEEMDSKSFDEMEQSLLILSETKAALVSTMSLWKQQMYTIAKFHFFTLKRESKSVRSVLLLLLIFFTVQIFMFLVHHSFKNAVVPIKLVPDLYFLKPGDKPHKYKTSLLLQNSAADSDISDLISFFTSQNIMVTMINDSDYVSVAPHSAALNVMHSEKDYVFAAVFNSTMVYSLPILVNIISNYYLYHLNVTETIQIWSTPFFQEITDIVFKIELYFQAALLGIIVTAMPPYFAMENAENHKIKAYTQLKLSGLLPSAYWIGQAVVDIPLFFIILILMLGSLLAFHYGLYFYTVKFLAVVFCLIGYVPSVILFTYIASFTFKKILNTKEFWSFIYSVAALACIAITEITFFMGYTIATILHYAFCIIIPIYPLLGCLISFIKISWKNVRKNVDTYNPWDRLSVAVISPYLQCVLWIFLLQYYEKKYGGRSIRKDPFFRNLSTKSKNRKLPEPPDNEDEDEDVKAERLKVKELMGCQCCEEKPSIMVSNLHKEYDDKKDFLLSRKVKKVATKYISFCVKKGEILGLLGPNGAGKSTIINILVGDIEPTSGQVFLGDYSSETSEDDDSLKCMGYCPQINPLWPDTTLQEHFEIYGAVKGMSASDMKEVISRITHALDLKEHLQKTVKKLPAGIKRKLCFALSMLGNPQITLLDEPSTGMDPKAKQHMWRAIRTAFKNRKRAAILTTHYMEEAEAVCDRVAIMVSGQLRCIGTVQHLKSKFGKGYFLEIKLKDWIENLEVDRLQREIQYIFPNASRQESFSSILAYKIPKEDVQSLSQSFFKLEEAKHAFAIEEYSFSQATLEQVFVELTKEQEEEDNSCGTLNSTLWWERTQEDRVVF

SEQ ID NO: 249131 - DNA, 4929 bp, Artificial Sequence
  derived and/or modified sequence
atgtctacagccattagggaagtgggggtctggagacagacccggaccctactgctcaagaactatctgataaaatgcaggaccaaaaagtcgtctgtccaggaaattttgtttcctctcttctttcttttttggctgatattgatttccatgatgcacccaaacaagaagtatgaagaagtgcccaacatcgagctgaatccaatggacaaatttacgttgtccaacctgatactgggatataccccagtgaccaatatcacctcttccataatgcagaaagtctcaaccgaccacttaccggacgtgattataacagaagaatacaccaacgagaaagagatgctgacctccagcttgtccaagccttccaatttcgtcggtgtggtctttaaggactcaatgtcatacgaacttaggttttttcccgacatgattcccgtgtcatcaatctacatggattctagggcgggctgttctaagtcttgcgaggccgcacagtactggagctccgggttcactgtgttacaagccagcatcgacgcagctataatacaactcaaaacaaatgtcagcttgtggaaagaactggagtccacaaaagcggtgataatgggagagacagccgttgttgaaatagacactttccccagaggcgtgatcctgatttatctggtcatagctttctctccattcggttatttccttgccatccacattgtagcggaaaaggagaagaaaatcaaagagtttctcaagatcatgggcttacacgacacggcattctggctgagttgggtgctcctgtacaccagcctgatcttcctaatgtccttactaatggctgttatagctaccgcttcgctgctgtttccacaaagttcatcgatcgtgattttcttgttatttttcctatacgggctgtcgtccgtgttttttgccctgatgctgactcccctgttcaaaaaaagcaaacatgtgggcatcgtggagttttttgtaacagtggcattcggcttcattggcctgatgatcattctcatcgaatcctttccaaagtcgctggtctggttatttagccctttttgtcactgcacatttgtgattggcatcgctcaggtcatgcatctggaggactttaatgagggagcaagtttttctaatctaactgccggcccataccctttgatcatcaccattattatgctgactctgaacagtatcttctatgttctgctggctgtgtatcttgaccaggtcattccaggtgagttcgggcttcggaggtcatcattgtactttcttaagccctcttactggagtaagtctaaacgtaactatgaagagctaagtgaaggtaatgttaatggaaacatttctttttccgaaattatagaacccgtttcctcagaatttgtcgggaaggaggctattcgcatatctggcatccagaagacttacaggaagaaaggtgaaaacgtggaggcattgcggaatctctccttcgatatctacgaagggcagatcactgcactactgggacatagtggcaccggcaaatcaacattgatgaatatcttgtgtggcttgtgtccaccctcggatgggtttgcatcaatatacggtcatcgagtctcggagatcgacgagatgttcgaggcccggaaaatgataggtatatgtccacagctcgatatccatttcgatgtgctgacagttgaggagaatctcagtattctggctagtataaagggcatccccgcgaataacatcattcaggaggtccagaaagtgctgcttgacctagatatgcagactattaaggataaccaggccaaaaaactttctggaggtcagaaacgcaagcttagtctcggcatagcggtgttggggaacccaaagatcctccttctagacgaacctacagctgggatggatccttgttcgaggcacatcgtgtggaatttgctcaaatatcgcaaagctaaccgtgtgaccgtgtttagtacacacttcatggatgaggccgacattctggctgaccggaaagccgtgattagccagggcatgctgaaatgcgtgggaagtagcatgttcctgaagtccaaatggggcatcggttacaggctttccatgtacattgacaagtactgtgctacggagagtctgtcatctctggtcaagcagcacatccccggggccaccctgctgcagcagaacgatcagcagttagtgtactccctccccttcaaggatatggataaattttcaggactgttctcggcccttgactcacattcaaatcttggtgtgatttcatatggcgtgagtatgactacactcgaggatgttttcctcaaactggaggtggaggccgaaatcgatcaggccgactactcagtatttactcaacagccacttgaggaggagatggattccaaatccttcgatgagatggagcagagtcttttaatactgagcgaaactaaggcagctctggtgagcaccatgtctctgtggaagcagcagatgtacactatcgccaagttccacttcttcactctgaagagggaatccaagtctgtgcgatccgtgttgctgttgctgctgattttctttactgtgcaaatatttatgtttcttgtccatcactcatttaaaaacgctgtggtcccaattaagctggtgcccgacctttatttccttaagccaggcgataaaccccacaagtataaaactagcctgctgctgcagaattccgcggattccgatataagtgacttgatatccttttttacatctcagaatatcatggttaccatgattaacgacagcgattatgtttcggtcgcaccccactcggcggcgctgaacgtgatgcactctgagaaggattacgtttttgcagcagtctttaacagcacgatggtctactcccttccaatcttagttaatattatctcaaactattacctctatcacctcaatgttaccgaaaccatacaaatatggtctaccccgttcttccaggaaataaccgacattgttttcaagatcgagctatactttcaggcagccttactggggattattgtgaccgctatgccgccctatttcgctatggagaatgctgaaaaccataaaataaaggcctatacgcagctgaaactgagcgggctcctaccctccgcctactggatcggccaggccgtggtcgatattcctctcttcttcatcatcctgatactaatgctgggcagcctgcttgcctttcactatggtctctacttctatacggtgaagtttcttgccgtggtcttctgcctgatcggatatgtccctagcgttatcctctttacgtacatcgccagtttcacgttcaaaaaaatcctgaataccaaagagttttggagttttatctatagtgtagccgctctggcctgcattgcaataaccgagatcactttttttatgggctacaccattgccactattctgcactacgctttctgtatcatcattcccatatatcccctgcttggatgtttaattagcttcatcaagatttcctggaaaaacgtccgaaaaaatgtggatacctataacccctgggaccgtctctcagttgctgtgatatcgccttacctgcagtgtgtgctgtggatcttcttactccagtactatgagaaaaagtatggggggaggagcattcgcaaggatcccttcttcagaaatctgtccaccaagtcaaagaataggaagctccccgaaccccccgataatgaggatgaggacgaagatgtcaaagcagagaggttgaaagtcaaggaactcatggggtgtcagtgttgtgaagagaagccctccatcatggtctctaatcttcacaaggagtatgacgacaaaaaggacttcctgttgagtcggaaagtgaagaaggtggccaccaagtacattagcttttgtgttaaaaaaggtgaaatcctgggtctactgggacccaacggcgccgggaagagtactataataaatattctggtcggcgatattgagcccacctccgggcaagtcttcttgggagattactcatctgagacatccgaagacgacgacagccttaaatgcatgggctactgtccccaaatcaatcctttatggccggataccactctgcaggaacattttgaaatttacggcgccgtgaaaggcatgtccgcatctgatatgaaagaggttatttctagaataacccatgccctcgatttaaaagagcacctacaaaaaaccgtgaagaagttgcctgcaggcattaagagaaagctgtgcttcgcgctgtctatgctggggaatcctcagattacccttctggacgagccgtctactgggatggatcccaaagcaaaacagcatatgtggagggccatccgaactgctttcaaaaaccgcaagagagccgcaatactcaccactcactatatggaagaggctgaagctgtgtgtgaccgggtcgccataatggtgagcggccagctgaggtgtatcggtacagtacagcatctcaagtctaaattcggaaagggctattttctggagattaagctaaaggattggattgaaaatctggaggtggataggcttcaacgggagatccagtacatattccctaacgcaagtcggcaggaatccttctccagcatcttggcatacaagattcccaaggaagatgtgcagtctctatctcagtcgttctttaaactcgaagaggccaagcatgctttcgctatcgaggaatactcattctcccaggctaccctggaacaggttttcgtcgagctgacaaaagagcaggaggaggaggataacagttgcgggaccctgaatagtaccctgtggtgggagaggacacaagaagaccgcgtcgtattctag

SEQ ID NO: 249132 - DNA, 4932 bp, Artificial Sequence
  derived and/or modified sequence
atgtctaccgccattcgggaagttggagtttggagacaaacgcgaactctgttgctgaaaaattacttgattaagtgcagaacaaagaagtcttccgttcaggagattctgttcccattatttttcttgttttggctcatcttgatctccatgatgcatcccaacaaaaaatacgaggaggtgcccaatattgaactgaatccaatggacaagtttaccttgtctaatctgatacttgggtacacgcccgttactaatatcaccagcagcatcatgcaaaaagtgagcactgatcacttgcccgacgtgatcattacggaggagtatacaaatgagaaagaaatgctcacatcaagcctgagtaaacctagcaattttgtgggagtggtgtttaaggacagtatgagctacgagttgcgattttttcccgacatgattcctgtgtcatctatctacatggactctagagcaggatgttctaaaagttgcgaagctgcccagtactggagttccgggttcaccgtgctgcaggcgtcgatcgatgctgccatcattcaattgaaaactaacgtatctctttggaaagaactggagagtactaaggcagtgattatgggtgagacagctgtcgtggagatcgatacttttccacgaggtgtaattctgatttacctcgtgattgcctttagccccttcggatacttcctggctatacatatcgtggcggagaaggaaaaaaaaatcaaagagttcctcaaaatcatgggactgcacgacactgcattttggttgtcctgggtcctgctgtatacaagtctgatttttctcatgagtctcctcatggccgtcatagcaacagccagcctgctcttcccccaaagttcctcaatcgtgatcttcttgctgttctttttgtacggtttaagtagcgtgttcttcgctctgatgctcacaccgctattcaaaaagagcaagcacgttggcatcgttgaattcttcgtaaccgttgcttttggctttatcggactgatgattatcctgatcgaatcgtttcctaagtccttggtgtggttgttttcaccattttgccactgtacatttgtcatcggcatcgcccaggttatgcacctggaagacttcaatgagggcgctagtttctcaaatctgaccgcagggccgtaccccctgatcatcactattatcatgctgacgctgaattctattttctacgttcttttagctgtgtacttggatcaggtcatacccggcgagttcggccttagaagatcaagtctctacttcctcaaaccctcttactggtccaagtctaaacggaactacgaggagcttagcgaggggaatgtaaacggcaacatcagtttttcagaaattatagaacccgtttctagtgagtttgtcgggaaagaggctatccggattagtggcatacagaaaacttaccggaaaaagggagagaacgtggaggccttaagaaacttatcattcgacatctatgaggggcagattactgcgctcttggggcactctggcaccggtaagagcaccttaatgaatatactgtgtggactctgccctcctagcgacggctttgcaagcatctatggtcaccgagtgtctgagatcgatgaaatgttcgaagcccggaaaatgatcggcatatgcccacaactggatatccacttcgacgtgctgaccgtggaagaaaatctatcaattcttgcctctatcaaaggcatccccgcaaataacatcattcaggaagttcagaaggtgctgctggatctggatatgcagaccataaaagataaccaagccaagaaattgagcggcggacagaagaggaagctatctctgggtattgccgtgctcggtaaccctaaaatcctgctgctggacgagcctaccgctgggatggacccttgttctaggcatatcgtgtggaatctgctgaaatacagaaaggcaaaccgggtgaccgtcttcagcacacacttcatggacgaggctgacatccttgcggaccgcaaggctgtgatatcccaagggatgcttaaatgcgtcggcagcagcatgtttctcaagagcaaatggggtattggctatcggttatcaatgtacatcgacaagtattgcgccacagagtctctgagcagtctggtgaagcagcacatccctggggctaccctcctacagcagaatgaccaacagttggtctattctttgcccttcaaggatatggacaaattttcgggtctattctcagctctggacagccactcaaaccttggcgtaatatcctatggggtgagtatgaccactctcgaagacgtatttctgaaactggaggttgaagccgaaatcgatcaggccgattactccgtgtttacacagcagcctcttgaggaggaaatggactcaaagtcatttgacgaaatggaacagtcattactcattctctctgagaccaaagcagccctcgttagcactatgtcattgtggaagcaacagatgtacacaatagcgaagttccattttttcacgctcaaaagagagtcaaaatctgtccgcagtgtgctgctgctgctgctgatattcttcaccgtgcagatctttatgtttctggttcatcactcctttaaaaacgccgtcgtgcctattaagctagtgccagacctgtactttctgaagccgggtgataaaccccacaaatacaagacatcactgctgctgcagaattctgccgccgacagcgatattagcgacctgatcagcttctttacatcgcagaatattatggtaacaatgatcaacgattccgattacgtgagtgtggctcctcacagcgcggcgttgaacgtcatgcatagcgagaaagactacgttttcgcagcggttttcaacagcacaatggtgtactccctgcccattctcgtgaatattattagcaattattacctatatcacctgaacgtcacagagaccattcaaatctggagcactcccttttttcaagaaattacagacattgtgtttaagatagaactttacttccaggccgccctgttaggtataatagttacagccatgcccccctatttcgctatggagaatgcagagaaccataagattaaagcttatacccaactgaagctctcgggcctcctgcccagcgcttactggattggtcaggccgtggtcgacatccccctcttctttatcattctgattctaatgttaggcagtcttttggccttccactacgggctgtacttctacacggtgaaattcctagccgtggtgttttgcctgatcggctatgtgccatcagtcatcctgtttacgtatatcgcgtctttcactttcaagaagatcttgaacaccaaagagttctggtctttcatatattccgtcgccgcattggcctgcatcgctatcacggagatcacattctttatgggctatactatcgcaaccatcttacattacgccttttgtattatcataccaatctaccctctgctgggctgtttgatctcattcatcaagatcagttggaagaacgtaaggaaaaatgtagatacatacaacccttgggatcggctcagcgtagctgtcatttccccatatctacagtgtgtcctgtggatttttctcctacaatattatgaaaaaaagtacggaggaagatctattaggaaagaccccttcttccgcaacctgtccacaaagagcaagaatcgcaaactgcccgagccgcctgataatgaagatgaggatgaagatgtaaaagcagagcgactcaaagtgaaggaactcatgggctgtcagtgttgtgaagagaagccttcaatcatggtgtctaatctgcataaagaatacgacgacaagaaagactttctcctgagccgcaaagtcaagaaggtagctaccaaatatatcagtttctgtgttaaaaaaggagaaattctgggtttgcttggtccaaatggggctggcaaatccacaatcattaatatcctggttggcgatatagagccaacctcagggcaagtctttctgggcgactactcctccgagacgagcgaggatgacgattctcttaagtgcatgggatattgtccccagatcaacccgttgtggcctgatactaccctccaagagcacttcgagatttacggggcagtcaaaggcatgtccgcctcagacatgaaggaggtgatctcaagaattacccacgcattggaccttaaggaacatctccaaaagacagtcaagaagctgccagcagggatcaagcggaagctctgctttgccttatctatgctaggaaatccacagatcaccctactggatgagccgtccactgggatggatccgaaggctaagcagcatatgtggcgcgccatccggaccgctttcaagaacagaaagcgggcggctatcctgactactcactacatggaagaggcggaagccgtttgtgaccgcgtggccattatggtgtccgggcaattacgttgtataggaacagtccaacatctgaagtccaaatttgggaaaggctattttctggaaatcaaactgaaagactggatcgagaatctggaggtcgacaggctgcaaagggagatccaatacatctttcctaacgcatctagacaggaaagcttttcttccattctagcatacaaaattccgaaagaggatgttcagtctctgtctcaaagctttttcaagttggaggaggcgaagcacgcgttcgctattgaggagtacagtttttcccaggccacccttgaacaggtgtttgtagagctgacgaaggagcaggaggaggaagataactcatgcggcacgctgaactcaaccctgtggtgggaaaggacccaggaggaccgagttgtcttttag

SEQ ID NO: 249133 - DNA, 4929 bp, Artificial Sequence
  derived and/or modified sequence
atgagcacagccatccgggaggtgggcgtgtggaggcagaccaggaccctgctgctgaagaactacctgatcaagtgcaggaccaagaagagctctgtgcaggagatcctcttccccctcttcttcctgttctggctgatcctgatctccatgatgcaccccaacaagaagtatgaggaggtgcccaacatcgagctgaaccccatggacaagttcaccctgagcaacctgatcctgggctacacccctgtgaccaacatcaccagcagcatcatgcagaaggtgtccacagaccacctgcctgatgtgatcatcacagaggagtacaccaatgagaaggagatgctgaccagcagcctgagcaagcccagcaactttgtgggcgtggtgttcaaggacagcatgtcctatgagctgcgcttcttcccagacatgatccctgtgagcagcatctacatggacagcagagctggctgcagcaagagctgtgaggccgcccagtactggagcagcggcttcaccgtgctgcaggccagcattgatgctgccatcatccagctgaagaccaacgtgtccctgtggaaggagctggagagcaccaaggccgtcatcatgggagaaacagctgtggtggagattgacaccttcccccggggcgtcatcctgatctacctggtgattgccttcagccccttcggctacttcctggccatccacatcgtggccgagaaggagaagaagatcaaggagttcctgaagatcatgggcctgcatgacacagccttctggctgtcctgggtgctgctgtacaccagcctcatcttcctgatgagcctgctgatggccgtcatcgccacagccagcctgctcttcccccagagcagcagcatcgtcatcttcctgctcttcttcctgtatggcctgagcagcgtcttctttgccctgatgctgacccccctcttcaagaagagcaagcacgtgggcatcgtggagttctttgtgacagtggccttcggcttcatcggcctgatgatcatcctgattgagagcttccccaagagcctggtgtggctgttcagccccttctgccactgcacctttgtgattggaattgcccaggtgatgcacctggaggacttcaatgaaggagccagcttcagcaacctgacagctggcccctaccccctcatcatcaccatcatcatgctgaccctgaacagcatcttctacgtgctgctggccgtgtacctggaccaggtgattcctggagaatttggcctgcggcgcagcagcctgtacttcctgaagcccagctactggagcaagagcaagagaaattatgaggagctgtctgagggcaatgtgaatggaaacatctccttcagcgagatcatcgagcctgtgagcagcgagtttgtgggcaaggaggccatccgcatcagcggcatccagaagacctacaggaagaagggggagaatgtggaggccctgaggaacctgagctttgacatctatgagggccagatcacagccctgctgggccacagcggcaccgggaagagcaccctgatgaacatcctgtgtggcctgtgccccccatctgatggctttgccagcatctacggccaccgggtgtctgaaattgatgagatgtttgaggccaggaagatgattggcatctgcccccagctggacatccactttgatgtgctgactgtggaggagaacctgagcatcctggccagcatcaagggcatcccagccaacaacatcatccaggaggtgcagaaggtgctgctggacctggacatgcagaccatcaaggacaaccaggccaagaagctgagcggcggccagaagaggaagctgagcctgggcattgctgtgctgggcaaccccaagatcctgctgctggatgagcccacagctggcatggacccctgcagccgccacatcgtgtggaacctgctgaagtacaggaaggccaacagagtgaccgtcttcagcacccacttcatggatgaggccgacatcctggccgacaggaaggccgtcatcagccagggcatgctgaagtgtgtgggcagctccatgttcctgaagagcaagtggggcatcggctaccgcctgtccatgtacatcgacaagtactgtgccacagagagcctgagcagcctggtgaagcagcacatccctggggccaccctgctgcagcagaatgaccagcagctggtgtacagcctgcccttcaaggacatggacaagttcagcggcctcttcagcgccctggacagccacagcaacctgggcgtcatctcctatggagtgtccatgaccaccctggaggatgtgttcctgaagctggaggtggaggccgagattgaccaggccgactacagcgtcttcacccagcagcccctggaggaggagatggacagcaagagctttgatgagatggagcagagcctgctgatcctgtctgagaccaaggccgccctggtgtccaccatgagcctgtggaagcagcagatgtacaccatcgccaagttccacttcttcaccctgaagcgggagagcaagtctgtgcgctctgtgctgctgctgctgctgatcttcttcaccgtgcagatcttcatgttcctggtgcaccacagcttcaagaatgctgtggtgcccatcaagctggtgcctgacctgtacttcctgaagccaggggacaagccccacaagtacaagaccagcctgctgctgcagaacagcgctgacagcgacatcagtgacctgatctccttcttcaccagccagaacatcatggtgaccatgatcaatgacagcgactatgtgtctgtggccccccacagcgctgccctgaatgtgatgcacagcgagaaggactatgtgtttgctgctgtgttcaacagcaccatggtgtacagcctgcccatcctggtgaacatcatcagcaactactacctgtaccacctgaatgtgacagagaccatccagatctggagcacccccttcttccaggagatcacagacatcgtgttcaagattgagctgtacttccaggccgccctgctgggcatcatcgtgacagccatgccaccctactttgccatggagaatgctgagaaccacaagatcaaggcctacacccagctgaagctgagcggcctgctgcccagcgcctactggattggccaggccgtggtggacatccccctcttcttcatcatcctgatcctgatgctgggcagcctgctggccttccactacggcctgtacttctacacagtgaagttcctggccgtggtgttctgcctgattggctacgtgcccagcgtcatcctcttcacctacatcgccagcttcaccttcaagaagatcctgaacaccaaggagttctggagcttcatctacagcgtggccgccctggcctgcatcgccatcacagagatcaccttcttcatgggctacaccatcgccaccatcctgcactacgccttctgcatcatcatccccatctaccccctgctgggctgcctgatctccttcatcaagatctcctggaagaatgtgaggaagaatgtggacacctacaacccctgggaccggctgtctgtggccgtcatcagcccctacctgcagtgtgtgctgtggatcttcctgctgcagtactatgagaagaagtatggaggccgcagcatcaggaaggaccccttcttcaggaacctgagcaccaagagcaagaacaggaagctgcctgagcccccagacaatgaagatgaagatgaagatgtgaaggccgagcggctgaaggtgaaggagctgatgggctgccagtgctgtgaggagaagcccagcatcatggtgagcaacctgcacaaggagtatgatgacaagaaggacttcctgctgagcaggaaggtgaagaaggtggccaccaagtacatctccttctgtgtgaagaagggggagatcctgggcctgctgggccccaatggagctgggaagagcaccatcatcaacatcctggtgggggacatcgagcccaccagcggccaggtgttcctgggggactacagcagcgagaccagtgaagatgatgacagcctgaagtgcatgggctactgcccccagatcaaccccctgtggccagacaccaccctgcaggagcactttgagatctacggggctgtgaagggcatgtctgccagtgacatgaaggaggtgatcagccgcatcacccacgccctggacctgaaggagcacctgcagaagacagtgaagaagctgcctgctggcatcaagaggaagctgtgctttgccctgtccatgctgggcaacccccagatcaccctgctggatgagcccagcacaggcatggaccccaaggccaagcagcacatgtggagggccatcagaacagccttcaagaacaggaagagagctgccatcctgaccacccactacatggaggaggccgaggccgtgtgtgacagagtggccatcatggtgtctggccagctgcgctgcatcggcaccgtgcagcacctgaagagcaagtttgggaagggctacttcctggagatcaagctgaaggactggattgagaacctggaggtggaccggctgcagcgggagatccagtacatcttccccaatgccagccggcaggagagcttcagcagcatcctggcctacaagatccccaaggaggatgtgcagagcctgagccagagcttcttcaagctggaggaggccaagcacgcctttgccatcgaggagtacagcttcagccaggccaccctggagcaggtgtttgtggagctgaccaaggagcaggaggaggaggacaacagctgtggcaccctgaacagcaccctgtggtgggagaggacccaggaggacagagtggtgttctag

SEQ ID NO: 249134 - DNA, 4932 bp, Artificial Sequence
  derived and/or modified sequence
atgagcacagccatccgggaggtgggcgtgtggaggcagaccaggaccctgctgctgaagaactacctgatcaagtgcaggaccaagaagagctctgtgcaggagatcctcttccccctcttcttcctgttctggctgatcctgatctccatgatgcaccccaacaagaagtatgaggaggtgcccaacatcgagctgaaccccatggacaagttcaccctgagcaacctgatcctgggctacacccctgtgaccaacatcaccagcagcatcatgcagaaggtgtccacagaccacctgcctgatgtgatcatcacagaggagtacaccaatgagaaggagatgctgaccagcagcctgagcaagcccagcaactttgtgggcgtggtgttcaaggacagcatgtcctatgagctgcgcttcttcccagacatgatccctgtgagcagcatctacatggacagcagagctggctgcagcaagagctgtgaggccgcccagtactggagcagcggcttcaccgtgctgcaggccagcattgatgctgccatcatccagctgaagaccaacgtgtccctgtggaaggagctggagagcaccaaggccgtcatcatgggagaaacagctgtggtggagattgacaccttcccccggggcgtcatcctgatctacctggtgattgccttcagccccttcggctacttcctggccatccacatcgtggccgagaaggagaagaagatcaaggagttcctgaagatcatgggcctgcatgacacagccttctggctgtcctgggtgctgctgtacaccagcctcatcttcctgatgagcctgctgatggccgtcatcgccacagccagcctgctcttcccccagagcagcagcatcgtcatcttcctgctcttcttcctgtatggcctgagcagcgtcttctttgccctgatgctgacccccctcttcaagaagagcaagcacgtgggcatcgtggagttctttgtgacagtggccttcggcttcatcggcctgatgatcatcctgattgagagcttccccaagagcctggtgtggctgttcagccccttctgccactgcacctttgtgattggaattgcccaggtgatgcacctggaggacttcaatgaaggagccagcttcagcaacctgacagctggcccctaccccctcatcatcaccatcatcatgctgaccctgaacagcatcttctacgtgctgctggccgtgtacctggaccaggtgattcctggagaatttggcctgcggcgcagcagcctgtacttcctgaagcccagctactggagcaagagcaagagaaattatgaggagctgtctgagggcaatgtgaatggaaacatctccttcagcgagatcatcgagcctgtgagcagcgagtttgtgggcaaggaggccatccgcatcagcggcatccagaagacctacaggaagaagggggagaatgtggaggccctgaggaacctgagctttgacatctatgagggccagatcacagccctgctgggccacagcggcaccgggaagagcaccctgatgaacatcctgtgtggcctgtgccccccatctgatggctttgccagcatctacggccaccgggtgtctgaaattgatgagatgtttgaggccaggaagatgattggcatctgcccccagctggacatccactttgatgtgctgactgtggaggagaacctgagcatcctggccagcatcaagggcatcccagccaacaacatcatccaggaggtgcagaaggtgctgctggacctggacatgcagaccatcaaggacaaccaggccaagaagctgagcggcggccagaagaggaagctgagcctgggcattgctgtgctgggcaaccccaagatcctgctgctggatgagcccacagctggcatggacccctgcagccgccacatcgtgtggaacctgctgaagtacaggaaggccaacagagtgaccgtcttcagcacccacttcatggatgaggccgacatcctggccgacaggaaggccgtcatcagccagggcatgctgaagtgtgtgggcagctccatgttcctgaagagcaagtggggcatcggctaccgcctgtccatgtacatcgacaagtactgtgccacagagagcctgagcagcctggtgaagcagcacatccctggggccaccctgctgcagcagaatgaccagcagctggtgtacagcctgcccttcaaggacatggacaagttcagcggcctcttcagcgccctggacagccacagcaacctgggcgtcatctcctatggagtgtccatgaccaccctggaggatgtgttcctgaagctggaggtggaggccgagattgaccaggccgactacagcgtcttcacccagcagcccctggaggaggagatggacagcaagagctttgatgagatggagcagagcctgctgatcctgtctgagaccaaggccgccctggtgtccaccatgagcctgtggaagcagcagatgtacaccatcgccaagttccacttcttcaccctgaagcgggagagcaagtctgtgcgctctgtgctgctgctgctgctgatcttcttcaccgtgcagatcttcatgttcctggtgcaccacagcttcaagaatgctgtggtgcccatcaagctggtgcctgacctgtacttcctgaagccaggggacaagccccacaagtacaagaccagcctgctgctgcagaacagcgctgctgacagcgacatcagtgacctgatctccttcttcaccagccagaacatcatggtgaccatgatcaatgacagcgactatgtgtctgtggccccccacagcgctgccctgaatgtgatgcacagcgagaaggactatgtgtttgctgctgtgttcaacagcaccatggtgtacagcctgcccatcctggtgaacatcatcagcaactactacctgtaccacctgaatgtgacagagaccatccagatctggagcacccccttcttccaggagatcacagacatcgtgttcaagattgagctgtacttccaggccgccctgctgggcatcatcgtgacagccatgccaccctactttgccatggagaatgctgagaaccacaagatcaaggcctacacccagctgaagctgagcggcctgctgcccagcgcctactggattggccaggccgtggtggacatccccctcttcttcatcatcctgatcctgatgctgggcagcctgctggccttccactacggcctgtacttctacacagtgaagttcctggccgtggtgttctgcctgattggctacgtgcccagcgtcatcctcttcacctacatcgccagcttcaccttcaagaagatcctgaacaccaaggagttctggagcttcatctacagcgtggccgccctggcctgcatcgccatcacagagatcaccttcttcatgggctacaccatcgccaccatcctgcactacgccttctgcatcatcatccccatctaccccctgctgggctgcctgatctccttcatcaagatctcctggaagaatgtgaggaagaatgtggacacctacaacccctgggaccggctgtctgtggccgtcatcagcccctacctgcagtgtgtgctgtggatcttcctgctgcagtactatgagaagaagtatggaggccgcagcatcaggaaggaccccttcttcaggaacctgagcaccaagagcaagaacaggaagctgcctgagcccccagacaatgaagatgaagatgaagatgtgaaggccgagcggctgaaggtgaaggagctgatgggctgccagtgctgtgaggagaagcccagcatcatggtgagcaacctgcacaaggagtatgatgacaagaaggacttcctgctgagcaggaaggtgaagaaggtggccaccaagtacatctccttctgtgtgaagaagggggagatcctgggcctgctgggccccaacggggccggcaagagcaccatcatcaacatcctggtgggggacatcgagcccaccagcggccaggtgttcctgggggactacagcagcgagaccagtgaagatgatgacagcctgaagtgcatgggctactgcccccagatcaaccccctgtggccagacaccaccctgcaggagcactttgagatctatggagctgtgaagggcatgtctgccagtgacatgaaggaggtgatcagccgcatcacccacgccctggacctgaaggagcacctgcagaagacagtgaagaagctgcctgctggcatcaagaggaagctgtgctttgccctgtccatgctgggcaacccccagatcaccctgctggatgagcccagcacaggcatggaccccaaggccaagcagcacatgtggagggccatcagaacagccttcaagaacaggaagagagctgccatcctgaccacccactacatggaggaggccgaggccgtgtgtgacagagtggccatcatggtgtctggccagctgcgctgcattggaacagtgcagcacctgaagagcaagtttgggaagggctacttcctggagatcaagctgaaggactggattgagaacctggaggtggaccggctgcagcgggagatccagtacatcttccccaatgccagccggcaggagagcttcagcagcatcctggcctacaagatccccaaggaggatgtgcagagcctgagccagagcttcttcaagctggaggaggccaagcacgcctttgccatcgaggagtacagcttcagccaggccaccctggagcaggtgtttgtggagctgaccaaggagcaggaggaggaggacaacagctgtggcaccctgaacagcaccctgtggtgggagaggacccaggaggacagagtggtgttctag

SEQ ID NO: 249135 - DNA, 4929 bp, Artificial Sequence
  derived and/or modified sequence
atgagcaccgccatccgggaggtgggcgtgtggcggcagacccggaccttactgctgaagaattatctgatcaaatgtcggacaaagaagagttccgtccaggaaattctctttcctctgttcttcttgttctggttgatcctgatatcaatgatgcatcctaataaaaagtacgaggaagtaccaaatatagaactcaatcccatggacaagttcacactctcaaatctcatcctcggctataccccagttactaatattacatcttctatcatgcagaaggtctctaccgaccacttgcctgacgtcatcatcacagaggagtacacaaatgagaaagagatgctcacaagctctctctctaaacccagcaacttcgtgggcgtagtgttcaaggatagcatgagctacgaactgcgtttcttcccggatatgattcctgtgtcatctatttatatggattctcgcgcaggatgttccaagtcatgcgaggctgctcagtactggagcagcggctttacagtgctgcaggcctctatcgatgcagccattatccagttgaaaacaaacgtcagcctttggaaggagctggaatcgacaaaagcggtgatcatgggagaaactgctgtggtggaaattgatacctttccacgaggcgtcattctgatataccttgttattgcttttagcccgtttggctatttcctggccatccatatcgtcgccgagaaagagaaaaagatcaaggagttcctcaaaatcatgggcctgcatgatacagccttttggctcagctgggttttgctctacacctcactgatcttcctgatgtctttgctaatggcagtcattgctactgcctctctgctttttccccagagcagctctattgtcatatttcttttattcttcctgtacgggctgtcgtcagtgtttttcgctctgatgctcacacctctcttcaaaaagagtaagcacgtgggcattgtggagttctttgtgactgttgccttcgggttcattggtctgatgattatcctgattgagtcctttccgaaatccttggtgtggctgttttcgcctttctgccactgcaccttcgttatcggcatagcccaggtgatgcacttagaggacttcaatgaaggtgctagtttctccaacctgactgccggaccttaccccttgataatcaccatcattatgcttaccctgaactccatattttacgtcttgctcgcagtctatcttgatcaagtcatacccggagaattcggactgcggagatcaagcctgtatttcctcaagcccagttattggtctaagtccaaacgaaattacgaggagctatccgaaggaaacgtcaatggcaatatcagtttctccgagatcatcgaaccagtgtcaagcgaatttgtgggcaaggaggcgatccggatctcgggaatccagaagacgtatcgtaaaaagggggagaatgtagaggcccttagaaacttgtctttcgatatctacgagggccagattaccgctcttctgggacatagcggtactggcaaatcaactctgatgaatatattatgcgggctttgcccaccttctgacggttttgcgtccatttacgggcatcgagtgtccgagatagacgaaatgttcgaagctcgcaaaatgatcggcatctgtccgcaactcgacatccactttgacgtgctcacagtcgaggaaaatcttagcatcctcgcctctatcaagggcataccagccaataatatcatacaggaagtgcagaaggttcttctggacctggacatgcagactattaaggataatcaagcaaagaaactgtctggcgggcagaaaagaaaactcagtctgggaattgccgtgcttggcaatcccaagatcctcctactggatgaaccaacagccgggatggacccgtgttcacggcacatcgtttggaacctgctgaaatatagaaaggctaaccgggtcaccgtattcagtacccacttcatggacgaggcagacatattggcagatcgcaaagccgtgatcagccaggggatgctgaaatgtgtggggtcatcaatgtttctgaagtcaaagtggggtattggttacaggttgtcaatgtatatcgacaagtattgcgcaacggaaagcctgtcaagcctggtgaaacagcatataccaggagctactctgcttcagcagaatgatcagcaactggtgtatagcctgccgtttaaggatatggacaagttttctggactcttttctgccttagatagtcattctaacttgggggttatcagctacggggttagcatgaccacattggaggacgtattccttaagctggaggtagaggccgaaatcgaccaggccgactactctgtgtttacacagcagcctctggaggaagaaatggatagtaaatcctttgatgagatggaacagtccctgttaatcctgtccgaaaccaaggctgccctagtgagcactatgagcctgtggaaacagcagatgtataccatcgctaagtttcatttttttacattaaaaagggagtctaaaagtgtgcgaagcgtgctcctgctgctcttgattttttttactgtgcagatatttatgttcttggtccaccacagcttcaaaaatgccgtcgtaccaattaaactggtgcctgatctatattttctgaaacctggagataagcctcacaaatacaagacctcacttcttttacagaactcggcagactccgacatcagcgatctcatcagtttctttacctctcagaatatcatggtcacaatgattaacgatagtgactacgtcagcgtggcacctcactcagccgccctgaacgtgatgcactctgaaaaagattatgttttcgcggccgtattcaattcgacaatggtgtatagcctgcctatcctcgtcaatatcatctccaactattatctataccatctaaatgtgaccgaaacaatccagatttggtctaccccgttctttcaggaaatcacagacatagtttttaagatcgaactttactttcaggctgctttgctggggattatcgttaccgcaatgcccccgtacttcgcaatggagaatgcggaaaatcataaaattaaggcttatactcaactgaaactgagtggcctactcccttcggcttactggataggacaggccgtggttgatatcccactgtttttcattatcctgattcttatgctgggctctctgctggcattccactatggattatacttctacacagtaaagttcctggccgtggtgttctgcctcataggctatgttccctctgtgatcctctttacttatatcgccagcttcacttttaagaaaattttaaataccaaagaattttggtcgttcatctacagcgtcgcagccctggcgtgcattgccattacagagattaccttttttatgggttacaccattgctactattcttcattatgccttctgtatcatcatccctatctaccccctattgggatgtctaatatccttcatcaagatttcttggaaaaacgtgcgcaagaacgtcgacacctataacccttgggatcgtctgtctgtggcagtgatcagtccttacctccagtgcgtattgtggatatttttgctccagtattacgaaaaaaaatacggcgggcggagtatacgcaaagaccccttttttagaaacctaagcaccaagtcgaagaatagaaagctcccagagccccccgataacgaggatgaagatgaggacgtcaaagccgaaagacttaaagtcaaagagctgatggggtgtcaatgctgtgaagagaagccctccattatggtcagtaatctgcacaaagagtacgatgacaagaaagacttccttctgagcagaaaggtgaagaaagtggcaacaaagtatatcagcttctgcgtgaagaagggcgaaatcctgggcttgcttgggccaaatggggcgggcaagagcactattattaacattttggtcggcgacatcgaacctacatcaggccaggtgttcctcggggactactcatccgaaacctccgaggacgatgactccctgaaatgcatgggctactgcccccaaatcaaccccctgtggcctgatactactttgcaagagcactttgagatttacggggctgtgaaaggcatgagcgccagtgacatgaaagaagtgatctctagaatcacccacgcactggatctcaaagagcatttgcaaaagacagtgaaaaaactgccggccggtatcaagagaaagctgtgttttgccctgagtatgctgggcaatccacaaatcacgctcctggacgagcccagtacaggtatggatcctaaagctaagcaacatatgtggagagcaatccgcacagcgtttaaaaacagaaagcgcgccgccattctgacgacacactatatggaggaagcggaagccgtgtgtgatcgcgtggctattatggtctccggtcagctgcgatgtataggaacggtgcagcacctaaaatctaagtttggcaagggatatttcctggagattaaactaaaggattggatagagaaccttgaagttgatcggctgcagagggaaatccagtacattttcccgaatgcatcgcgtcaggagagcttttccagcattctggcttacaaaatccccaaggaggatgtccagtccctgtctcaatcctttttcaagctcgaagaggcgaaacacgcatttgccatcgaggagtactctttcagccaggccacactggagcaggtgtttgtggagctgaccaaggaacaggaggaggaggacaattcatgtggtactctgaatagcacactttggtgggaacgaactcaggaggatagggtggtcttttag

SEQ ID NO: 249136 - DNA, 4932 bp, Artificial Sequence
  derived and/or modified sequence
atgagcaccgccatccgggaggtgggcgtgtggcggcagacccggaccctgttactgaagaactatctcattaaatgccgcacaaaaaaaagttcagtgcaagaaattttgttcccgctgttcttcctcttttggctgatcctgatctcgatgatgcaccccaataaaaagtatgaagaggtgcccaatattgaactgaacccaatggacaagtttacattaagcaatctgatcctgggatacacccctgtcaccaatattacttcttcgataatgcaaaaggtgtctaccgaccacctccctgatgttattataactgaggaatatactaacgagaaagagatgcttacttctagcctgtccaaaccttccaatttcgtgggggtggtcttcaaggattccatgtcctatgagctacgctttttcccggacatgatccctgttagttccatatacatggattccagagccggctgttctaaatcatgcgaggcggcacagtactggtcttcaggctttacggttctgcaggctagcattgatgccgctatcatccaactaaagacaaatgtcagcctctggaaggaattggagtcaactaaggcggtgataatgggtgagacagctgtggtggagatcgatacatttccccgcggagtgatcctaatttacttggtgatagcttttagcccattcgggtacttcttggccattcacattgttgcagagaaggaaaaaaaaatcaaggagtttctgaaaatcatgggcctccatgacacggctttctggttatcttgggtgctactctatacatcattgatcttcctgatgtctctcctaatggccgtgattgctacggccagtctgctgttcccacaatcatcatccatcgttatcttcctgttgttctttctgtatggactcagttcagtcttttttgctctgatgttgacacccttatttaagaagagcaagcatgtggggatcgtggagttcttcgtcaccgttgcattcggatttattggattgatgatcatactgattgagagcttcccaaaatcgctggtttggctgttctcacccttttgccactgcacatttgtgattggcatcgcccaggtgatgcacctggaggacttcaacgaaggagcctcattctcgaacttgactgcaggcccgtacccactaatcataaccatcatcatgctgaccctcaactctatattttacgtgctgttagcagtctacctggaccaggtcatccccggagagttcggattaaggaggagctccctctatttcctcaagccatcatattggtccaaaagtaaacgcaattatgaggaactgagcgaaggtaatgtaaacggaaacataagcttctccgaaatcatcgaacctgtgagctccgaattcgtcggcaaagaagccattcggattagcggcatacaaaaaacttataggaaaaagggggagaacgtggaagccttgagaaacctgtcgttcgacatctacgagggccagataaccgcattgttaggccattcgggcacaggtaagagcaccctgatgaatatcctgtgtggtttatgccctccttctgacgggtttgctagtatctacggccaccgggtgtcagaaatagatgaaatgttcgaggcacgcaaaatgatcgggatttgtccacaactggacatccacttcgacgtgttaacggtggaggagaacctgtcaatcctcgcaagtattaaagggatccctgctaacaatattattcaggaggttcagaaagtacttttggatctagacatgcagaccataaaggacaaccaagccaagaagttgagcgggggccagaagcggaagctgtcactcggaatcgcagtgctggggaacccaaagattcttcttttagacgaaccaacggcaggtatggatccctgctcccgtcacatcgtttggaacctccttaagtataggaaggcaaaccgagtgacagtgttctcgacccattttatggacgaggccgatatcctcgccgatagaaaagccgtcatttcacagggtatgttgaagtgtgtagggagcagcatgtttctcaagagcaaatggggaatcgggtatagattgagcatgtatattgataaatattgcgccactgaaagcctttcctcattagtcaagcagcacattccaggcgccacgcttctccagcagaacgatcagcagctggtgtacagcctgcctttcaaggatatggataagttcagcgggctttttagcgctttggatagtcattccaaccttggagtgattagctacggggtctctatgacaactctagaggacgtttttctgaagctggaggtcgaggctgagatcgaccaggctgactactctgtgttcacacagcaacccttagaagaggagatggattctaagtccttcgatgagatggaacagtcattacttattctgtccgagacaaaagctgcgctggtttccaccatgtccctctggaagcagcagatgtatactatcgcaaagtttcattttttcacactcaagcgtgagtctaagtctgtgcgatcagtgctcctactgctgctgatcttttttaccgtgcagatcttcatgttcctggtacaccactctttcaaaaacgctgttgtgcccatcaaactggttccagatttatacttcttgaagcctggagataagccccacaaatacaaaaccagtcttctgctgcagaactccgctgccgacagtgatattagcgatcttatctctttctttactagccaaaatataatggttaccatgatcaatgacagcgattacgtgagcgtcgccccccatagcgcggcactgaacgtcatgcacagcgagaaggactacgtctttgccgcagtctttaactcaactatggtgtacagccttccaattctagtgaacataatctcgaattattacctgtaccacctcaacgtaacagagaccattcagatctggtcaacccctttctttcaagagatcactgatattgtatttaaaatagagctttacttccaagccgcgctcctcggaattatcgttaccgccatgcctccatactttgccatggaaaatgctgaaaaccacaaaattaaagcctacacacagctgaagctcagtggccttctaccaagcgcctattggatcgggcaggctgttgttgatatccctctgttcttcattatcttaatacttatgctcgggtcgctgctggcgtttcactatggactctatttctacacagtcaagtttcttgcagtagtgttttgtttgatcggttatgttccaagcgtgatcctgtttacatatatcgctagctttacatttaagaaaatattgaatactaaagagttctggtcattcatctactccgtggctgcactggcatgtattgccataaccgaaattaccttttttatggggtacactatcgccaccatactccactacgctttttgtatcattatccccatctacccccttcttgggtgtctcatatcattcatcaaaatttcctggaaaaacgtcagaaagaatgtcgacacctacaatccttgggacaggctcagcgtggcagtcatcagtccttacctccagtgcgttctttggatttttttgctgcagtattatgagaaaaagtacggcggacgtagtatcaggaaagacccgtttttcaggaatctaagcaccaagagtaagaaccggaagctccccgagccgccagacaatgaagacgaggatgaggacgttaaggccgagcggctaaaagtaaaggagcttatgggctgtcaatgttgcgaggagaagccatcaatcatggtatcgaacctccataaggaatatgacgacaagaaagatttcctgctcagcaggaaggttaaaaaagtggccacaaagtacatttctttttgtgttaaaaagggagaaatcctgggactgctgggacccaacggtgcaggtaagtccacaatcataaacattctggtcggtgacattgaaccaacgtctggacaggtgtttcttggggattattcctcagagacctctgaagacgacgacagcctgaaatgcatgggatattgcccacagattaaccccttatggcccgatactacacttcaggaacattttgagatctacggcgccgttaaaggcatgagcgccagtgatatgaaagaggtaattagcaggatcacccacgctctcgatctgaaagaacacttacagaaaacggtcaagaagctgcccgctgggattaagcggaaactatgcttcgccctgtccatgttgggcaacccccaaattacgctgctggatgagcctagtacaggaatggatcctaaagcaaagcagcatatgtggagagctatccggaccgcattcaagaaccgtaagagagctgcaatccttacaactcactatatggaagaggcagaggcggtttgcgatcgtgttgctattatggtgagcgggcaattgcggtgcattgggaccgttcagcacctgaaatccaaattcggaaaagggtacttcctggaaattaagctgaaggactggatcgagaatctagaggtggatagactgcagagagagatccaatatatcttccctaacgcctcccgccaggaatccttttccagtatcctggcctataaaatcccaaaggaagatgtgcaaagcctgagtcagtcgtttttcaaactggaggaggctaagcatgcttttgccatagaggagtattccttcagtcaggccaccctggagcaagtattcgtcgagttgactaaagaacaagaggaggaggacaactcctgtgggacgctaaatagtaccttgtggtgggaaagaacacaggaggatcgggtcgtattttag

SEQ ID NO: 249137 - DNA, 4928 bp, Artificial Sequence
  derived and/or modified sequence
atgtctactgcgatccgtgaggttggtgtctggcggcagacgaggacattgcttttgaagaactacctcataaagtgccggactaagaagtcctcggtgcaggaaattctgtttccgcttttctttctgttctggctcatacttatatcaatgatgcatccaaataagaagtacgaagaagtccccaacatcgagctgaaccccatggataagttcaccctgtccaatttgattttgggctacacgcctgtcactaatattacaagttctatcatgcagaaagtctctaccgaccatctccccgacgtgataatcaccgaagagtataccaatgaaaaagagatgttgacttcaagtttatcaaagccctcgaatttcgtaggggtggtcttcaaagattctatgtcctacgagttgaggttctttcccgacatgatccccgtgtcatccatatacatggactcccgggctggctgcagcaaatcttgcgaggccgcacagtattggtcttctggatttaccgtgttgcaagcatccatcgacgctgctattattcagctcaagaccaatgtttcactgtggaaggagctggagagtacaaaagctgtgatcatgggagaaacagctgtggtggagatcgatactttcccgcgaggggtgatccttatttatctggtcatcgctttttcgccctttgggtattttctggctattcatatagtggctgagaaggaaaagaaaataaaagaatttctgaaaatcatggggctgcatgacacagctttctggcttagttgggtgttactctatacgagcctgatttttttaatgtcactccttatggccgttatcgcaactgcgtcactgctgttccctcaatcatcctcaatagttatctttctgctctttttcctttatggactgagcagcgttttcttcgctctgatgctcactccgctctttaagaaatcaaagcacgtgggtattgttgaattctttgtgactgtcgcctttgggttcatcggactcatgatcatccttatcgaatctttcccaaagtctctggtgtggctgttctctccgttctgccactgcaccttcgtcatagggatcgcccaggtgatgcacctcgaggattttaacgaaggggcatccttcagcaaccttacagccggtccgtatcccttgataattaccattatcatgctgacattaaatagtattttttacgtattactggctgtctatctggaccaagttatccccggagaattcggcctgcggcgttcttcactctactttcttaaaccttcatactggtctaaaagtaaacgcaattacgaagaactttccgagggaaatgttaatggtaacatatcgttcagtgagattatcgagccagtgtcaagtgagtttgtcggtaaggaagccattcggatctccggtatccagaagacgtatcggaagaagggagaaaacgtcgaggcactgcgcaatctgtcttttgacatttacgaagggcagattacagcattattaggtcatagcggcactggaaagagcacacttatgaatatcctgtgcggcctgtgtccaccatcagacgggttcgcatccatctacggacaccgtgtctcagaaatcgatgagatgttcgaggcgaggaaaatgatcggtatttgtccgcaactggacatccactttgatgtgcttacggttgaggagaatttatctattctggctagtattaaaggtatcccggcaaacaatattattcaggaggtccagaaggtcctgttagatctggatatgcagaccatcaaagacaaccaggccaagaagctgtcgggaggacaaaaacgcaaactctccctggggatcgccgtactgggcaatccgaagattctcctgttggacgaacctactgccggtatggatccgtgcagccgtcacatcgtctggaatctgctcaagtaccgcaaggcgaacagagtgactgtgttcagtactcactttatggatgaggccgacattctcgccgataggaaagcagtcatttcccaaggcatgctgaaatgcgtaggaagcagcatgttcctcaagagcaagtggggaattgggtatcggttatctatgtacatcgacaaatattgcgccacagagagcctgtctagcctggtgaaacaacacattcctggggctacactgctccaacagaatgaccagcaacttgtgtacagcctcccattcaaggacatggacaagttcagcgggctattctcagctctagactctcattccaatcttggagttatatcatatggagtgagtatgaccacactggaggacgtcttcctaaagctggaggttgaggccgaaatagatcaggccgattattccgtgtttacacagcagcccctggaagaggagatggactcgaaaagcttcgatgagatggagcagtcactgctcattctgtctgaaacgaaagcggctttggtgtccaccatgtctctttggaagcaacagatgtacacaatcgccaagttccattttttcacactcaaacgcgaatccaagtctgtccgcagtgtcctacttcttctgctgatctttttcactgtgcaaattttcatgttccttgtgcatcacagctttaaaaatgctgtggtccctattaagcttgtgccagacttgtatttcttaaagcccggagacaaacctcacaagtacaagactagcctgcttcttcaaaacagcgccgacagcgacatctcggacctcatcagctttttcacgagtcaaaacatcatggtgaccatgataaacgacagtgactacgtgtctgttgcacctcactcagctgccctgaacgtcatgcattccgaaaaggactacgtgttcgctgcggtgtttaacagcactatggtttattctttgccgatactggtgaacataatttctaactactacttgtaccatctgaacgtgacagaaacaatacaaatttggagcacgcctttttttcaggagattaccgacattgtttttaaaatagaactgtacttccaggccgctctgctcggaatcattgtaaccgccatgcccccatacttcgctatggaaaatgctgagaaccacaagatcaaggcctacacccagctcaaactctccggccttctcccctctgcctattggattgggcaggccgtggtagacattccgctattcttcatcattcttatactgatgttgggttcacttctcgcctttcattatggactctacttctacactgtgaagtttttggcagtcgtcttttgcctcataggttatgtgccgtccgtgatcctttttacttatattgcgagctttacgttcaaaaagattttgaacacaaaggagttctggtcttttatatatagtgtggcggctttagcttgtattgcaataactgagatcacattttttatggggtacacaatcgcgaccatccttcattacgcattttgtataatcatccccatttatccgttgctcggctgtctgatctcgtttattaagatctcctggaagaacgtgcggaagaatgtagacacctataatccgtgggaccgtctatctgttgccgttatcagtccctacctacaatgtgtcctgtggatctttttgctccagtactatgaaaagaagtatgggggtcggtccattcggaaggatccgttcttcaggaatctgtccacaaaatctaaaaaccggaagcttcccgaaccccctgacaacgaggacgaggatgaggatgtgaaggcagagcgcttgaaggttaaagagttgatggggtgtcagtgctgtgaagaaaaacccagcataatggtcagcaacctccacaaagaatacgatgataagaaagactttctgctctcgcgcaaggtcaagaaagtcgccaccaagtatatcagcttctgtgttaagaaaggcgaaatactgggactcctcggtcccaatggagccggaaagagcaccatcattaatatcctcgttggtgacatcgaacccacctctggccaggtgttcctcggcgattatagttcagagaccagtgaggacgacgattctctgaagtgcatgggttattgcccacagattaaccctttatggcctgataccaccctccaagaacacttcgagatttacggagctgttaaagggatgtctgcgagcgatatgaaagaagtcatatctcgtattactcatgctctcgacctgaaggagcacctgcaaaagactgtgaaaaaactgcccgcaggcattaagcggaaactctgcttcgcgctgtccatgctggggaaccctcagatcaccctcctggacgagcccagtactggcatggaccctaaggctaaacagcatatgtggcgcgctattcgcacagccttcaagaaccgcaaacgcgctgcgattttaacaacacactatatggaggaggccgaagcggtctgcgaccgcgtggccatcatggtctccggccagctccgatgcattgggaccgttcagcacctgaagagcaagttcgggaagggatactttctcgaaatcaagttgaaggattggattgagaatctggaggttgaccggttgcagcgagaaatccagtacatcttcccaaacgcaagtcgtcaggaatcctttagttccatcctcgcctacaaaattcctaaagaggacgtgcagtctctgtcccagtccttcttcaagctagaggaagcgaagcacgcatttgcgatcgaagagtattctttctcgcaagccacactggaacaagttttcgtggagctgactaaggaacaggaagaggaggacaacagttgcgggacactaaacagtacactgtggtgggaaagaacacaggaggatcgagtcgtattcta

SEQ ID NO: 249138 - DNA, 4931 bp, Artificial Sequence
  derived and/or modified sequence
atgagtacagcgatccgagaggtgggggtttggcggcagaccagaactctcttactaaaaaactacctgattaaatgtcgcactaagaagtcgtccgtccaagagatcctcttccccctcttcttcctgttttggctcatcctcattagtatgatgcacccgaacaagaaatatgaggaggtcccaaacatcgaactgaaccccatggacaagtttaccctttcaaacctaattctggggtatacccctgttacgaacatcactagcagcatcatgcagaaggtgagcacggaccacttgcccgacgtcatcataacggaggagtacaccaacgagaaggagatgttgacgagctccttatccaaaccatctaactttgttggagtggtgtttaaagactccatgagttacgagctccggttctttccagacatgattcctgtctcaagtatttatatggatagccgggcaggatgttcaaagtcttgcgaggccgcacagtattggtcctctgggtttacggtcttacaggccagcatagacgcagccatcatacagttgaagactaatgtgtcgctgtggaaagagctagagtccaccaaagccgtaataatgggggagacggccgtggttgaaattgacacatttccacgtggcgtgattctgatctatctcgtcatcgccttttccccctttggttatttcctggccatccatattgtcgctgaaaaagaaaagaagatcaaggaattcctgaaaataatggggctgcatgatacagcgttctggctgtcatgggtgctgttgtacaccagccttatcttcctgatgagcctcctgatggccgtgattgccaccgcctcactcctgtttccgcagagcagctccattgtaatctttctcttgtttttcctttacggcctgtccagtgtgtttttcgcactcatgctgactcctctttttaagaagtccaagcacgtgggcatagtggagttcttcgtcacagttgcctttgggtttatcgggcttatgataatacttatcgaaagcttccccaagtctttggtttggctgttctctcccttttgtcactgcacattcgtaattggcatcgcccaggtcatgcacttggaggattttaacgaaggcgcttcctttagtaatctgaccgcagggccttaccctttaatcatcacaatcatcatgttgaccctgaacagtattttctacgtgctcctggcagtgtatctagatcaggtgatcccaggcgagttcggcttgaggagaagttctctgtatttcttgaaaccttcttattggagcaaaagcaaaagaaactacgaggagttgtctgaaggaaacgtcaacggtaatatctcattttccgaaattattgagcccgtgtcatccgagttcgtcgggaaggaggccatcagaatctcaggcattcagaagacatacagaaaaaagggggagaatgtcgaggctcttaggaacttatcctttgatatttacgagggacaaatcactgccctgctgggtcacagcggtacgggtaaatccacgctgatgaatatactgtgcggtctgtgtcccccttctgacgggttcgcatcaatttacggtcatcgtgtatccgaaatagacgagatgttcgaggctcgcaagatgattggcatctgtccacaacttgatatacactttgatgtgctgaccgtggaggagaacctatccatactggcttctataaagggcattccagccaacaacattatacaagaagtccaaaaggtgctcctagacctggatatgcagaccatcaaggacaatcaggcaaagaagctgagcgggggacagaaacgtaagctgagccttgggattgctgtgttgggtaatcctaagatccttctgttggacgaacccactgccggaatggacccgtgcagcagacatatcgtttggaatctgttgaaatatagaaaggccaacagggtcaccgtcttctcaacccattttatggacgaagcggatattttggctgaccgaaaggcagtgattagccagggcatgctaaaatgcgtcggtagctcaatgttcttgaaatcaaaatggggaattgggtaccggctgtccatgtatatcgacaagtactgtgctactgagagcctttcatctctggtgaagcagcatatcccaggagcaaccctactgcagcagaacgaccagcagctggtctatagcctcccttttaaggacatggacaagttcagcggcttgttcagcgcccttgatagtcactcgaatctaggcgtcatctcttacggggtgagcatgacaacgctcgaagatgtattcctcaaacttgaggtcgaagcggagattgaccaggcggactacagtgtgttcacccaacagccgctagaggaggagatggactctaagtccttcgatgagatggaacagagcctccttattcttagtgagacaaaagctgccctggtgagcactatgagcctgtggaagcagcaaatgtacaccatcgccaaattccacttcttcacattgaaaagagagtctaaaagcgttcgctccgtgctgctgctcctgttgatcttttttaccgtacaaatatttatgttcttagtgcatcatagctttaagaacgccgtggtacccatcaagctggtgcctgacctctacttcctaaagccaggcgataaaccccataaatacaaaacctcactgttgcttcagaacagcgccgctgacagtgatattagtgacctcatttctttcttcacctctcaaaacataatggtgaccatgattaacgacagcgactacgtgtctgtagccccacatagcgctgcactcaacgtcatgcacagcgagaaagactacgttttcgcagcggtgttcaattcaactatggtgtactccctgccaattctggtaaatattatctccaactactacctgtatcatctgaatgtgacggagacaatccagatctggtccactccattctttcaagaaattaccgatatcgtgtttaagattgaactgtatttccaagctgctctcttgggcataattgttactgctatgcccccttacttcgccatggagaacgctgagaatcataagattaaagcatacacgcagttgaaactgtccggattgctgcccagcgcttactggatcggccaggccgttgtggacattcctctctttttcataatacttatccttatgctgggatcccttttagcctttcattacggtctttatttttacaccgtgaaattcctggcggtggtgttttgtttgattggctacgtgcctagcgtcatcctctttacttacatcgcatcgttcacgttcaaaaagattctcaacacgaaagagttctggagtttcatctatagcgtggccgcacttgcatgcattgccatcaccgagataaccttcttcatgggctatacaattgccacaatccttcattacgctttttgtattataatccctatctacccgctgctcgggtgcctcatttcatttattaaaattagctggaagaatgtgagaaaaaacgtagacacctataacccatgggacaggctaagtgttgccgttatttctccatacctgcagtgcgtactttggatctttcttctacagtattatgagaagaaatacggtggacgcagtatccgcaaagatccatttttccgcaacctgtccactaagagtaagaaccggaagcttcctgagccccctgacaacgaagacgaagatgaggatgtcaaagccgagcggctgaaagtgaaagagctgatgggatgccaatgctgcgaagagaagccgtcaatcatggtgagcaacctacacaaagaatatgatgacaagaaggacttcctcctgagtagaaaagttaagaaagttgccaccaagtatatctctttttgtgttaagaagggagagattctgggactgttgggccctaacggcgcaggaaagtccactatcattaatatccttgtcggagatattgagcctacttccggccaagtctttttaggcgactacagcagcgagacttcagaggatgacgactctctgaaatgtatgggctattgccctcagattaaccctttgtggcccgacaccactctgcaggagcatttcgagatatacggcgctgtgaaggggatgtcggcttccgacatgaaagaggtgatatccagaattacccacgccttagacctgaaagagcacctccagaaaaccgtgaaaaagcttccggcagggatcaaacgtaagctgtgcttcgcactcagtatgctcgggaacccacagataactctcctggacgagcctagcactggtatggaccccaaggctaaacagcacatgtggagagctatcaggaccgccttcaagaataggaaaagggctgcaatcctcacgacccactatatggaagaggccgaagcagtgtgcgatcgagtagccatcatggtttcaggacagctgcgctgcataggcaccgttcaacatctaaaatcgaaatttggcaaaggttatttcctagaaatcaagctcaaggactggattgagaatctcgaggtagataggctgcagcgggagatccaatacatttttccgaacgcaagcagacaggagagcttctcatctatactggcctataagattccaaaggaggacgttcagtcgttgtcccagagctttttcaaactggaggaagcgaagcacgcgtttgccatcgaggaatacagcttctcgcaggccacgctggagcaagttttcgtagagctcaccaaagagcaggaggaggaggacaattcatgcggaactctgaattcaacactgtggtgggaacgcacacaagaggatagggttgtattcta

SEQ ID NO: 249139 - DNA, 9236 bp, Artificial Sequence
  derived and/or modified sequence
agtagagacagggtttcaccatgttggtcaggctggtctcaaactcctgacttcgtgatctgcccaccttggcctcccaaagtgctgggattacaggcgtgagccaccgcacccggtcagctattttctacatgcttcatttgcagtgtaatattggattgtatgagactttgggttttgtgttaatacctacagaaaatgttgatattttctcttagcaggctgtcaaccaggttaggttcaggtcataagtttctacccacattctttgaactgtagttgtcattttagtttatttttcaaaaacttttgcagtacctttttggtctgtcttgtgtgtgccttgcagtgaacagtctggatttggacagtggtctgtctgttagttcagtttctcaagcctttgtcacactaataggattggatttatgtatgtccagcttgggaattattacaggaattaaaaacaactttttagagtgctttcctgagctctctttctatttgttcccccttctactttttgcttccctgtggctgctgtttctatcctccagccagagagctagtgtttattttctccattgtgttacacacttgtgcagctgcaaccaccatatccagggcccaatggtaggaggtagagaagaaaagcaaaagggattggcctcatcctcttacaacgatagttccattgaatagagagaaaggttttcctgcctcagagtgttggctgcactaggcttttgttactgtagtctggccctgttaccatgggattgcttgcatgtggggatacaggagaattcagaaaagaaaaaaagatttgctatttctacattctccctgagcattaagacttcccttgcccattcctcaattcaaagctaaggcttcttctggagctgcctctgtgggcggttcgggagataccaaaggagaaaaagtaccactgttgatatggtggtatttcaaattctggtctaccctatttcacatgccttgtttacttttcagagctgacagattgctgctccatgcattctgtccagtttcctaagagagacagcttggagtatgcttaatccatcttacctgggactgaaacagctgcttattttgccgttaaaaattacatgcagtttactgcgtggctccgggtttgtttgtttgtttttcctctttaataggtttattcagaaaacatgtccactgcaattagggaggtaggagtttggagacagaccagaacacttctactgaagaattacttaattaaatgcagaaccaaaaagagtagtgttcaggaaattctttttccactattttttttattttggttaatattaattagcatgatgcatccaaataagaaatatgaagaagtgcctaatatagaactcaatcctatggacaagtttactctttctaatctaattcttggatatactccagtgactaatattacaagcagcatcatgcagaaagtgtctactgatcatctacctgatgtcataattactgaagaatatacaaatgaaaaagaaatgttaacatccagtctctctaagccgagcaactttgtaggtgtggttttcaaagactccatgtcctatgaacttcgtttttttcctgatatgattccagtatcttctatttatatggattcaagagctggctgttcaaaatcatgtgaggctgctcagtactggtcctcaggtttcacagttttacaagcatccatagatgctgccattatacagttgaagaccaatgtttctctttggaaggagctggagtcaactaaagctgttattatgggagaaactgctgttgtagaaatagatacctttccccgaggagtaattttaatatacctagttatagcattttcaccttttggatactttttggcaattcatatcgtagcagaaaaagaaaaaaaaataaaagaatttttaaagataatgggacttcatgatactgccttttggctttcctgggttcttctatatacaagtttaatttttcttatgtcccttcttatggcagtcattgcgacagcttctttgttatttcctcaaagtagcagcattgtgatatttctgctttttttcctttatggattatcatctgtattttttgctttaatgctgacacctctttttaaaaaatcaaaacatgtgggaatagttgaattttttgttactgtggcttttggatttattggccttatgataatcctcatagaaagttttcccaaatcgttagtgtggcttttcagtcctttctgtcactgtacttttgtgattggtattgcacaggtcatgcatttagaagattttaatgaaggtgcttcattttcaaatttgactgcaggcccatatcctctaattattacaattatcatgctcacacttaatagtatattctatgtcctcttggctgtctatcttgatcaagtcattccaggggaatttggcttacggagatcatctttatattttctgaagccttcatattggtcaaagagcaaaagaaattatgaggagttatcagagggcaatgttaatggaaatattagttttagtgaaattattgagccagtttcttcagaatttgtaggaaaagaagccataagaattagtggtattcagaagacatacagaaagaagggtgaaaatgtggaggctttgagaaatttgtcatttgacatatatgagggtcagattactgccttacttggccacagtggaacaggaaagagtacattgatgaatattctttgtggactctgcccaccttctgatgggtttgcatctatatatggacacagagtctcagaaatagatgaaatgtttgaagcaagaaaaatgattggcatttgtccacagttagatatacactttgatgttttgacagtagaagaaaatttatcaattttggcttcaatcaaagggataccagccaacaatataatacaagaagtgcagaaggttttactagatttagacatgcagactatcaaagataaccaagctaaaaaattaagtggtggtcaaaaaagaaagctgtcattaggaattgctgttcttgggaacccaaagatactgctgctagatgaaccaacagctggaatggacccctgttctcgacatattgtatggaatcttttaaaatacagaaaagccaatcgggtgacagtgttcagtactcatttcatggatgaagctgacattcttgcagataggaaagctgtgatatcacaaggaatgctgaaatgtgttggttcttcaatgttcctcaaaagtaaatgggggatcggctaccgcctgagcatgtacatagacaaatattgtgccacagaatctctttcttcactggttaaacaacatatacctggagctactttattacaacagaatgaccaacaacttgtgtatagcttgcctttcaaggacatggacaaattttcaggtttgttttctgccctagacagtcattcaaatttgggtgtcatttcttatggtgtttccatgacgactttggaagacgtatttttaaagctagaagttgaagcagaaattgaccaagcagattatagtgtatttactcagcagccactggaggaagaaatggattcaaaatcttttgatgaaatggaacagagcttacttattctttctgaaaccaaggctgctctagtgagcaccatgagcctttggaaacaacagatgtatacaatagcaaagtttcatttctttaccttgaaacgtgaaagtaaatcagtgagatcagtgttgcttctgcttttaatttttttcacagttcagatttttatgtttttggttcatcactcttttaaaaatgctgtggttcccatcaaacttgttccagacttatattttctaaaacctggagacaaaccacataaatacaaaacaagtctgcttcttcaaaattctgctgactcagatatcagtgatcttattagctttttcacaagccagaacataatggtgacgatgattaatgacagtgactatgtatccgtggctccccatagtgcggctttaaatgtgatgcattcagaaaaggactatgtttttgcagctgttttcaacagtactatggtttattctttacctatattagtgaatatcattagtaactactatctttatcatttaaatgtgactgaaaccatccagatctggagtaccccattctttcaagaaattactgatatagtttttaaaattgagctgtattttcaagcagctttgcttggaatcattgttactgcaatgccaccttactttgccatggaaaatgcagagaatcataagatcaaagcttatactcaacttaaactttcaggtcttttgccatctgcatattggattggacaagctgttgttgatatccccttattttttatcattcttattttgatgctaggaagcttattggcatttcattatggattatatttttatactgtaaagttccttgctgtggttttttgccttattggttatgttccatcagttattctgttcacttatattgcttctttcacctttaagaaaattttaaataccaaagaattttggtcatttatctattctgtggcagcgttggcttgtattgcaatcactgaaataactttctttatgggatacacaattgcaactattcttcattatgccttttgtatcatcattccaatctatccacttctaggttgcctgatttctttcataaagatttcttggaagaatgtacgaaaaaatgtggacacctataatccatgggataggctttcagtagctgttatatcgccttacctgcagtgtgtactgtggattttcctcttacaatactatgagaaaaaatatggaggcagatcaataagaaaagatccctttttcagaaacctttcaacgaagtctaaaaataggaagcttccagaaccaccagacaatgaggatgaagatgaagatgtcaaagctgaaagactaaaggtcaaagagctgatgggttgccagtgttgtgaggagaaaccatccattatggtcagcaatttgcataaagaatatgatgacaagaaagattttcttctttcaagaaaagtaaagaaagtggcaactaaatacatctctttctgtgtgaaaaaaggagagatcttaggactattgggtccaaatggtgctggcaaaagcacaattattaatattctggttggtgatattgaaccaacttcaggccaggtatttttaggagattattcttcagagacaagtgaagatgatgattcactgaagtgtatgggttactgtcctcagataaaccctttgtggccagatactacattgcaggaacattttgaaatttatggagctgtcaaaggaatgagtgcaagtgacatgaaagaagtcataagtcgaataacacatgcacttgatttaaaagaacatcttcagaagactgtaaagaaactacctgcaggaatcaaacgaaagttgtgttttgctctaagtatgctagggaatcctcagattactttgctagatgaaccatctacaggtatggatcccaaagccaaacagcacatgtggcgagcaattcgaactgcatttaaaaacagaaagcgggctgctattctgaccactcactatatggaggaggcagaggctgtctgtgatcgagtagctatcatggtgtctgggcagttaagatgtatcggaacagtacaacatctaaagagtaaatttggaaaaggctactttttggaaattaaattgaaggactggatagaaaacctagaagtagaccgccttcaaagagaaattcagtatattttcccaaatgcaagccgtcaggaaagtttttcttctattttggcttataaaattcctaaggaagatgttcagtccctttcacaatctttttttaagctggaagaagctaaacatgcttttgccattgaagaatatagcttttctcaagcaacattggaacaggtttttgtagaactcactaaagaacaagaggaggaagataatagttgtggaactttaaacagcacactttggtgggaacgaacacaagaagatagagtagtattttgaatttgtattgttcggtctgcttactgggacttctttctttttcacttaattttaactttggtttaaaaagttttttattggaatggtaactggagaaccaagaacgcacttgaaatttttctaagctccttaattgaaatgctgtggttgtgtgttttgcttttctttaaataaaacgtatgtataattaagtgaagctgcatgtttgtattgaagtatattgaactatatagtttgtatgtcatctttttcaccattcagaaacagtgcttctgaatttgtgatttaaaggaattgtaatagaatagttttatttttaagttatctttaagtttatgccatcttcttaaataagtacgtaatgttccaatctaaataaaaaactaattcataactaatgcatagaaaagatacataaagcaatgtgaaagtttcttgcttctcctttttaatttctaaaaaagccactttgaatggaagttgtcatccgtaaaagctgaagtgtaagcactaggaaatctcaatatagagatttgaggaaagttatatccactaggtggcagtcattgatcataataagtgaaatgagcccttgttctagtacatgattttaggcttaggtaattaggtatgtgaaattacatttctttaatttaaagtaaaattcagaaggttttagttattataattaaaggaagactgtgtgtagaatcttacgtaatagtctgattctttgactctgtggctagaatgacagttatctatggaggtggtagaattaagccataccttttccttcatcactcttggaacatataaattttttgtcatcttccttgcaaagggcacatttaattttgttcttgaataaaatattttattgggtatttgtttttattggtaaactttagtgaatctcttctataaaattgtaagtagatcagtgtgtagatttatttagtaacttacctcattgactttggaacatggtaggatatgaataaactctttcaagggttaaattaagaattgtaagtgcagtgcgcctatttctttttaataagaaccagaatttcatttttgatagagttaaaggcatggctaatattttcttagaaatacttccttgtacaacccatgtattggctcaaggtataaaatagtgtaaataatgctagttgacattacatttcaaccaaatgaaagtattaacttcataaaacaaatatattgagagtgtgattattgtattagacaacaacaacagcaatgacagaaggatttggtactgaattactttaaataagcaaaacctttcagtggcattattcattctttaatgtaggcaaaatttaatgaacttttagctttattgtgtaataagacatctgtgattttaggctctagcagtggatttaaaagtgttctttctcggtacaaagtacgtggctgatattttcccccattgctgggggcagttgctatacactttcctaaagtatatataatgttcacataaatacccagggacctcttttttgggatgtgcttttgtaattatgtgtaaccttgaatacttaagtttagtaaaagcaacaaaattatatctatagtttactaaggcagtcacgaaaaagcatagttttttttagaacctgaccatcctaagaaagttatgtcatctgaagatagagcatgactaatgaagaaaattacctgcttttgcacgtagatttggtaactttcactttacatttgtgaatgtgtaattggtgcaaagtaaattttttttcctgcaaagtgaaagttgagtagtcacaatcatgttatttattttgttcatttagttactttgcttttaatgtatatgaatacatgctcttgtaaacaattttaaaagacattcaaatttttttttagtttttatatactcagaatatattttggttgttaaattaaattatgttccctttttcacagtaacaaaatctgactcaggagaaatataacttaattcttaggaaaacaagggtaagtgagctggaaagcaaaggaggcaaaaagtgaaatatatttatttacagtgtacagttcatgtttatgaacatactaattttaaaatgtcttaaattactgatctcaaaacttttttctatgtcagtacagataaataaataaatatacatattaggcaaaagcaacatcaccaaccttatatttcccattcatggtcaaattttcaaaggaaagtaaaagctgagctttactgagtgagtgtttactgactaataaggcaagaaaaaacatgatgagtgtactttacatcttacttttgtgggctcttaatttttttctctagtttgttttcagtaaagacagtgggttttctttaaaataatttttttcttttaaatttgcacaaattatcttaggtcagtattttggttttaatcattaaaacatttttagagtaatgtaatttaacaaatattttaagtgattatgtttccagaaatggattctttggagagaactcggatgactatcagttttggccctgtaagatcgtggagatctgtaagatagatacttatataacttacataaaatatatataatatattacttatataacttatataactagctattattttatataactaactataatatgacaaatcctttgctagtagtactaacaacgttttataggagcacaattaattttacttaggataagtgttgttattattgtttttattgttgttctgttagttactcaaaacttcattctaattgtgccctgagtttgttaaaataccatactgtatttttgtgtaacatgtaaataggcattaatttttgagaaatagaaatgtttatccttaatgtatttttaatttgctaacattgattttttattttctttcctgaaatagcttatttcctaaaatgaaagaatttattctcagatgaataatttttatatcagctattcttatcaggtaaaagtttaattattttttatttataatatatgtaagcaattctcaatgctgctctttaagaaaaataaatatgattatattaataataagc

SEQ ID NO: 249140 - DNA, 8180 bp, Artificial Sequence
  derived and/or modified sequence
agctctgcctgcgccaggagcgcgcgggtgcgcgcggccgcgccctcgcacagatcccagctgggtcacccgcactgagtcaacagactgagcgcgtccaggcctgacagctctgcggctcgggccctgaggtttattcagaaaacatgtccactgcaattagggaggtaggagtttggagacagaccagaacacttctactgaagaattacttaattaaatgcagaaccaaaaagagtagtgttcaggaaattctttttccactattttttttattttggttaatattaattagcatgatgcatccaaataagaaatatgaagaagtgcctaatatagaactcaatcctatggacaagtttactctttctaatctaattcttggatatactccagtgactaatattacaagcagcatcatgcagaaagtgtctactgatcatctacctgatgtcataattactgaagaatatacaaatgaaaaagaaatgttaacatccagtctctctaagccgagcaactttgtaggtgtggttttcaaagactccatgtcctatgaacttcgtttttttcctgatatgattccagtatcttctatttatatggattcaagagctggctgttcaaaatcatgtgaggctgctcagtactggtcctcaggtttcacagttttacaagcatccatagatgctgccattatacagttgaagaccaatgtttctctttggaaggagctggagtcaactaaagctgttattatgggagaaactgctgttgtagaaatagatacctttccccgaggagtaattttaatatacctagttatagcattttcaccttttggatactttttggcaattcatatcgtagcagaaaaagaaaaaaaaataaaagaatttttaaagataatgggacttcatgatactgccttttggctttcctgggttcttctatatacaagtttaatttttcttatgtcccttcttatggcagtcattgcgacagcttctttgttatttcctcaaagtagcagcattgtgatatttctgctttttttcctttatggattatcatctgtattttttgctttaatgctgacacctctttttaaaaaatcaaaacatgtgggaatagttgaattttttgttactgtggcttttggatttattggccttatgataatcctcatagaaagttttcccaaatcgttagtgtggcttttcagtcctttctgtcactgtacttttgtgattggtattgcacaggtcatgcatttagaagattttaatgaaggtgcttcattttcaaatttgactgcaggcccatatcctctaattattacaattatcatgctcacacttaatagtatattctatgtcctcttggctgtctatcttgatcaagtcattccaggggaatttggcttacggagatcatctttatattttctgaagccttcatattggtcaaagagcaaaagaaattatgaggagttatcagagggcaatgttaatggaaatattagttttagtgaaattattgagccagtttcttcagaatttgtaggaaaagaagccataagaattagtggtattcagaagacatacagaaagaagggtgaaaatgtggaggctttgagaaatttgtcatttgacatatatgagggtcagattactgccttacttggccacagtggaacaggaaagagtacattgatgaatattctttgtggactctgcccaccttctgatgggtttgcatctatatatggacacagagtctcagaaatagatgaaatgtttgaagcaagaaaaatgattggcatttgtccacagttagatatacactttgatgttttgacagtagaagaaaatttatcaattttggcttcaatcaaagggataccagccaacaatataatacaagaagtgcagaaggttttactagatttagacatgcagactatcaaagataaccaagctaaaaaattaagtggtggtcaaaaaagaaagctgtcattaggaattgctgttcttgggaacccaaagatactgctgctagatgaaccaacagctggaatggacccctgttctcgacatattgtatggaatcttttaaaatacagaaaagccaatcgggtgacagtgttcagtactcatttcatggatgaagctgacattcttgcagataggaaagctgtgatatcacaaggaatgctgaaatgtgttggttcttcaatgttcctcaaaagtaaatgggggatcggctaccgcctgagcatgtacatagacaaatattgtgccacagaatctctttcttcactggttaaacaacatatacctggagctactttattacaacagaatgaccaacaacttgtgtatagcttgcctttcaaggacatggacaaattttcaggtttgttttctgccctagacagtcattcaaatttgggtgtcatttcttatggtgtttccatgacgactttggaagacgtatttttaaagctagaagttgaagcagaaattgaccaagcagattatagtgtatttactcagcagccactggaggaagaaatggattcaaaatcttttgatgaaatggaacagagcttacttattctttctgaaaccaaggctgctctagtgagcaccatgagcctttggaaacaacagatgtatacaatagcaaagtttcatttctttaccttgaaacgtgaaagtaaatcagtgagatcagtgttgcttctgcttttaatttttttcacagttcagatttttatgtttttggttcatcactcttttaaaaatgctgtggttcccatcaaacttgttccagacttatattttctaaaacctggagacaaaccacataaatacaaaacaagtctgcttcttcaaaattctgctgcagactcagatatcagtgatcttattagctttttcacaagccagaacataatggtgacgatgattaatgacagtgactatgtatccgtggctccccatagtgcggctttaaatgtgatgcattcagaaaaggactatgtttttgcagctgttttcaacagtactatggtttattctttacctatattagtgaatatcattagtaactactatctttatcatttaaatgtgactgaaaccatccagatctggagtaccccattctttcaagaaattactgatatagtttttaaaattgagctgtattttcaagcagctttgcttggaatcattgttactgcaatgccaccttactttgccatggaaaatgcagagaatcataagatcaaagcttatactcaacttaaactttcaggtcttttgccatctgcatattggattggacaagctgttgttgatatccccttattttttatcattcttattttgatgctaggaagcttattggcatttcattatggattatatttttatactgtaaagttccttgctgtggttttttgccttattggttatgttccatcagttattctgttcacttatattgcttctttcacctttaagaaaattttaaataccaaagaattttggtcatttatctattctgtggcagcgttggcttgtattgcaatcactgaaataactttctttatgggatacacaattgcaactattcttcattatgccttttgtatcatcattccaatctatccacttctaggttgcctgatttctttcataaagatttcttggaagaatgtacgaaaaaatgtggacacctataatccatgggataggctttcagtagctgttatatcgccttacctgcagtgtgtactgtggattttcctcttacaatactatgagaaaaaatatggaggcagatcaataagaaaagatccctttttcagaaacctttcaacgaagtctaaaaataggaagcttccagaaccaccagacaatgaggatgaagatgaagatgtcaaagctgaaagactaaaggtcaaagagctgatgggttgccagtgttgtgaggagaaaccatccattatggtcagcaatttgcataaagaatatgatgacaagaaagattttcttctttcaagaaaagtaaagaaagtggcaactaaatacatctctttctgtgtgaaaaaaggagagatcttaggactattgggtccaaatggtgctggcaaaagcacaattattaatattctggttggtgatattgaaccaacttcaggccaggtatttttaggagattattcttcagagacaagtgaagatgatgattcactgaagtgtatgggttactgtcctcagataaaccctttgtggccagatactacattgcaggaacattttgaaatttatggagctgtcaaaggaatgagtgcaagtgacatgaaagaagtcataagtcgaataacacatgcacttgatttaaaagaacatcttcagaagactgtaaagaaactacctgcaggaatcaaacgaaagttgtgttttgctctaagtatgctagggaatcctcagattactttgctagatgaaccatctacaggtatggatcccaaagccaaacagcacatgtggcgagcaattcgaactgcatttaaaaacagaaagcgggctgctattctgaccactcactatatggaggaggcagaggctgtctgtgatcgagtagctatcatggtgtctgggcagttaagatgtatcggaacagtacaacatctaaagagtaaatttggaaaaggctactttttggaaattaaattgaaggactggatagaaaacctagaagtagaccgccttcaaagagaaattcagtatattttcccaaatgcaagccgtcaggaaagtttttcttctattttggcttataaaattcctaaggaagatgttcagtccctttcacaatctttttttaagctggaagaagctaaacatgcttttgccattgaagaatatagcttttctcaagcaacattggaacaggtttttgtagaactcactaaagaacaagaggaggaagataatagttgtggaactttaaacagcacactttggtgggaacgaacacaagaagatagagtagtattttgaatttgtattgttcggtctgcttactgggacttctttctttttcacttaattttaactttggtttaaaaagttttttattggaatggtaactggagaaccaagaacgcacttgaaatttttctaagctccttaattgaaatgctgtggttgtgtgttttgcttttctttaaataaaacgtatgtataattaagtgaagctgcatgtttgtattgaagtatattgaactatatagtttgtatgtcatctttttcaccattcagaaacagtgcttctgaatttgtgatttaaaggaattgtaatagaatagttttatttttaagttatctttaagtttatgccatcttcttaaataagtacgtaatgttccaatctaaataaaaaactaattcataactaatgcatagaaaagatacataaagcaatgtgaaagtttcttgcttctcctttttaatttctaaaaaagccactttgaatggaagttgtcatccgtaaaagctgaagtgtaagcactaggaaatctcaatatagagatttgaggaaagttatatccactaggtggcagtcattgatcataataagtgaaatgagcccttgttctagtacatgattttaggcttaggtaattaggtatgtgaaattacatttctttaatttaaagtaaaattcagaaggttttagttattataattaaaggaagactgtgtgtagaatcttacgtaatagtctgattctttgactctgtggctagaatgacagttatctatggaggtggtagaattaagccataccttttccttcatcactcttggaacatataaattttttgtcatcttccttgcaaagggcacatttaattttgttcttgaataaaatattttattgggtatttgtttttattggtaaactttagtgaatctcttctataaaattgtaagtagatcagtgtgtagatttatttagtaacttacctcattgactttggaacatggtaggatatgaataaactctttcaagggttaaattaagaattgtaagtgcagtgcgcctatttctttttaataagaaccagaatttcatttttgatagagttaaaggcatggctaatattttcttagaaatacttccttgtacaacccatgtattggctcaaggtataaaatagtgtaaataatgctagttgacattacatttcaaccaaatgaaagtattaacttcataaaacaaatatattgagagtgtgattattgtattagacaacaacaacagcaatgacagaaggatttggtactgaattactttaaataagcaaaacctttcagtggcattattcattctttaatgtaggcaaaatttaatgaacttttagctttattgtgtaataagacatctgtgattttaggctctagcagtggatttaaaagtgttctttctcggtacaaagtacgtggctgatattttcccccattgctgggggcagttgctatacactttcctaaagtatatataatgttcacataaatacccagggacctcttttttgggatgtgcttttgtaattatgtgtaaccttgaatacttaagtttagtaaaagcaacaaaattatatctatagtttactaaggcagtcacgaaaaagcatagttttttttagaacctgaccatcctaagaaagttatgtcatctgaagatagagcatgactaatgaagaaaattacctgcttttgcacgtagatttggtaactttcactttacatttgtgaatgtgtaattggtgcaaagtaaattttttttcctgcaaagtgaaagttgagtagtcacaatcatgttatttattttgttcatttagttactttgcttttaatgtatatgaatacatgctcttgtaaacaattttaaaagacattcaaatttttttttagtttttatatactcagaatatattttggttgttaaattaaattatgttccctttttcacagtaacaaaatctgactcaggagaaatataacttaattcttaggaaaacaagggtaagtgagctggaaagcaaaggaggcaaaaagtgaaatatatttatttacagtgtacagttcatgtttatgaacatactaattttaaaatgtcttaaattactgatctcaaaacttttttctatgtcagtacagataaataaataaatatacatattaggcaaaagcaacatcaccaaccttatatttcccattcatggtcaaattttcaaaggaaagtaaaagctgagctttactgagtgagtgtttactgactaataaggcaagaaaaaacatgatgagtgtactttacatcttacttttgtgggctcttaatttttttctctagtttgttttcagtaaagacagtgggttttctttaaaataatttttttcttttaaatttgcacaaattatcttaggtcagtattttggttttaatcattaaaacatttttagagtaatgtaatttaacaaatattttaagtgattatgtttccagaaatggattctttggagagaactcggatgactatcagttttggccctgtaagatcgtggagatctgtaagatagatacttatataacttacataaaatatatataatatattacttatataacttatataactagctattattttatataactaactataatatgacaaatcctttgctagtagtactaacaacgttttataggagcacaattaattttacttaggataagtgttgttattattgtttttattgttgttctgttagttactcaaaacttcattctaattgtgccctgagtttgttaaaataccatactgtatttttgtgtaacatgtaaataggcattaatttttgagaaatagaaatgtttatccttaatgtatttttaatttgctaacattgattttttattttctttcctgaaatagcttatttcctaaaatgaaagaatttattctcagatgaataatttttatatcagctattcttatcaggtaaaagtttaattattttttatttataatatatgtaagcaattctcaatgctgctctttaagaaaaataaatatgattatattaataataagc

SEQ ID NO: 249141 - DNA, 4929 bp, Artificial Sequence
  derived and/or modified sequence
atgagcaccgccatcagagaggtgggcgtgtggagacagaccagaaccctgctgctgaagaactacctgatcaagtgcagaaccaagaagagcagcgtgcaggagatcctgttccccctgttcttcctgttctggctgatcctgatcagcatgatgcaccccaacaagaagtacgaggaggtgcccaacatcgagctgaaccccatggacaagttcaccctgagcaacctgatcctgggctacacccccgtgaccaacatcaccagcagcatcatgcagaaggtgagcaccgaccacctgcccgacgtgatcatcaccgaggagtacaccaacgagaaggagatgctgaccagcagcctgagcaagcccagcaacttcgtgggcgtggtgttcaaggacagcatgagctacgagctgagattcttccccgacatgatccccgtgagcagcatctacatggacagcagagccggctgcagcaagagctgcgaggccgcccagtactggagcagcggcttcaccgtgctgcaggccagcatcgacgccgccatcatccagctgaagaccaacgtgagcctgtggaaggagctggagagcaccaaggccgtgatcatgggcgagaccgccgtggtggagatcgacaccttccccagaggcgtgatcctgatctacctggtgatcgccttcagccccttcggctacttcctggccatccacatcgtggccgagaaggagaagaagatcaaggagttcctgaagatcatgggcctgcacgacaccgccttctggctgagctgggtgctgctgtacaccagcctgatcttcctgatgagcctgctgatggccgtgatcgccaccgccagcctgctgttcccccagagcagcagcatcgtgatcttcctgctgttcttcctgtacggcctgagcagcgtgttcttcgccctgatgctgacccccctgttcaagaagagcaagcacgtgggcatcgtggagttcttcgtgaccgtggccttcggcttcatcggcctgatgatcatcctgatcgagagcttccccaagagcctggtgtggctgttcagccccttctgccactgcaccttcgtgatcggcatcgcccaggtgatgcacctggaggacttcaacgagggcgccagcttcagcaacctgaccgccggcccctaccccctgatcatcaccatcatcatgctgaccctgaacagcatcttctacgtgctgctggccgtgtacctggaccaggtgatccccggcgagttcggcctgagaagaagcagcctgtacttcctgaagcccagctactggagcaagagcaagagaaactacgaggagctgagcgagggcaacgtgaacggcaacatcagcttcagcgagatcatcgagcccgtgagcagcgagttcgtgggcaaggaggccatcagaatcagcggcatccagaagacctacagaaagaagggcgagaacgtggaggccctgagaaacctgagcttcgacatctacgagggccagatcaccgccctgctgggccacagcggcaccggcaagagcaccctgatgaacatcctgtgcggcctgtgcccccccagcgacggcttcgccagcatctacggccacagagtgagcgagatcgacgagatgttcgaggccagaaagatgatcggcatctgcccccagctggacatccacttcgacgtgctgaccgtggaggagaacctgagcatcctggccagcatcaagggcatccccgccaacaacatcatccaggaggtgcagaaggtgctgctggacctggacatgcagaccatcaaggacaaccaggccaagaagctgagcggcggccagaagagaaagctgagcctgggcatcgccgtgctgggcaaccccaagatcctgctgctggacgagcccaccgccggcatggacccctgcagcagacacatcgtgtggaacctgctgaagtacagaaaggccaacagagtgaccgtgttcagcacccacttcatggacgaggccgacatcctggccgacagaaaggccgtgatcagccagggcatgctgaagtgcgtgggcagcagcatgttcctgaagagcaagtggggcatcggctacagactgagcatgtacatcgacaagtactgcgccaccgagagcctgagcagcctggtgaagcagcacatccccggcgccaccctgctgcagcagaacgaccagcagctggtgtacagcctgcccttcaaggacatggacaagttcagcggcctgttcagcgccctggacagccacagcaacctgggcgtgatcagctacggcgtgagcatgaccaccctggaggacgtgttcctgaagctggaggtggaggccgagatcgaccaggccgactacagcgtgttcacccagcagcccctggaggaggagatggacagcaagagcttcgacgagatggagcagagcctgctgatcctgagcgagaccaaggccgccctggtgagcaccatgagcctgtggaagcagcagatgtacaccatcgccaagttccacttcttcaccctgaagagagagagcaagagcgtgagaagcgtgctgctgctgctgctgatcttcttcaccgtgcagatcttcatgttcctggtgcaccacagcttcaagaacgccgtggtgcccatcaagctggtgcccgacctgtacttcctgaagcccggcgacaagccccacaagtacaagaccagcctgctgctgcagaacagcgccgacagcgacatcagcgacctgatcagcttcttcaccagccagaacatcatggtgaccatgatcaacgacagcgactacgtgagcgtggccccccacagcgccgccctgaacgtgatgcacagcgagaaggactacgtgttcgccgccgtgttcaacagcaccatggtgtacagcctgcccatcctggtgaacatcatcagcaactactacctgtaccacctgaacgtgaccgagaccatccagatctggagcacccccttcttccaggagatcaccgacatcgtgttcaagatcgagctgtacttccaggccgccctgctgggcatcatcgtgaccgccatgcccccctacttcgccatggagaacgccgagaaccacaagatcaaggcctacacccagctgaagctgagcggcctgctgcccagcgcctactggatcggccaggccgtggtggacatccccctgttcttcatcatcctgatcctgatgctgggcagcctgctggccttccactacggcctgtacttctacaccgtgaagttcctggccgtggtgttctgcctgatcggctacgtgcccagcgtgatcctgttcacctacatcgccagcttcaccttcaagaagatcctgaacaccaaggagttctggagcttcatctacagcgtggccgccctggcctgcatcgccatcaccgagatcaccttcttcatgggctacaccatcgccaccatcctgcactacgccttctgcatcatcatccccatctaccccctgctgggctgcctgatcagcttcatcaagatcagctggaagaacgtgagaaagaacgtggacacctacaacccctgggacagactgagcgtggccgtgatcagcccctacctgcagtgcgtgctgtggatcttcctgctgcagtactacgagaagaagtacggcggcagaagcatcagaaaggaccccttcttcagaaacctgagcaccaagagcaagaacagaaagctgcccgagccccccgacaacgaggacgaggacgaggacgtgaaggccgagagactgaaggtgaaggagctgatgggctgccagtgctgcgaggagaagcccagcatcatggtgagcaacctgcacaaggagtacgacgacaagaaggacttcctgctgagcagaaaggtgaagaaggtggccaccaagtacatcagcttctgcgtgaagaagggcgagatcctgggcctgctgggccccaacggcgccggcaagagcaccatcatcaacatcctggtgggcgacatcgagcccaccagcggccaggtgttcctgggcgactacagcagcgagaccagcgaggacgacgacagcctgaagtgcatgggctactgcccccagatcaaccccctgtggcccgacaccaccctgcaggagcacttcgagatctacggcgccgtgaagggcatgagcgccagcgacatgaaggaggtgatcagcagaatcacccacgccctggacctgaaggagcacctgcagaagaccgtgaagaagctgcccgccggcatcaagagaaagctgtgcttcgccctgagcatgctgggcaacccccagatcaccctgctggacgagcccagcaccggcatggaccccaaggccaagcagcacatgtggagagccatcagaaccgccttcaagaacagaaagagagccgccatcctgaccacccactacatggaggaggccgaggccgtgtgcgacagagtggccatcatggtgagcggccagctgagatgcatcggcaccgtgcagcacctgaagagcaagttcggcaagggctacttcctggagatcaagctgaaggactggatcgagaacctggaggtggacagactgcagagagagatccagtacatcttccccaacgccagcagacaggagagcttcagcagcatcctggcctacaagatccccaaggaggacgtgcagagcctgagccagagcttcttcaagctggaggaggccaagcacgccttcgccatcgaggagtacagcttcagccaggccaccctggagcaggtgttcgtggagctgaccaaggagcaggaggaggaggacaacagctgcggcaccctgaacagcaccctgtggtgggagagaacccaggaggacagagtggtgttctag

SEQ ID NO: 249142 - DNA, 4932 bp, Artificial Sequence
  derived and/or modified sequence
atgagcaccgccatcagagaggtgggcgtgtggagacagaccagaaccctgctgctgaagaactacctgatcaagtgcagaaccaagaagagcagcgtgcaggagatcctgttccccctgttcttcctgttctggctgatcctgatcagcatgatgcaccccaacaagaagtacgaggaggtgcccaacatcgagctgaaccccatggacaagttcaccctgagcaacctgatcctgggctacacccccgtgaccaacatcaccagcagcatcatgcagaaggtgagcaccgaccacctgcccgacgtgatcatcaccgaggagtacaccaacgagaaggagatgctgaccagcagcctgagcaagcccagcaacttcgtgggcgtggtgttcaaggacagcatgagctacgagctgagattcttccccgacatgatccccgtgagcagcatctacatggacagcagagccggctgcagcaagagctgcgaggccgcccagtactggagcagcggcttcaccgtgctgcaggccagcatcgacgccgccatcatccagctgaagaccaacgtgagcctgtggaaggagctggagagcaccaaggccgtgatcatgggcgagaccgccgtggtggagatcgacaccttccccagaggcgtgatcctgatctacctggtgatcgccttcagccccttcggctacttcctggccatccacatcgtggccgagaaggagaagaagatcaaggagttcctgaagatcatgggcctgcacgacaccgccttctggctgagctgggtgctgctgtacaccagcctgatcttcctgatgagcctgctgatggccgtgatcgccaccgccagcctgctgttcccccagagcagcagcatcgtgatcttcctgctgttcttcctgtacggcctgagcagcgtgttcttcgccctgatgctgacccccctgttcaagaagagcaagcacgtgggcatcgtggagttcttcgtgaccgtggccttcggcttcatcggcctgatgatcatcctgatcgagagcttccccaagagcctggtgtggctgttcagccccttctgccactgcaccttcgtgatcggcatcgcccaggtgatgcacctggaggacttcaacgagggcgccagcttcagcaacctgaccgccggcccctaccccctgatcatcaccatcatcatgctgaccctgaacagcatcttctacgtgctgctggccgtgtacctggaccaggtgatccccggcgagttcggcctgagaagaagcagcctgtacttcctgaagcccagctactggagcaagagcaagagaaactacgaggagctgagcgagggcaacgtgaacggcaacatcagcttcagcgagatcatcgagcccgtgagcagcgagttcgtgggcaaggaggccatcagaatcagcggcatccagaagacctacagaaagaagggcgagaacgtggaggccctgagaaacctgagcttcgacatctacgagggccagatcaccgccctgctgggccacagcggcaccggcaagagcaccctgatgaacatcctgtgcggcctgtgcccccccagcgacggcttcgccagcatctacggccacagagtgagcgagatcgacgagatgttcgaggccagaaagatgatcggcatctgcccccagctggacatccacttcgacgtgctgaccgtggaggagaacctgagcatcctggccagcatcaagggcatccccgccaacaacatcatccaggaggtgcagaaggtgctgctggacctggacatgcagaccatcaaggacaaccaggccaagaagctgagcggcggccagaagagaaagctgagcctgggcatcgccgtgctgggcaaccccaagatcctgctgctggacgagcccaccgccggcatggacccctgcagcagacacatcgtgtggaacctgctgaagtacagaaaggccaacagagtgaccgtgttcagcacccacttcatggacgaggccgacatcctggccgacagaaaggccgtgatcagccagggcatgctgaagtgcgtgggcagcagcatgttcctgaagagcaagtggggcatcggctacagactgagcatgtacatcgacaagtactgcgccaccgagagcctgagcagcctggtgaagcagcacatccccggcgccaccctgctgcagcagaacgaccagcagctggtgtacagcctgcccttcaaggacatggacaagttcagcggcctgttcagcgccctggacagccacagcaacctgggcgtgatcagctacggcgtgagcatgaccaccctggaggacgtgttcctgaagctggaggtggaggccgagatcgaccaggccgactacagcgtgttcacccagcagcccctggaggaggagatggacagcaagagcttcgacgagatggagcagagcctgctgatcctgagcgagaccaaggccgccctggtgagcaccatgagcctgtggaagcagcagatgtacaccatcgccaagttccacttcttcaccctgaagagagagagcaagagcgtgagaagcgtgctgctgctgctgctgatcttcttcaccgtgcagatcttcatgttcctggtgcaccacagcttcaagaacgccgtggtgcccatcaagctggtgcccgacctgtacttcctgaagcccggcgacaagccccacaagtacaagaccagcctgctgctgcagaacagcgccgccgacagcgacatcagcgacctgatcagcttcttcaccagccagaacatcatggtgaccatgatcaacgacagcgactacgtgagcgtggccccccacagcgccgccctgaacgtgatgcacagcgagaaggactacgtgttcgccgccgtgttcaacagcaccatggtgtacagcctgcccatcctggtgaacatcatcagcaactactacctgtaccacctgaacgtgaccgagaccatccagatctggagcacccccttcttccaggagatcaccgacatcgtgttcaagatcgagctgtacttccaggccgccctgctgggcatcatcgtgaccgccatgcccccctacttcgccatggagaacgccgagaaccacaagatcaaggcctacacccagctgaagctgagcggcctgctgcccagcgcctactggatcggccaggccgtggtggacatccccctgttcttcatcatcctgatcctgatgctgggcagcctgctggccttccactacggcctgtacttctacaccgtgaagttcctggccgtggtgttctgcctgatcggctacgtgcccagcgtgatcctgttcacctacatcgccagcttcaccttcaagaagatcctgaacaccaaggagttctggagcttcatctacagcgtggccgccctggcctgcatcgccatcaccgagatcaccttcttcatgggctacaccatcgccaccatcctgcactacgccttctgcatcatcatccccatctaccccctgctgggctgcctgatcagcttcatcaagatcagctggaagaacgtgagaaagaacgtggacacctacaacccctgggacagactgagcgtggccgtgatcagcccctacctgcagtgcgtgctgtggatcttcctgctgcagtactacgagaagaagtacggcggcagaagcatcagaaaggaccccttcttcagaaacctgagcaccaagagcaagaacagaaagctgcccgagccccccgacaacgaggacgaggacgaggacgtgaaggccgagagactgaaggtgaaggagctgatgggctgccagtgctgcgaggagaagcccagcatcatggtgagcaacctgcacaaggagtacgacgacaagaaggacttcctgctgagcagaaaggtgaagaaggtggccaccaagtacatcagcttctgcgtgaagaagggcgagatcctgggcctgctgggccccaacggcgccggcaagagcaccatcatcaacatcctggtgggcgacatcgagcccaccagcggccaggtgttcctgggcgactacagcagcgagaccagcgaggacgacgacagcctgaagtgcatgggctactgcccccagatcaaccccctgtggcccgacaccaccctgcaggagcacttcgagatctacggcgccgtgaagggcatgagcgccagcgacatgaaggaggtgatcagcagaatcacccacgccctggacctgaaggagcacctgcagaagaccgtgaagaagctgcccgccggcatcaagagaaagctgtgcttcgccctgagcatgctgggcaacccccagatcaccctgctggacgagcccagcaccggcatggaccccaaggccaagcagcacatgtggagagccatcagaaccgccttcaagaacagaaagagagccgccatcctgaccacccactacatggaggaggccgaggccgtgtgcgacagagtggccatcatggtgagcggccagctgagatgcatcggcaccgtgcagcacctgaagagcaagttcggcaagggctacttcctggagatcaagctgaaggactggatcgagaacctggaggtggacagactgcagagagagatccagtacatcttccccaacgccagcagacaggagagcttcagcagcatcctggcctacaagatccccaaggaggacgtgcagagcctgagccagagcttcttcaagctggaggaggccaagcacgccttcgccatcgaggagtacagcttcagccaggccaccctggagcaggtgttcgtggagctgaccaaggagcaggaggaggaggacaacagctgcggcaccctgaacagcaccctgtggtgggagagaacccaggaggacagagtggtgttctag

SEQ ID NO: 249143 - protein, 194 aa, Artificial Sequence
  derived and/or modified sequence
MGAAAWARPLSVSFLLLLLPLPGMPAGSWDPAGYLLYCPCMGRFGNQADHFLGSLAFAKLLNRTLAVPPWIEYQHHKPPFTNLHVSYQKYFKLEPLQAYHRVISLEDFMEKLAPTHWPPEKRVAYCFEVAAQRSPDKKTCPMKEGNPFGPFWDQFHVSFNKSELFTGISFSASYREQWSQRRENHSCVTLLFPR

SEQ ID NO: 249144 - DNA, 585 bp, Artificial Sequence
  derived and/or modified sequence
atgggcgccgccgcctgggccagacccctgagcgtgagcttcctgctgctgctgctgcccctgcccggcatgcccgccggcagctgggaccccgccggctacctgctgtactgcccctgcatgggcagattcggcaaccaggccgaccacttcctgggcagcctggccttcgccaagctgctgaacagaaccctggccgtgcccccctggatcgagtaccagcaccacaagccccccttcaccaacctgcacgtgagctaccagaagtacttcaagctggagcccctgcaggcctaccacagagtgatcagcctggaggacttcatggagaagctggcccccacccactggccccccgagaagagagtggcctactgcttcgaggtggccgcccagagaagccccgacaagaagacctgccccatgaaggagggcaaccccttcggccccttctgggaccagttccacgtgagcttcaacaagagcgagctgttcaccggcatcagcttcagcgccagctacagagagcagtggagccagagaagagagaaccacagctgcgtgaccctgctgttccccagatag

SEQ ID NO: 249145 - DNA, 585 bp, Artificial Sequence
  derived and/or modified sequence
atgggcgccgcagcttgggcccggcccctgtccgtgtcttttctgctcctgctgttacccctccccggaatgccagccggcagttgggacccggcgggctacctgctttactgtccctgtatgggcaggttcggcaatcaggctgaccactttttagggtctttagcctttgcaaagcttttgaatagaacattggccgttcccccctggattgagtaccagcatcacaaacccccctttacaaatctgcatgttagttaccagaagtattttaaactggagccactccaggcttatcatagagtcatttcactggaggacttcatggagaagttggctcctacacactggccgccagaaaaacgcgttgcctactgcttcgaagtcgcggcccagcgctccccggataaaaagacctgtcctatgaaagaaggaaacccgttcggtcctttttgggatcagttccacgtgtcttttaacaagagcgaactgttcacaggtatttccttttcggctagttatagggagcagtggtcacagcgccgcgaaaatcactcctgcgtaaccctcctgtttcctagatag

SEQ ID NO: 249146 - DNA, 585 bp, Artificial Sequence
  derived and/or modified sequence
atgggcgccgccgcctgggcccggcccctgtctgtgtccttcctgctgctgctgctgcccctgcccggcatgcctgctggctcctgggaccctgctggctacctgctgtactgcccctgcatgggccgcttcggcaaccaggccgaccacttcctgggcagcctggcctttgccaagctgctgaacagaaccctggccgtgcccccctggattgagtaccagcaccacaagccacccttcaccaacctgcacgtgtcctaccagaagtacttcaagctggagcccctgcaggcctaccacagggtcatcagcctggaggacttcatggagaagctggcccccacccactggcccccagagaagagggtggcctactgctttgaggtggccgcccagaggagcccagacaagaagacctgccccatgaaggagggcaaccccttcggccccttctgggaccagttccacgtgtccttcaacaagtctgagctgttcaccggcatctccttcagcgccagctaccgggagcagtggagccagaggcgggagaaccacagctgtgtgaccctgctcttccccaggtag

SEQ ID NO: 249147 - DNA, 585 bp, Artificial Sequence
  derived and/or modified sequence
atgggcgccgccgcctgggcccggcccctgagcgtgagcttcctgctgttgctgctgcctttgcctggtatgcctgccgggagctgggacccagccggctacctgctgtactgtccctgcatggggagattcggaaatcaggctgatcactttttgggttcactggcatttgccaagctgctcaacaggaccctggcggtcccaccctggatagaataccagcaccataagccacccttcactaacctccacgtttcctaccagaagtactttaagttggaacctctgcaggcctatcaccgtgtcatcagtttagaagactttatggagaagctggccccgacgcactggccacctgaaaagagagtggcctattgcttcgaagttgccgcacaacgttctccggacaaaaaaacttgtcctatgaaagagggaaatccattcggtcctttttgggaccagtttcatgttagctttaacaagagtgagctgttcacaggcatctctttctctgcgtcctatcgcgaacaatggagccagaggcgcgagaaccactcttgtgtcaccctcttatttccccggtag

SEQ ID NO: 249148 - DNA, 1507 bp, Artificial Sequence
  derived and/or modified sequence
cttccctccccgactgtgcgccgcggctggctcgggttcccgggccgacatgggcgccgccgcgtgggcacggccgctgagcgtgtctttcctgctgctgcttctgccgctcccggggatgcctgcgggctcctgggacccggccggttacctgctctactgcccctgcatggggcgctttgggaaccaggccgatcacttcttgggctctctggcatttgcaaagctgctaaaccgtaccttggctgtccctccttggattgagtaccagcatcacaagcctcctttcaccaacctccatgtgtcctaccagaagtacttcaagctggagcccctccaggcttaccatcgggtcatcagcttggaggatttcatggagaagctggcacccacccactggccccctgagaagcgggtggcatactgctttgaggtggcagcccagcgaagcccagataagaagacgtgccccatgaaggaaggaaacccctttggcccattctgggatcagtttcatgtgagtttcaacaagtcggagctttttacaggcatttccttcagtgcttcctacagagaacaatggagccagaggcgtgagaatcactcctgtgttaccttactcttcccaaggtgaaactggaagcagcttctagagaacagcttcaggtgcagaccgagaaatgacgtcatcctgataattattggacgtgtttattaattgcaccccattagcccctgtttttaaaaaatataggttagcaggacgtgggcacaggccgtgaaacatttatagggcgcctgtcacgtgtgagacatagtaatcagaggccaatggtgatgtgtgaaaatgaggatgaccagctctggttttctaggagctatggtctcataatgacaataatcagcatagtgtacttgtccttaatgttatagcatggcaggaaagaccatgggcttagaaggcagacattggttaggaggtgcagggaacatactaattcatgtgcggtcaaagcacttggcatttaatagggcaaaggtaaacagatgtagagaaatgagtctcatgcctgtaatcccagcactttgggaggccaaggtgggtggatcacttgagcctaagagatcaaggctgcagtgagccatgatggtacccctgcactccagcccaggttacagagcaagggcctgtctcagcaaaacaaaacaagcacaggccaaggagtgagatagccagcgctgatggtatctgcctcgtagtgcatgaagtgcatgtcatacactaagcagccagccagtgttggctgtcagtgttattactcacatgctttattttatttaagactttgagatagttcatgaagtgggtattattatcaatttccattttataggtgaggaaactgagcccagtgaagttaaataacttcccaaggtcattgagctgttgagtggacagctcaggtctgtttgtaaatctttaataaataacaacagctaagattca

SEQ ID NO: 249149 - DNA, 585 bp, Artificial Sequence
  derived and/or modified sequence
atgggtgccgctgcctgggccagacccttaagcgtttcatttctccttctgttactccctctgcccggtatgccagccggatcctgggatccagcagggtaccttctttactgtccatgtatggggcgattcggaaatcaggccgatcactttctcggatctctggctttcgccaaactgcttaatagaaccctcgccgtgccaccatggatcgagtaccagcaccacaagccgccattcactaatctgcatgtcagctaccagaaatactttaagcttgagcccctccaggcataccaccgagtaatcagcctggaggactttatggagaaactagcccctactcattggcccccagagaagagagtcgcctattgcttcgaggttgccgctcagcgctcacctgataagaaaacatgcccgatgaaagagggaaatccattcggaccattctgggaccaatttcacgtgagtttcaacaagagtgagttgttcactggcatctcattctctgcctcttacagggaacagtggtcgcagcgtcgtgagaatcatagctgcgtcacgcttctgtttccacggtag

SEQ ID NO: 249150 - protein, 478 aa, Artificial Sequence [sequence omitted]

SEQ ID NO: 249151 - protein, 129 aa, Artificial Sequence
  derived and/or modified sequence
MYRQRFLYSLYRHTHWVRCAKFSPDGRLIVSCSEDKTIKIWDTTNKQCVNNFSDSVGDLSLLFHFQKVESYLHQEVQTHRSYYGGLTLMNCIVKVLPKEISKDYILIHHHIFLISTQEHHIPMRKKLRL

SEQ ID NO: 249152 - protein, 228 aa, Artificial Sequence
  derived and/or modified sequence
MYRQRFLYSLYRHTHWVRCAKFSPDGRLIVSCSEDKTIKIWDTTNKQCVNNFSDSVGFANFVDFNPSGTCIASAGSDQTVKVWDVRVNKLLQHYQVHSGGVNCISFHPSGNYLITASSDGTLKILDLLEGRLIYTLQGHTGPVFTVSFSKGGELFASGGADTQVLLWRTNFDELHCKGLTKRNLKRLHFDSPPHLLDIYPRTPHPHEEKVETVEDFFLHLLRLIQSLR

SEQ ID NO: 249153 - DNA, 1437 bp, Artificial Sequence
  derived and/or modified sequence
atggcgagcgctaccgaggacccagtgctggagcgctacttcaagggccataaggcagcaataacatcccttgatctgagtcctaacggcaagcaactggccactgcttcctgggacacttttctgatgctctggaactttaagccacacgcgagggcttaccgctacgtgggtcataaagacgtggtgacctccgtgcagtttagcccacacgggaacttactggccagcgcaagccgagaccgtaccgtgcggttgtggatcccagataaaaggggtaaattcagcgagttcaaagctcacaccgctcccgtcagatcagtggatttttctgcagatggccagtttcttgcaacggccagcgaagacaagagtattaaagtgtggagcatgtataggcagcggtttttgtactctctctacagacacacacattgggtgaggtgtgccaagttctctcctgacggacgcctgattgtctcatgctcggaggataaaaccataaaaatctgggacactaccaataagcagtgtgtgaataacttttcagattcagtggggtttgccaactttgttgatttcaatccgagcgggacctgtatcgcatctgccggcagcgatcagacagtcaaggtctgggacgtacgagtcaataagctgctgcagcattatcaggtccattccgggggcgtgaattgcatttcttttcaccccagcggaaattacttaataactgctagcagtgatggaaccctcaaaattctcgatctgctcgaaggtagactaatctacactttgcagggccacactgggcctgtctttaccgtgtcatttagcaagggcggggaactgttcgctagcgggggagctgacactcaggtgcttctgtggcgcactaattttgacgaactgcattgcaagggtctaactaagagaaatctcaaaagacttcacttcgattctcctccccacctgttggatatataccccagaacccctcatccacacgaagagaaagttgagactgtcgagattaaccccaagctggaggtcatcgatttgcaaatttctacccctcctgtgatggacatactgagttttgattcaactaccactactgaaacatcaggtaggacactaccggacaagggcgaagaggcgtgtggatacttcctaaatccatccctaatgtccccagaatgtctcccaaccaccactaaaaaaaagactgaagatatgtccgacctcccttgtgaatctcagaggtcaattcccctagccgtgacagacgccctggaacatattatggaacaattgaatgtgctgactcagacggtaagcatcctggagcagcggctcaccctgacagaggataagctgaaggattgcctggagaatcagcagaaactgttttctgctgtgcaacagaagagttag

SEQ ID NO: 249154 - DNA, 1437 bp, Artificial Sequence
  derived and/or modified sequence
atggccagcgccacagaggaccctgtgctggagcgctacttcaagggccacaaggccgccatcaccagcctggacctgagccccaacgggaagcagctggccacagcctcctgggacaccttcctgatgctgtggaacttcaagccccacgcccgggcctaccgctacgtgggccacaaggatgtggtgacctctgtgcagttcagcccccacggcaacctgctggccagcgccagccgggacagaacagtgcggctgtggatcccagacaagaggggcaagttcagcgagttcaaggcccacacagcccctgtgcgctctgtggacttcagcgcagatggccagttcctggccacagccagcgaggacaagagcatcaaggtgtggagcatgtaccggcagcgcttcctgtacagcctgtaccgccacacccactgggtgcgctgtgccaagttctccccagatggccgcctgattgtgtcctgcagcgaggacaagaccatcaagatctgggacaccaccaacaagcagtgtgtgaacaacttcagtgacagcgtgggctttgccaactttgtggacttcaaccccagcggcacctgcatcgccagcgctggcagtgaccagacagtgaaggtgtgggatgtgcgggtgaacaagctgctgcagcactaccaggtgcacagcggcggcgtgaactgcatctccttccaccccagcggcaactacctgatcacagccagcagtgatggcaccctgaagatcctggacctgctggagggccgcctcatctacaccctgcagggccacacaggccctgtgttcaccgtgtccttcagcaagggcggggagctgtttgccagcggcggcgctgacacccaggtgctgctgtggaggaccaactttgatgagctgcactgcaagggcctgaccaagaggaacctgaagaggctgcactttgacagccccccccacctgctggacatctaccccaggaccccccacccccatgaggagaaggtggagaccgtggagatcaaccccaagctggaggtgattgacctgcagatcagcaccccacctgtgatggacatcctgagctttgacagcaccaccaccacagagaccagcggccgcaccctgcctgacaagggggaggaggcctgtggctacttcctgaaccccagcctgatgagccctgagtgcctgcccaccaccaccaagaagaagacagaggacatgtctgacctgccctgtgagagccagaggagcatccccctggccgtgacagatgccctggagcacatcatggagcagctgaatgtgctgacccagacagtgtccatcctggagcagaggctgaccctgacagaggacaagctgaaggactgcctggagaaccagcagaagctgttctctgctgtgcagcagaagagctag

SEQ ID NO: 249155 - DNA, 1437 bp, Artificial Sequence
  derived and/or modified sequence
atggccagcgccaccgaggaccccgtgctggagcggtacttcaaggggcacaaggcggctataaccagcctggatctctccccaaacgggaagcaactagccaccgcctcctgggacacattcttgatgctgtggaatttcaagcctcacgcgcgggcctaccggtacgtcggacataaggacgtggttacatcagtacagttttcaccacatgggaacctactcgcctctgcaagcagagatcgcaccgtccgattgtggatccccgacaaaaggggtaagttctccgaattcaaagcacatactgcacccgttagaagcgtcgacttctccgcagatggacagttcttggccacagcctctgaagacaagtcgatcaaggtctggagcatgtaccggcagagattcctgtacagtctataccggcatacccattgggttagatgtgccaagttttctccagatggcaggcttatcgtgtcttgctctgaggacaaaacaatcaagatctgggacactaccaataagcaatgcgttaataatttcagcgacagcgtaggatttgccaatttcgtggactttaatcctagtggaacttgtattgccagtgccggctctgatcagaccgttaaggtctgggacgtgagagtgaacaagctgttacaacactatcaggtgcactcgggcggggtgaactgtatctcctttcatccgagcgggaactacctgataactgctagtagcgatggcaccctcaagatcctggatttactcgaggggcgactgatatacaccctgcagggtcatacgggacctgtgtttaccgtctcatttagtaaagggggcgaactgttcgcctcgggaggcgccgatacccaggtcctgctatggcgtacaaactttgacgaactccactgtaaaggccttacaaagaggaatcttaagcgcctgcacttcgattctcccccacacctgctggatatctacccccgcactccacacccccacgaagagaaggtggagaccgtggagattaatccaaaactcgaagtgatcgacctacagataagtactcctccagtcatggacatcttgtcgttcgacagcaccaccaccaccgaaaccagcggccggaccttgcctgacaagggggaagaggcttgtgggtacttcctgaacccgtccttaatgtcaccggagtgtctgccaacaaccaccaagaaaaagactgaggacatgtctgacttgccgtgcgagagccaacgatctatcccattagccgtgacagacgccctggagcatatcatggaacagcttaacgttctgacgcaaaccgtgtccatcctggagcagaggctcactcttacagaagacaagttgaaagattgtctagagaaccagcaaaaactgttctccgctgtgcagcagaagagctag

SEQ ID NO: 249156 - DNA, 1437 bp, Artificial Sequence
  derived and/or modified sequence
atggcgtccgcaactgaggacccagtactcgaacgatactttaaaggccataaagcagccatcacctctctcgacctctcccccaatggcaagcaactggccacagcaagctgggacacctttctgatgctgtggaacttcaaacctcacgcaagagcctatcggtatgttggccacaaagacgttgtcacctccgtgcagttttcaccacacgggaatcttctggcaagtgcctctagggaccggaccgtcaggctctggattccggacaagcgtggcaaattttctgaatttaaggcacacactgctcctgtcaggagcgttgatttcagtgccgacgggcagtttctcgccactgcatccgaggacaagtccatcaaagtctggtctatgtaccgacagcgattcttgtactctctgtatagacatactcactgggtgcggtgcgcgaaatttagtcccgacggacgtctgatcgtctcttgctctgaagataagactatcaaaatctgggatactacaaataaacagtgtgtgaacaactttagcgattccgtgggctttgccaattttgtggatttcaacccctccgggacctgcatcgcgtcagcgggaagtgaccagacggttaaggtctgggatgtacgggtcaacaagttgttgcagcactaccaggtgcactccggcggagtcaattgcatatctttccatcctagcggaaactacctgattacggcatccagtgacggaacccttaagattctggatctgctcgaggggcgtttgatctacacactgcaaggtcacaccggaccagtttttaccgtcagctttagtaaagggggtgagctgtttgcatccggaggcgctgatactcaggtactcttatggcgtactaacttcgatgagctccactgtaaaggcctgaccaagcggaacttaaagcgcctgcacttcgactcccctccacacttgcttgacatatatccccgtactcctcacccacacgaagaaaaggttgagaccgttgagatcaatccaaaactggaagttattgacctccagatctctacaccacccgtgatggacattttgtcgtttgattctacaaccacgaccgaaacttcaggacggaccctccctgataagggcgaagaagcctgtggatactttcttaaccctagcttaatgtctcctgagtgccttcccaccacaactaagaagaaaacggaggacatgtcagacttaccgtgcgagtcccagcgtagtatccccttggccgtcactgacgccctcgagcatattatggaacagctgaacgtgctgactcaaaccgtttcaatcctcgagcaacgtttgacattgaccgaggacaaattgaaggactgtctggagaaccaacagaagttgtttagcgctgttcagcagaaaagttag

SEQ ID NO: 249157 - DNA, 2038 bp, Artificial Sequence
  derived and/or modified sequence
aaaaaaaaaaaagtaccaaagccgaggcgcatcctcgcacctgcctgccttgggccagcgggcggggcccgggaacgtgcatttcaaaggggccgcggttcctgcgatgcgctggactctgggaagcgcgaacagagcgttttgcgggctctgcggggagagctggcgccggcgtctccctgtagcaggactgggcgccgcgcccgtgggtgggctgctgcccggccccgccgcccagccaagccgccgcctgggtggccattcccaagccggactccggggaagtggcagcgtggatcccagccgccagaattcgaggtctgcggcggctttcaaaacttgacaactttcctttccaggaggaccccgttctggagcgttatttcaaaggccacaaagctgcgatcacctccttggacctcagccccaacggcaagcaacttgctactgcttcttgggatacctttctcatgctatggaatttcaagccacatgctagagcttacagatatgtgggtcacaaggatgttgtaaccagcgtgcagttttctccacatggaaacttattggcgtctgcctcacgagacagaaccgtgagactctggattcctgataagagaggaaaattctcagaatttaaagctcatacagctccagttcgaagtgtagacttttcagctgatggccagtttctagctacagcttctgaagacaaatccataaaagtatggagcatgtatcgccagcgcttcctgtattccttgtatcgacatacacactgggtacgctgtgccaaattttcacccgatggaagactaattgtgtcatgtagtgaggataaaactattaaaatttgggataccacaaataagcaatgtgttaataacttctcagattccgttggatttgcaaattttgtggactttaaccctagtggtacatgcatagcttcagcaggttctgatcaaactgtgaaagtctgggatgtaagagtgaacaaattactacagcattaccaagttcacagcggtggagttaattgcatatcattccatccttcgggtaactatctcatcacagcttcttcagatggtacccttaagattctggacctcttagaaggaaggctcatctatacacttcaaggacatacgggacctgtctttactgtttcattttcaaaaggtggagagctatttgcatcaggaggtgcagacacacaggtcttattatggaggactaactttgatgaattgcattgtaaaggtcttaccaaaagaaatctcaaaagattacattttgattcaccaccacatcttcttgatatctacccaagaacaccacatccccatgaggaaaaagttgagactgtagaaattaatccaaagcttgaggtaatcgatttgcagatctctactccccctgttatggatatcctttcttttgattctaccacaacaacagaaaccagtggtaggactctgccagacaagggtgaagaggcctgtggatatttcttgaacccttccttaatgtcaccagaatgtttgccaacaaccacgaaaaagaaaacagaagacatgagtgacctcccctgtgaaagtcaaaggagcatacctctcgctgtgactgatgctttagagcatattatggaacaactcaatgttttgacacagactgtttcaatcttggagcagcgactgactttgacagaggataagctgaaagactgccttgaaaatcagcaaaagcttttcagtgctgtccaacagaaaagctgaataaaaaattcattttcatttgttgggcagaggcccaataaatgaacaaatgtacatacactcaggaaggtagtacaagatactccatacaacacaaccatgtgctatttatcatggcatttcttaaaagggtgagcaacagaacaaaaggcagaaaaggcatacctaaggactaatttaaacacatatcaatgtgaaggactaatttaaattactatcatttatgattgcagtaataaagtgataagcattcaagc

SEQ ID NO: 249158 - DNA, 3001 bp, Artificial Sequence
  derived and/or modified sequence
gaccgggaggcgctgccgctctgggcagacggttccgggagccgcacggtcccctctccttccccatcctctcccctcccctctccgggttcccccacccacaggagccttgggccgaccactcccccgatggcctcagccacggaggaccccgttctggagcgttatttcaaaggccacaaagctgcgatcacctccttggacctcagccccaacggcaagcaacttgctactgcttcttgggatacctttctcatgctatggaatttcaagccacatgctagagcttacagatatgtgggtcacaaggatgttgtaaccagcgtgcagttttctccacatggaaacttattggcgtctgcctcacgagacagaaccgtgagactctggattcctgataagagaggaaaattctcagaatttaaagctcatacagctccagttcgaagtgtagacttttcagctgatggccagtttctagctacagcttctgaagacaaatccataaaagtatggagcatgtatcgccagcgcttcctgtattccttgtatcgacatacacactgggtacgctgtgccaaattttcacccgatggaagactaattgtgtcatgtagtgaggataaaactattaaaatttgggataccacaaataagcaatgtgttaataacttctcagattccgttggatttgcaaattttgtggactttaaccctagtggtacatgcatagcttcagcaggttctgatcaaactgtgaaagtctgggatgtaagagtgaacaaattactacagcattaccaagttcacagcggtggagttaattgcatatcattccatccttcgggtaactatctcatcacagcttcttcagatggtacccttaagattctggacctcttagaaggaaggctcatctatacacttcaaggacatacgggacctgtctttactgtttcattttcaaaaggtggagagctatttgcatcaggaggtgcagacacacaggtcttattatggaggactaactttgatgaattgcattgtaaaggtcttaccaaaagaaatctcaaaagattacattttgattcaccaccacatcttcttgatatctacccaagaacaccacatccccatgaggaaaaagttgagactgtagaaattaatccaaagcttgaggtaatcgatttgcagatctctactccccctgttatggatatcctttcttttgattctaccacaacaacagaaaccagtggtaggactctgccagacaagggtgaagaggcctgtggatatttcttgaacccttccttaatgtcaccagaatgtttgccaacaaccacgaaaaagaaaacagaagacatgagtgacctcccctgtgaaagtcaaaggagcatacctctcgctgtgactgatgctttagagcatattatggaacaactcaatgttttgacacagactgtttcaatcttggagcagcgactgactttgacagaggataagctgaaagactgccttgaaaatcagcaaaagcttttcagtgctgtccaacagaaaagctgaataaaaaattcattttcatttgttgggcagaggcccaataaatgaacaaatgtacatacactcaggaaggtagtacaagatactccatacaacacaaccatgtgctatttatcatggcatttcttaaaagggtgagcaacagaacaaaaggcagaaaaggcatacctaaggactaatttaaacacatatcaatgtgaaggactaatttaaattactatcatttatgattgcagtaataaagtgataagcattcaagcaactctgtattttccccatattattttaaatgtccattttcatttataggccaaatcctgccaggaaagtaaccagatctctggatttcactgttaagtcatttcagattgaccatattcagacagtcatggggtgaaataattcacttacctccaaaatagcatcctatatgccaataatgagttattgatctgactagttgtatgtctttctgttcaaaatagaaattatcctttcttactaatgccttgaaagaatgaacaaataaaaattcccagaccacagaatttccacagcaagaatacacttattttaattaacaatagcacagatatagcatagggcagtgggttttttagttaatttatggcgtactttgtttatccattggccaacctgaaggaaatgaaactcacctatctttctatcacagatgaatgtgctagatgaatgatttgggttgtatctgatcatggttcacaaaaattatgttagtgtgttttcagtatgctaaaaagtcagagtgatacaaaagtgatatttaaaaatatacacacatgtatgtacacatgcttcagaaatattgttgcttagggtgatttgggcagctaaatagtaagtactttttaaaatttttgcatcatcatcttcctatttaatgaattgtgatttaaaacaaaatgaaaataagccaggtattctaaaagatcctggatacaaattaagaattttgctttattttaaaccaaattgagattaaattgaagaaaagcaagcaaattaatttcagcttgattatcaacctgtatcaagaacaaaaatgggaggaggtgtccacatttatggtgtgtataggtaacatggggaaaatgctattctgtgttttggaaaagaagaaatagtgccgtcctatttatttctatatttagaaatttttctcaaagaaatttcaattgtatctatgagatgggtttctaagtatcttattgtgtgttataagtgccttttaatatcatactaagtgtgagcttctggacattttcaagagcttacaaaaactaagtggcattgtatttttataaccccattgagaagactaagtaagaaatgaaatgtcctatcaattttattttgtcatgcttcaaacaataaagacatttctgctttaaaagaaaaa

SEQ ID NO: 249159 - DNA, 1437 bp, Artificial Sequence
  derived and/or modified sequence
atggccagcgccaccgaggaccccgtgctggagagatacttcaagggccacaaggccgccatcaccagcctggacctgagccccaacggcaagcagctggccaccgccagctgggacaccttcctgatgctgtggaacttcaagccccacgccagagcctacagatacgtgggccacaaggacgtggtgaccagcgtgcagttcagcccccacggcaacctgctggccagcgccagcagagacagaaccgtgagactgtggatccccgacaagagaggcaagttcagcgagttcaaggcccacaccgcccccgtgagaagcgtggacttcagcgccgacggccagttcctggccaccgccagcgaggacaagagcatcaaggtgtggagcatgtacagacagagattcctgtacagcctgtacagacacacccactgggtgagatgcgccaagttcagccccgacggcagactgatcgtgagctgcagcgaggacaagaccatcaagatctgggacaccaccaacaagcagtgcgtgaacaacttcagcgacagcgtgggcttcgccaacttcgtggacttcaaccccagcggcacctgcatcgccagcgccggcagcgaccagaccgtgaaggtgtgggacgtgagagtgaacaagctgctgcagcactaccaggtgcacagcggcggcgtgaactgcatcagcttccaccccagcggcaactacctgatcaccgccagcagcgacggcaccctgaagatcctggacctgctggagggcagactgatctacaccctgcagggccacaccggccccgtgttcaccgtgagcttcagcaagggcggcgagctgttcgccagcggcggcgccgacacccaggtgctgctgtggagaaccaacttcgacgagctgcactgcaagggcctgaccaagagaaacctgaagagactgcacttcgacagccccccccacctgctggacatctaccccagaaccccccacccccacgaggagaaggtggagaccgtggagatcaaccccaagctggaggtgatcgacctgcagatcagcaccccccccgtgatggacatcctgagcttcgacagcaccaccaccaccgagaccagcggcagaaccctgcccgacaagggcgaggaggcctgcggctacttcctgaaccccagcctgatgagccccgagtgcctgcccaccaccaccaagaagaagaccgaggacatgagcgacctgccctgcgagagccagagaagcatccccctggccgtgaccgacgccctggagcacatcatggagcagctgaacgtgctgacccagaccgtgagcatcctggagcagagactgaccctgaccgaggacaagctgaaggactgcctggagaaccagcagaagctgttcagcgccgtgcagcagaagagctag

SEQ ID NO: 249160 - protein, 745 aa, Artificial Sequence
  derived and/or modified sequence
MRPDSHPYGFPWELVIRAAVAGFFAVLFLWRSFRSVTSRLYVRREKKFAVALSGLIEEKCKLLEKFSLVQKEYEGYEVESSLKNASFEKEATEAQSLEATCEKLNRFNSELVHEILCLEKELKEEKSKHSEQNELMADISKRIQSLEDESKSLKSQVAEAKMTFKRFQANEERLEIEIQDAWKENSELQESQKQLLQEAEVWKEQVSELIKQKRTFEDSKVHAEQVLNDKENHIKTLTERLLKMKDGVAMLEEDVTDDDNLELEMNSESEDGAYLDNPPKGALKKLIHAAKLNASLKTLEGERNQIYIQLSEVDKTKEELTEHIKNLQTEQASLQSENTHFESENQKLQQKLKVMTELYQENEMKLYRKLIVEEKCRLEKEEKLSKVDEMISHATEELETYRKRAKDLKEFEKTIHFYQKKIILHEKKAHDNWSAAWTAERNLNDLRKENAHNRQKLTEIEFKIKLLEKDPYGLDVPNTAFGRQHSPYGPSPLGWPSSETRASLYPPTLLEGPLRLSPLLPRGGGRGSRGPGNPPDHQITKERGESSCDRLTDPHRAPSDAGPLAPPWEQDYRMMFPPPGQSYPDSALPPQRQDRFYSNCARLSGPAELRSFNMPSLDKMDGSMPSEMESSRNDTKDNLGNLKVPDSSLPAENEATGPGFVPPPLAPIRGLLFPVDTRGPFIRRGPPFPPPPPGTVFGASPDYFSPRDVPGPPRAPFAMRNVYLPRGFLPYRPPRPAFFPPAPTF

SEQ ID NO: 249161 - DNA, 4306 bp, Artificial Sequence
  derived and/or modified sequence
agagcagccttggcgctacggaggagcctagggctaaccctcagccatacctggggctggtcctggagttgctacgcagggttgtggcagcactgactgaaggtatgagacccgattctcatccttatggttttccatgggaattggtgatacgtgcagctgttgctggattttttgctgttctcttcttgtggagaagttttagatcagttacgagtcggctttatgtgagaagagagaaaaagtttgctgtggcactttctggactaattgaagaaaaatgtaaactacttgaaaaatttagccttgttcaaaaagagtatgaaggctatgaagtagagtcatctttaaagaatgccagctttgagaaggaggcaacagaagcacaaagtttggaggcaacctgcgaaaagctgaacaggttcaattctgaacttgtgcatgaaatactctgtctagaaaaagagttaaaagaagagaaatctaaacattctgaacaaaatgaattgatggcggatatttccaaaaggatacagtcgctagaagatgagtcaaaatccctcaaatcacaagtagctgaagccaaaatgaccttcaagagatttcaagcgaatgaagaacggttggagatagaaatacaagatgcttggaaagaaaattctgaacttcaggaaagccagaaacagcttttgcaagaagctgaagtatggaaagaacaagtgagtgaacttattaaacagaaaagaacatttgaagactccaaagtacatgcagaacaagttctaaatgataaagaaaatcacatcaagactctgactgaacgcttgctaaagatgaaagatggggttgctatgcttgaagaagatgtaacggatgatgataacttggaattagaaatgaacagtgaatcggaagatggtgcttacttagataatcctccaaaaggagctttgaagaaactgattcatgctgctaagttaaatgcttccttaaaaaccttagaaggagaaagaaaccaaatttatattcaattatctgaagttgataaaacaaaggaagagcttacagagcatattaaaaatcttcagactgaacaagcatctttgcagtcagaaaacacacattttgaaagtgagaatcagaagcttcagcagaaacttaaagtaatgactgaattatatcaagaaaatgaaatgaaactctacaggaaattaatagtagaggaaaaatgccggttagagaaagaagagaaactttctaaagtagacgaaatgatcagccatgccactgaagagctggagacctaccgaaagcgagccaaagatcttaaagaatttgagaaaactattcatttttatcaaaagaagattattctccatgagaaaaaagcacatgataattggtcggcagcttggactgctgaaagaaacctcaatgatttaaggaaagaaaatgctcacaacagacaaaaattaactgaaatagagtttaaaataaaacttttagaaaaagatccttatggacttgatgttccaaatacagcatttggcagacagcattccccatatggtccctcaccattgggttggccttcatctgaaacgagagcttctctctatcctccaactttgttggaaggtcctctcagactctcacctttgcttccacggggaggaggaagaggctccagaggcccagggaatcctccggaccatcagattaccaaagaaagaggagaatcaagctgtgataggttaactgatcctcacagggctccttctgacgctgggcccctggcacctccgtgggaacaggactataggatgatgtttcctccaccaggacaatcatatcctgattcagctctccctccacaaaggcaagacagattttattctaattgtgctagactctctggaccagcagaactcagaagttttaatatgccttctttggataaaatggatgggtcaatgccttcagaaatggaatccagtagaaatgataccaaagataatcttggtaatttaaaggtgcctgattcatctctccccgctgaaaatgaagcaactggccctggctttgttcctccacctcttgctccaatcagaggtttattgtttccagtagatacaaggggcccgttcataagaagaggacctcctttccccccacctcctccaggaaccgtgtttggagcttctccagattatttttctccaagggatgtcccaggtccaccacgtgctccatttgcaatgagaaatgtctatttaccgagaggttttcttccttaccgtcccccaagacctgcatttttccccccagcccccacattctgaaggtagaatgagtttccatcagggttgagtccgacttcaaatgagcctgctgctgaacatccagaacgacagcaagaaacctaacaacatgtttgccctcttcaaaagtaattttgactgatctcattttcagtttaagtaactgctgttacttaagtgattacacttttgttcagattgaaacttaatggaactataattcccaggatagtattttgtaaatgaggatgatttaaatatgaatcttatgagtaaattatttcattttattttattctagatagtataacttttaatttgattaatccactattatataaagaatggtgggagctttatatatgtaatcttgcaggtggggaggctttaaattgtctttatgtcaagaactgtatttactgtggttgtagacaaatgtgaaagtaactttatgcttaaataagttttagttgattaaaaaaatttaaaaaatttaaaaaaagaaatatataaatatgcacaggtgggaaggtagaatactatgtaactgttagaatatttcactttaaaccaagatgatcttggatctcctgtcttatagattttatatcctctttcagtactttgagagtgtaaaacatttatagcagaaagtattcgtgtttcctctgttttcctcaagaatggtttcttcgccctccctttccttcccttcgtcttccctaagctaatttcttcctatgtttgtcatcatatcattacataattgtgttgttatttcttttgttttatttttatttggtgggaacaactttatccagaacttttacttgccccagaattatatagatcagtttctcctgacttctttcccaacctttacctctgttggtgttctaatagttttagttttatgttctgcttttctcttgctgtggcaaggggaaggagtaaatctaagatagtgcttaattgcagttggtgaatttgatctctgattgagctctcttctctggaattctgttaaaagatgaaatgtatcgtgttccctgagagacgccctcaaattttggattagtccttcatgcaagctgggccaccaagccattgcttcttttggggacaacctgccctcacttttaaaaagcatcctagctcacatgcctcccctagcagttaatgccactccagtctctgcttgaatgtaataaaataaaagaaaagtaactatttgagacatgaggtgcccttattgtacactggggcttcctatacattttccgtcttcccttgaaccaccactatcctcagctactttatgcttctgttctgttaaagccctatttgctagtggaaaaatttaactcctggtgatttttttaatactaggcctcttgccttccttccagtgagagaaaaatagaatggtaagcctagtggtttcttccttcactgttgaatactatttatccaaggtatcaaggaagaacttctaatcagaaaagacatgtattattttcacaactgggtagcatatctcactcccagaatggaagttaggtgggaattgcaagattaaggagatttttctggatttctgtctatgtatcatatccacagaactctttctagaggaattttatattgagccaggcatccatttccacagtcttgcatttctagatacttccaaagttatagcactgttcctaaatcatttttggctttatttattaatttattgttcacttcatttcattaggttcagtatgaaacaggtattgtcatctctttgtgtctactttgccacctttccccagaataggcctgaatgagattgaaaacgttacttcagttccttgtgtctgacattgcttgtttgtaactaagaaaaataatatttgcttttgttgaatgactactaatttttttccatgaacctaataaactaaaaagaaagttgaaataataaagagtgaataagt

SEQ ID NO: 249162 - DNA, 2238 bp, Artificial Sequence
  derived and/or modified sequence
atgagacccgacagccacccctacggcttcccctgggagctggtgatcagagccgccgtggccggcttcttcgccgtgctgttcctgtggagaagcttcagaagcgtgaccagcagactgtacgtgagaagagagaagaagttcgccgtggccctgagcggcctgatcgaggagaagtgcaagctgctggagaagttcagcctggtgcagaaggagtacgagggctacgaggtggagagcagcctgaagaacgccagcttcgagaaggaggccaccgaggcccagagcctggaggccacctgcgagaagctgaacagattcaacagcgagctggtgcacgagatcctgtgcctggagaaggagctgaaggaggagaagagcaagcacagcgagcagaacgagctgatggccgacatcagcaagagaatccagagcctggaggacgagagcaagagcctgaagagccaggtggccgaggccaagatgaccttcaagagattccaggccaacgaggagagactggagatcgagatccaggacgcctggaaggagaacagcgagctgcaggagagccagaagcagctgctgcaggaggccgaggtgtggaaggagcaggtgagcgagctgatcaagcagaagagaaccttcgaggacagcaaggtgcacgccgagcaggtgctgaacgacaaggagaaccacatcaagaccctgaccgagagactgctgaagatgaaggacggcgtggccatgctggaggaggacgtgaccgacgacgacaacctggagctggagatgaacagcgagagcgaggacggcgcctacctggacaacccccccaagggcgccctgaagaagctgatccacgccgccaagctgaacgccagcctgaagaccctggagggcgagagaaaccagatctacatccagctgagcgaggtggacaagaccaaggaggagctgaccgagcacatcaagaacctgcagaccgagcaggccagcctgcagagcgagaacacccacttcgagagcgagaaccagaagctgcagcagaagctgaaggtgatgaccgagctgtaccaggagaacgagatgaagctgtacagaaagctgatcgtggaggagaagtgcagactggagaaggaggagaagctgagcaaggtggacgagatgatcagccacgccaccgaggagctggagacctacagaaagagagccaaggacctgaaggagttcgagaagaccatccacttctaccagaagaagatcatcctgcacgagaagaaggcccacgacaactggagcgccgcctggaccgccgagagaaacctgaacgacctgagaaaggagaacgcccacaacagacagaagctgaccgagatcgagttcaagatcaagctgctggagaaggacccctacggcctggacgtgcccaacaccgccttcggcagacagcacagcccctacggccccagccccctgggctggcccagcagcgagaccagagccagcctgtacccccccaccctgctggagggccccctgagactgagccccctgctgcccagaggcggcggcagaggcagcagaggccccggcaacccccccgaccaccagatcaccaaggagagaggcgagagcagctgcgacagactgaccgacccccacagagcccccagcgacgccggccccctggcccccccctgggagcaggactacagaatgatgttccccccccccggccagagctaccccgacagcgccctgcccccccagagacaggacagattctacagcaactgcgccagactgagcggccccgccgagctgagaagcttcaacatgcccagcctggacaagatggacggcagcatgcccagcgagatggagagcagcagaaacgacaccaaggacaacctgggcaacctgaaggtgcccgacagcagcctgcccgccgagaacgaggccaccggccccggcttcgtgcccccccccctggcccccatcagaggcctgctgttccccgtggacaccagaggccccttcatcagaagaggcccccccttccccccccccccccccggcaccgtgttcggcgccagccccgactacttcagccccagagacgtgcccggcccccccagagcccccttcgccatgagaaacgtgtacctgcccagaggcttcctgccctacagaccccccagacccgccttcttcccccccgcccccaccttctag

SEQ ID NO: 249163 - DNA, 2238 bp, Artificial Sequence
  derived and/or modified sequence
atgcggcctgattcacatccatacgggttcccctgggaactggtgattcgggcagcggtcgccgggttttttgcagtacttttcctgtggcggagttttcgatctgtgacctcaagactctacgtgaggcgcgaaaaaaaattcgctgttgcactttccggcttgattgaggaaaagtgtaaactgcttgagaaattcagtctggtccagaaagagtatgaaggctatgaggtggagagtagtctaaaaaatgcgagtttcgagaaggaggctaccgaggctcagtccttggaggccacctgcgaaaagctcaaccgcttcaactccgaacttgtgcacgaaatactgtgcctcgagaaagagctgaaagaagagaagagtaaacacagcgaacagaatgagctaatggccgatatttctaagcgtattcagtcccttgaagacgagagcaagtctctgaagtcgcaggtggctgaagctaagatgacatttaagagattccaggcaaacgaggagagactggagatcgagattcaggacgcttggaaggaaaatagcgaacttcaggagtcacagaaacagctgttgcaggaagcagaggtgtggaaagagcaggtgagcgaacttatcaaacagaagagaacctttgaggatagtaaagttcatgccgaacaggtgctgaacgacaaagagaatcacatcaagacgttgacagaacggctgctcaaaatgaaggatggggttgccatgttggaagaagacgtgaccgatgatgataatcttgagttggagatgaacagcgaaagcgaagatggggcatacctggacaaccctcccaagggagcactgaaaaaattgatacatgccgcgaaattgaacgcttcgctgaaaaccttggagggtgaaaggaatcagatctatattcagctctctgaggtcgacaagaccaaagaagagctcaccgagcacatcaagaatttgcagactgagcaggcctcgctacagtcagaaaatacacattttgaatcagaaaaccagaagctacagcaaaagttaaaggtgatgacagagttgtaccaggaaaatgaaatgaagctgtaccgaaaattgattgtagaagaaaagtgcagactggagaaggaggagaaattaagcaaggttgatgagatgatcagtcacgcaacagaagagctggagacttatcggaaaagagcaaaagatcttaaagagttcgagaagaccatccatttttaccagaaaaaaataatcctacatgagaagaaggcgcatgacaactggagtgctgcttggaccgcagagcggaacctgaacgatctcaggaaggagaatgcgcataatcgccagaagttaaccgaaatcgaatttaaaatcaagctcttagagaaagacccatatggcctggatgtgccaaataccgcatttggacgtcagcattctccctatggcccctcacctcttggctggccctcaagcgaaactagggcgagtttgtatcctccaacactcttggagggccccctgcgcctctcccccctccttccgcgaggggggggcaggggatctagaggcccagggaatcccccagaccatcagataactaaagagcgaggggagtcaagttgcgatcgtctgaccgacccccatcgagcgccttccgacgccggaccgttggctccaccatgggagcaggactaccggatgatgttcccaccgcccgggcaatcgtacccagattcagccttgcctccacaaagacaggatagattttatagcaattgtgctcgtctgagcgggcctgccgagttacgcagttttaacatgccttcactggacaaaatggacgggtccatgccctccgagatggagtccagtcgtaatgacacaaaagataacttgggaaacctgaaggttccagatagcagtctgccagcagaaaacgaagcgactggacccggcttcgtgcccccccctcttgcgcccatccggggcctgcttttccccgttgatactcggggtccctttattcgccgtggcccccccttcccgcccccacctcccggaaccgttttcggggcgtcacctgactatttctctccgagagacgtgcctgggccaccgcgagccccgttcgcaatgcggaatgtttatctcccacgcgggtttctgccgtaccggcctcctcggcctgctttcttcccaccagcccctacattttag

SEQ ID NO: 249164 - DNA, 2238 bp, Artificial Sequence
  derived and/or modified sequence
atgaggccagacagccacccctacggcttcccctgggagctggtgatccgggctgctgtggccggcttctttgctgtgctcttcctgtggaggagcttccgctctgtgaccagccggctgtatgtgagaagagagaagaagtttgctgtggccctgagcggcctcatcgaggagaagtgcaagctgctggagaagttcagcctggtgcagaaggagtatgagggctatgaggtggagagcagcctgaagaatgccagctttgagaaggaggccacagaggcccagagcctggaggccacctgtgagaagctgaaccgcttcaacagcgagctggtgcatgagatcctgtgcctggagaaggagctgaaggaggagaagagcaagcacagcgagcagaatgagctgatggctgacatcagcaagaggatccagagcctggaggatgagagcaagagcctgaagagccaggtggccgaggccaagatgaccttcaagcgcttccaggccaatgaggagcggctggagattgagatccaggatgcctggaaggagaacagcgagctgcaggagagccagaagcagctgctgcaggaggccgaggtgtggaaggagcaggtgtctgagctgatcaagcagaagaggacctttgaggacagcaaggtgcatgctgagcaggtgctgaatgacaaggagaaccacatcaagaccctgacagagcggctgctgaagatgaaggatggagtggccatgctggaggaggatgtgacagatgatgacaacctggagctggagatgaacagcgagagtgaagatggagcctacctggacaacccccccaagggggccctgaagaagctgattcatgctgccaagctgaatgccagcctgaagaccctggagggggagaggaaccagatctacatccagctgtctgaggtggacaagaccaaggaggagctgacagagcacatcaagaacctgcagacagagcaggccagcctgcagagcgagaacacccactttgaaagtgagaaccagaagctgcagcagaagctgaaggtgatgacagagctgtaccaggagaatgagatgaagctgtacaggaagctgattgtggaggagaagtgccgcctggagaaggaggagaagctgagcaaggtggatgagatgatcagccacgccacagaggagctggagacctacaggaagagggccaaggacctgaaggagtttgagaagaccatccacttctaccagaagaagatcatcctgcacgagaagaaggcccatgacaactggagcgctgcctggacagctgagaggaacctgaatgacctgaggaaagaaaatgcccacaaccggcagaagctgacagaaattgagttcaagatcaagctgctggagaaggacccctacggcctggatgtgcccaacacagccttcggccggcagcacagcccctacggccccagccccctgggctggcccagcagcgagacccgggccagcctgtacccacccaccctgctggagggccccctgcggctgagccccctgctgccccggggcggcggccggggcagccggggccctggcaaccccccagaccaccagatcaccaaggagcggggggagagcagctgtgaccggctgacagacccccaccgggcccccagtgatgctggccccctggccccaccctgggagcaggactacaggatgatgtttcctcctcctggccagagctacccagacagcgccctgcccccccagaggcaggaccgcttctacagcaactgtgcccggctgagcggccctgctgagctgcgctccttcaacatgcccagcctggacaagatggatggctccatgcccagcgagatggagagcagcagaaatgacaccaaggacaacctgggcaacctgaaggtgcctgacagcagcctgcctgcagaaaatgaggccaccggccctggctttgtgcccccacccctggcccccatccggggcctgctcttccctgtggacacccggggccccttcatcagaagaggcccccccttccccccacctcctcctggcaccgtgtttggagccagcccagactacttcagccccagagatgtgcccggccccccccgggccccctttgccatgagaaatgtgtacctgccccggggcttcctgccctacagaccacccaggcctgccttcttccccccagcccccaccttctag

SEQ ID NO: 249165 - DNA, 2238 bp, Artificial Sequence
  derived and/or modified sequence
atgcggcccgacagccacccctacggcttcccctgggagctggtgataagggcagccgtggcaggcttctttgccgtgttatttctgtggagaagttttagaagtgtcacaagccgactttatgtgcgcagggaaaaaaagttcgctgtggctctgtcgggcctgatcgaggagaagtgtaaattattggagaagttttctctagtccagaaagagtatgaaggttatgaagttgaatcaagcttaaagaacgccagctttgagaaggaggccaccgaagcccagagcctggaggccacgtgtgaaaagctcaaccggtttaatagcgagctcgtccacgagattttatgtctggagaaggaactgaaggaagagaaaagtaaacacagcgagcagaatgaactgatggcagatattagtaaacgcatacaatcacttgaagacgaaagcaagagtttgaagagccaggtagccgaggcaaagatgaccttcaaacgcttccaagcaaatgaagagcgacttgaaatcgagattcaagacgcctggaaggaaaattctgagctgcaggagagtcagaaacaacttctgcaggaagctgaagtttggaaagagcaggtatctgagttgatcaagcagaagcggacattcgaggactccaaagttcatgccgagcaggtgttaaatgacaaggagaaccatattaaaaccctgaccgagagactgttaaagatgaaggatggggtggccatgttagaagaagatgtgactgacgatgacaatctggagctcgaaatgaattccgagagtgaagacggcgcatatctagacaacccacccaaaggggcactcaagaaactgatccatgcagctaagctgaatgctagtctgaagacattggagggcgaacgaaaccagatttacattcaactcagtgaagtcgacaagactaaggaggagttgactgaacacatcaagaatctgcagaccgagcaagccagcctccagtcagaaaatactcatttcgagtctgaaaaccagaagcttcaacagaagttgaaggtgatgactgagctctatcaggagaacgagatgaagctgtatagaaagttgattgtggaagagaagtgcagattagaaaaagaggagaaactttcgaaagtggacgaaatgatatcccacgctaccgaggaactcgagacatacagaaagagagcgaaagacctgaaagagttcgaaaagacaattcacttttatcagaagaagattatcttgcacgaaaagaaggcccacgacaattggtctgcggcttggactgccgagaggaacctcaatgaccttcggaaagagaatgcccataacaggcagaagttaacagagattgagttcaaaataaagctgctcgaaaaagatccctatggcctggacgtgcccaacacagccttcggcaggcagcattcaccctatggccctagcccactaggttggccttcctccgaaaccagagcttctctgtatccaccaaccctcctggaagggccgctgaggctgagtccccttctgccacggggcggcggaagagggagtcggggccccgggaatccgcccgaccaccagatcactaaggaaagaggagagtcatcttgtgacaggcttaccgatccacacagggcccctagcgatgctggccctctggcccctccttgggagcaggattatcgcatgatgttccccccgccaggtcagagctacccagatagtgcactccccccacaacgccaggaccggttttacagtaactgtgctcgccttagtgggcccgccgaactgaggtccttcaacatgcctagcttggacaagatggatggctcaatgccaagcgagatggaaagtagcaggaacgatacaaaggataacctgggcaatctgaaggtccccgactcctccctgccagcagagaacgaggctacaggtcctgggtttgtgccccctcccctggcccccattcgtggcttgctgttcccggtggatactaggggcccgttcatccgcagaggaccaccgtttccccctcctcctcccgggacagtcttcggagcctcaccggactatttcagtcccagggacgtgccgggtcctccccgggcccccttcgcgatgagaaacgtctatctgccacgtgggtttctgccatatcgaccccccaggcctgccttctttccgcctgcccccactttttag

SEQ ID NO: 249166 - DNA, 2238 bp, Artificial Sequence
  derived and/or modified sequence
atgcggcctgacagccacccatatgggttcccatgggagctggttattagagccgcagtcgccggattttttgcggtccttttcttgtggaggtcctttaggtccgtgacctctaggctgtacgtcaggcgcgagaagaagttcgcagtggcactgagcgggctcatcgaggaaaaatgcaagctactggagaaattttctctggttcaaaaggaatatgagggctacgaggttgaaagctccttgaaaaatgcatcctttgagaaagaagccaccgaggctcaatcgttggaagccacctgtgagaagctaaataggttcaattcagagctggtgcatgaaattctgtgtctggaaaaagaacttaaggaggagaagtcaaagcattcagagcagaacgagctgatggctgatattagcaagcgcatacaaagtctcgaggatgagagtaagtccttgaaaagtcaggttgccgaggcaaagatgacgttcaagagatttcaggccaatgaggaaaggctagagatagaaattcaggacgcatggaaagagaactcagagctgcaggaaagccagaagcaactgctacaggaggccgaggtgtggaaggaacaggtgtccgagctgatcaaacagaaacgtaccttcgaggattccaaggtgcacgctgagcaggtactcaacgataaagaaaatcatatcaaaacgctaaccgaacgcttgttgaaaatgaaggacggtgtggctatgctggaagaagatgtgacagacgacgacaaccttgagctggagatgaatagcgagagtgaggacggcgcttacctcgacaatcctccaaagggagcattgaagaagctcatccacgctgctaagttgaatgctagccttaagactcttgaaggtgaacgcaaccagatctatatccagttgtctgaggtagacaaaacgaaggaggagctcaccgaacacattaaaaacctccagaccgaacaggcaagccttcagtcagagaacactcacttcgagagcgagaatcagaagctgcagcagaaactgaaggtgatgacggagttatatcaggagaatgaaatgaagctgtacagaaaacttatcgtggaggaaaagtgtaggctggaaaaagaagagaagttaagcaaggtggacgaaatgatcagtcatgccaccgaggagttggagacatataggaagcgagccaaagatctgaaggagttcgagaaaacaattcatttctaccaaaaaaaaataatcctgcacgagaagaaggcacatgacaactggagcgcagcctggacggcggagcgcaatctcaatgacctacggaaagaaaacgctcataaccggcagaagcttacagaaattgaatttaagatcaagctcttggaaaaggacccgtacggactggatgtgcctaacactgctttcggtcgccagcactcgccctacggcccatcgccactgggttggcccagctcagagacacgggcttccctgtaccctcccaccctacttgaaggaccgctgcgactatctccacttctgccacggggaggcggacggggttcgaggggacccggaaatccccctgatcatcaaataacaaaggaaagaggcgaaagcagctgtgacagactgacggatcctcatagagctccctccgacgccggaccgctggcgccaccctgggaacaggactatcgcatgatgttccccccaccgggacagagctaccccgactcagccctgccgcctcaaagacaggaccggttttattcaaactgcgctaggctcagcggacctgccgaactgcgcagtttcaacatgccgtccctggacaaaatggacggctcaatgcccagcgagatggaatccagcagaaatgataccaaggacaatctgggaaatctgaaagttcccgattccagtctccctgctgagaacgaggctacaggcccagggtttgtacccccacctctggctcctatccgcggactcttatttcctgtggataccagagggccttttatcaggagaggaccaccgtttccaccgcctcctcctggcactgttttcggggcatctcctgactactttagtcctcgagacgtccccggtccaccgagagccccattcgctatgaggaatgtgtaccttccgaggggcttcctgccctaccggccaccacgtcccgctttttttcctccagctcctaccttttag

SEQ ID NO: 249167 - protein, 458 aa, Artificial Sequence
  derived and/or modified sequence
MSQRQVLQVFEQYQKARTQFVQMVAELATRPQNIETLQNAGVMSLLRTLLLDVVPTIQQTAALALGRLANYNDDLAEAVVKCDILPQLVYSLAEQNRFYKKAAAFVLRAVGKHSPQLAQAIVDCGALDTLVICLEDFDPGVKEAAAWALRYIARHNAELSQAVVDAGAVPLLVLCIQEPEIALKRIAASALSDIAKHSPELAQTVVDAGAVAHLAQMILNPDAKLKHQILSALSQVSKHSVDLAEMVVEAEIFPVVLTCLKDKDEYVKKNASTLIREIAKHTPELSQLVVNAGGVAAVIDCIGSCKGNTRLPGIMMLGYVAAHSENLAMAVIISKGVPQLSVCLSEEPEDHIKAAAAWALGQIGRHTPEHARAVAVTNTLPVLLSLYMSTESSEDLQVKSKKAIKNILQKCTYLPALEPFLYDAPPNILKHVVGQFSKVLFPWIFRYTSAEGGQLSTT

SEQ ID NO: 249168 - protein, 191 aa, Artificial Sequence
  derived and/or modified sequence
MSQRQVLQVFEQYQKARTQFVQMVAELATRPQNIETLQNAGVMSLLRTLLLDVVPTIQQTAALALGRLANYNDDLAEAVVKCDILPQLVYSLAEQNGVPQLSVCLSEEPEDHIKAAAAWALGQIGRHTPEHARAVAVTNTLPVLLSLYMSTESSEDLQVKSKKAIKNILQKCTYLPALEPFLYDAPPNILK

SEQ ID NO: 249169 - DNA, 1377 bp, Artificial Sequence
  derived and/or modified sequence
atgagccagagacaggtgctgcaggtgttcgagcagtaccagaaggccagaacccagttcgtgcagatggtggccgagctggccaccagaccccagaacatcgagaccctgcagaacgccggcgtgatgagcctgctgagaaccctgctgctggacgtggtgcccaccatccagcagaccgccgccctggccctgggcagactggccaactacaacgacgacctggccgaggccgtggtgaagtgcgacatcctgccccagctggtgtacagcctggccgagcagaacagattctacaagaaggccgccgccttcgtgctgagagccgtgggcaagcacagcccccagctggcccaggccatcgtggactgcggcgccctggacaccctggtgatctgcctggaggacttcgaccccggcgtgaaggaggccgccgcctgggccctgagatacatcgccagacacaacgccgagctgagccaggccgtggtggacgccggcgccgtgcccctgctggtgctgtgcatccaggagcccgagatcgccctgaagagaatcgccgccagcgccctgagcgacatcgccaagcacagccccgagctggcccagaccgtggtggacgccggcgccgtggcccacctggcccagatgatcctgaaccccgacgccaagctgaagcaccagatcctgagcgccctgagccaggtgagcaagcacagcgtggacctggccgagatggtggtggaggccgagatcttccccgtggtgctgacctgcctgaaggacaaggacgagtacgtgaagaagaacgccagcaccctgatcagagagatcgccaagcacacccccgagctgagccagctggtggtgaacgccggcggcgtggccgccgtgatcgactgcatcggcagctgcaagggcaacaccagactgcccggcatcatgatgctgggctacgtggccgcccacagcgagaacctggccatggccgtgatcatcagcaagggcgtgccccagctgagcgtgtgcctgagcgaggagcccgaggaccacatcaaggccgccgccgcctgggccctgggccagatcggcagacacacccccgagcacgccagagccgtggccgtgaccaacaccctgcccgtgctgctgagcctgtacatgagcaccgagagcagcgaggacctgcaggtgaagagcaagaaggccatcaagaacatcctgcagaagtgcacctacctgcccgccctggagcccttcctgtacgacgccccccccaacatcctgaagcacgtggtgggccagttcagcaaggtgctgttcccctggatcttcagatacaccagcgccgagggcggccagctgagcaccacctag

SEQ ID NO: 249170 - DNA, 1377 bp, Artificial Sequence
  derived and/or modified sequence
atgtctcagagacaggttctccaagtgttcgagcagtatcaaaaagcacgaacacagttcgtgcagatggtggctgaactggctactaggccccaaaatatcgagaccttacagaatgccggcgtcatgagtttgctccgcaccctgctgctggacgtcgtgcctaccatacaacagacagcagccctagccctggggaggctagcaaattacaacgacgacctggccgaggccgtcgtgaaatgcgacatccttccgcagctcgtgtactctttggcagaacagaaccgcttctacaaaaaggccgctgcatttgtgttgcgtgccgtgggcaaacattcaccgcagctggcccaggctattgttgactgtggagcgctggacaccctggttatttgtctggaggactttgaccctggagtaaaggaagctgcagcctgggccctgcggtatattgccaggcataatgccgagttgtcacaggccgtggtcgacgccggagccgttcctttactagtgctttgcattcaggagcccgagatcgctctgaaacgcatcgccgccagtgccctatcagacatcgccaagcactcacccgagctcgcccagaccgttgttgacgcaggggctgtggcccatcttgcccagatgatcttaaacccagatgcgaagcttaagcatcagatactctctgcactcagccaggtgagcaaacactcagtagacctagctgagatggttgtggaagccgaaatctttcccgtcgtcctcacgtgtcttaaggataaggatgagtatgtgaagaagaacgcttcaacgttaataagggaaatcgctaaacacacacccgaactttctcagctcgtggtaaacgccggcggtgtggccgctgtaattgattgcatcggaagttgcaagggcaatacaaggctcccaggcattatgatgttgggctacgtggctgcacactcagaaaacttggccatggctgtgattatttccaagggcgtaccccaactgtccgtgtgcctcagcgaggagccagaagatcatattaaggcagccgccgcctgggcactggggcagatcgggcgacacacccccgagcatgcgagagctgtcgccgtgactaacaccctgccagtgctgttatccctctacatgtcaacagagagctccgaggacttacaggtcaaaagtaagaaggcaattaagaacattttgcaaaaatgcacatatctgccagccttagagccgtttctgtatgatgccccacccaatatcctgaaacacgtggtgggccagttctctaaggttctgttcccttggatttttaggtacacctcggccgagggcggacagctgtcgacaacttag

SEQ ID NO: 249171 - DNA, 1377 bp, Artificial Sequence
  derived and/or modified sequence
atgagccagaggcaggtgctgcaggtgtttgagcagtaccagaaggcccggacccagtttgtgcagatggtggccgagctggccacccggccccagaacatcgagaccctgcagaatgctggggtgatgagcctgctgcggaccctgctgctggatgtggtgcccaccatccagcagacagctgccctggccctgggccgcctggccaactacaatgatgacctggccgaggccgtggtgaagtgtgacatcctgccccagctggtgtacagcctggccgagcagaaccgcttctacaagaaggctgctgcctttgtgctgcgggctgtgggcaagcacagcccccagctggcccaggccatcgtggactgtggggccctggacaccctggtgatctgcctggaggactttgatcctggggtgaaggaggccgccgcctgggccctgcgctacatcgcccggcacaatgctgagctgagccaggccgtggtggatgctggagctgtgcccctgctggtgctgtgcatccaggagcctgagatcgccctgaagagaattgctgccagcgccctgagtgacatcgccaagcacagccctgagctggcccagacagtggtggatgctggagctgtggcccacctggcccagatgatcctgaacccagatgccaagctgaagcaccagatcctgagcgccctgagccaggtgtccaagcacagcgtggacctggccgagatggtggtggaggccgagatcttccctgtggtgctgacctgcctgaaggacaaggatgaatatgtgaagaagaatgccagcaccctcatccgggagatcgccaagcacaccccagagctgagccagctggtggtgaatgctgggggcgtggccgctgtgattgactgcatcggcagctgcaagggcaacacccggctgcccggcatcatgatgctgggctacgtggccgcccacagcgagaacctggccatggccgtcatcatcagcaaaggagtgccccagctgtctgtgtgcctgtctgaggagcctgaggaccacatcaaggctgctgctgcctgggccctgggccagatcggccgccacaccccagagcacgcccgggctgtggccgtgaccaacaccctgcctgtgctgctgagcctgtacatgagcacagagagcagcgaggacctgcaggtgaagagcaagaaggccatcaagaacatcctgcagaagtgcacctacctgcctgccctggagcccttcctgtatgatgccccacccaacatcctgaagcacgtggtgggccagttcagcaaggtgctcttcccctggatcttccgctacaccagcgctgagggcggccagctgagcaccacctag

SEQ ID NO: 249172 - DNA, 1377 bp, Artificial Sequence
  derived and/or modified sequence
atgagccagcggcaggtgctgcaggtgttcgagcagtaccagaaggccaggactcagtttgttcagatggtggccgaactcgccactcgcccccagaacatcgaaactctccagaatgcaggggttatgtcgttactcagaacccttttgctcgacgttgttcccacaattcagcagacagcggcattggcccttggccgcctggcaaactataacgatgacttggcagaggccgttgtcaagtgcgatatactgccccagcttgtctatagcctggccgagcagaatcgattctataaaaaggctgccgcgttcgtgctgagagctgtcggtaagcacagcccgcagctggcgcaggctattgttgactgtggagcgcttgatactttggtgatatgcttagaggatttcgatccgggagttaaggaggccgctgcctgggccctacgctacattgctaggcataatgcagagctttcacaagccgttgttgatgcgggggctgtccctttgttagtcttgtgcatccaggaaccagagattgcccttaaacgaattgctgctagcgcactcagcgacattgctaagcactctccagaactcgcacagacagtggttgatgccggggcagtagctcatctggcgcagatgattctgaacccagacgcaaagctcaaacaccaaattttgtccgcattgtcacaggtgagcaagcacagcgttgacttggccgaaatggtggtcgaggccgaaatcttcccggtggtactgacatgcctgaaggacaaggacgagtacgtgaagaagaacgccagcaccctcattcgcgagattgctaaacacaccccagagctgtcccagctggtggtaaacgcggggggcgtggctgccgtcatcgattgcattggctcttgcaaaggcaatacacggctccctgggattatgatgctgggttacgtagccgcccactccgagaatctggccatggctgtgattatctctaagggcgtgcctcagctcagcgtctgtctctctgaagaacccgaggaccacattaaagcggcagctgcttgggctttaggtcaaatcggccgacataccccagaacatgccagagctgtggcggtgacaaatacgttgcctgtgctgctatccttgtacatgagtaccgagagctccgaggatctccaggtgaaatccaagaaggctattaaaaacattcttcagaaatgtacttacctcccggctctggagccattcctgtacgatgccccaccaaacatcctgaaacacgtagtcggtcagttttccaaagtactctttccttggatctttcgctacacatctgcagagggagggcagctgagtacgacttag

SEQ ID NO: 249173 - DNA, 1377 bp, Artificial Sequence
  derived and/or modified sequence
atgagccagcgtcaggtgctgcaggtctttgagcagtatcaaaaagcccgaacccagttcgtccagatggttgctgagttagcaaccaggccgcagaatattgagaccctgcagaacgccggtgtgatgagtctgctacgaaccctgcttctagacgtagtgcctaccattcagcaaacggccgcacttgccctaggcaggctagccaattacaatgatgatctggccgaggccgtggtgaagtgcgacattctgccccagctggtgtattctcttgcagaacaaaatcgtttctacaaaaaagcagcagcattcgttctgcgtgcggttggtaaacattctccacagctcgctcaggccattgttgactgcggagcgttggacacactggtgatctgtctggaggacttcgacccgggagtgaaagaagccgctgcgtgggcactgaggtacatagccagacataacgcggaactgtctcaggccgtcgtggatgccggagctgtccccctcctggttctgtgcatacaggaaccagagattgcgctcaaacggattgctgcttctgccctgtcagatattgccaaacactcccccgagctcgctcagactgtggtggatgcaggtgccgttgctcacttggcccagatgatcctgaacccagatgccaagctaaaacatcagatactcagcgcgctgtcacaggtttcgaaacactccgttgacctcgcagaaatggttgtggaggctgaaattttccccgtagtactgacctgtctaaaagataaagacgaatacgttaagaagaatgcttccactctgataagagagattgcgaagcacaccccagaactcagtcagctcgtggtcaacgccggaggggtagcggctgttatcgattgtataggatcttgcaaaggtaatacgcgactgcctggtattatgatgcttggctacgtggctgctcattcagagaacctggccatggccgtcatcatttctaagggtgtacctcagctatccgtctgcttgagcgaagagccggaagaccacatcaaagctgctgctgcctgggccctgggacagatagggcgtcacactcctgagcacgcaagggccgtcgccgttacaaacacactccctgttctgctttctttatatatgagtacagaatccagtgaggacctccaggttaagtcaaaaaaggccattaaaaacatcttacaaaagtgcacgtaccttcctgccctcgagccttttctgtacgacgcacctccaaatattttaaagcacgtggtgggccagttttctaaagtgttgtttccttggattttcagatacacatctgcggagggaggtcagctctcaacgacatag

SEQ ID NO: 249174 - DNA, 2421 bp, Artificial Sequence
  derived and/or modified sequence
gagaagcggctcccgtcggaggccgagtcgtcgccacgatcgcccccttggtggactcgcaggccgagcggcttccccgcagagctcgaggagggcagacggcggcgggggcgccatgagtcagaggcaggtgctgcaagtgttcgagcaataccagaaggccaggacccagttcgtgcagatggtggcggagctggcgactagaccccaaaacatcgagacgctgcagaacgcgggtgtaatgtctttgctgagaactcttcttctggacgtggtcccaacaattcaacagactgctgctttggctcttgggagactggccaattataatgatgacctagcagaagctgttgtgaagtgcgacattcttccacagcttgtttattcattggcagaacagaatcgcttctacaagaaagcagctgcctttgtgttacgagcagttggtaaacattctccccagctagctcaggcaatagtcgattgtggagcactggatacgctggtcatatgcttggaagattttgaccctggagtcaaggaggctgcagcctgggcacttagatatattgcaagacataatgcagaactgtcacaagctgtggtggatgcaggagctgttcctcttttagtactctgtatccaggagccagaaattgctttgaaaaggattgctgcttcggccctcagtgatattgcaaagcattctccagagttagcacagacagtagtggatgcaggagctgttgctcatttagcccagatgatcctgaaccctgatgctaaattgaagcatcagatcctttcagctctcagtcaggtttcaaaacattccgtggatctggcagaaatggttgttgaagcagagatttttccagttgtacttacctgtctgaaggacaaggatgaatacgtgaagaaaaatgcttctactttaattagagagattgcaaaacatacacccgagctttcacagctggtagttaacgcaggaggggttgctgccgtgattgactgcattgggtcctgcaaagggaacacacggctgcctggcatcatgatgcttggttatgtagcagctcattctgagaacctagcaatggcagtcatcatttctaagggtgtaccccagttgtcagtctgcttgtcagaagaaccggaagatcatattaaggctgcagctgcttgggccttaggacagattggaagacacactcctgaacacgcacgggctgttgcagtcacaaatactttgccagttctgctttctttgtacatgtcaacagaaagttctgaggatctccaagtaaaaagtaaaaaagccataaagaatatcctgcaaaaatgtacctacttaccagcccttgaaccatttctatatgatgctcctcccaatattctgaaacatgtggttggacagttcagtaaggtattattcccctggatattcagatacacttctgcagagggtggacagctatcaaccacttaataactgagcaaagttatattgtgatactcaaattcacagcagagtagttttgagtaacagtaattaaatccttctaaatatttgaactaagtatattctagatttatttaatgggaaatacctttagataatattttctaaatttatgtaatactttaaacattcgtagcttgaatatgtgaggaactattcatggtcattcgcatgcataggatttgttctacaggtagattttaaaaacacgttaaagggccttaaggcattttgttattctgttaaaaaccacacacactcgtacatgcagacacctccaatgagatatagttaagagatggcattcaaaaaccctaaattattctagccaatttgtcataggcataggcaaggaaagctggccttgctaactatatagtagtatacacaagagaaatctttgaaggaggaaactgatgacagatatacagggcacttgaaggagactctgatgctagttatataagtgcattaacttaagacacggactctgtgggtaacctgttaggttttactaagaatttaggaaaaatttactcctctttatcacaagttttccaaacctccttccccaccctatctaaagtgttccttacctttcatgggcccagcgagggtagaattcagaatagagagttatactcctgcatacatgctctccctctcattgaaaggtttcttagtctagctctgctcatgaatgaacaaagaagcaggcatgtaaaatggatccttgtcctaacgtcactttcccaagtttcaaaagtcacattttcaggtatttaaggaatagtttgaagctaataccatcaggctcagagtttacatgcatttttacttaggaagtggtaaacgggtgaaagagggtttcaataaaattttaaataaaaacagca

SEQ ID NO: 249175 - protein, 256 aa, Artificial Sequence
  derived and/or modified sequence
MMPQEQYTHHRSTMPGSVGPQVYKVGIYGWRKRCLYFFVLLLMILILVNLAMTIWILKVMNFTIDGMGNLRITEKGLKLEGDSEFLQPLYAKEIQSRPGNALYFKSARNVTVNILNDQTKVLTQLITGPKAVEAYGKKFEVKTVSGKLLFSADNNEVVVGAERLRVLGAEGTVFPKSIETPNVRADPFKELRLESPTRSLVMEAPKGVEINAEAGNMEATCRTELRLESKDGEVRDEKDRSSKSYSFNRPTLPITG

SEQ ID NO: 249176 - DNA, 1576 bp, Artificial Sequence
  derived and/or modified sequence
agagaggacttatctccagcatctagcactacagagcagaggctgtgtggagaatggctgaaaaatcagaattggttgtagaagcagttttctttctggttgtgagtatgagcccggcagacaccatgagcgctgttgcaggggagtcggcctgtgcttgacacatgtgtttcccattgatagctggagacagcccagtagctgtgagtcggtctgacaaagccatattgaagtacggagtacggtttcaaagcagtcagaaaaagaacgggaatgctgttcaggaaattcttcaggcatgggcagggacttggctgcagttctgcagttggaaaatctgactggggcagcttctgagcgcaggctgggcctgcacacactcagcgggccgagtggccacctccttcagagctgctcagcacgccctgggatcgcgggcggttttcatcggccggtttgtgaaacggacaagagagagacattactgccgggagtgttgagtgaagggaccaggtggagatgatgcctcaggagcagtacactcaccaccggagcaccatgcctggctctgtggggccacaggtatacaaggtggggatttatggctggcggaaacgatgcctgtatttctttgtcctgctcctcatgattttaatactggtgaacttggccatgaccatctggattctcaaagtcatgaacttcacaattgatggaatgggaaacctgaggatcacagaaaaaggtctaaagctagaaggagactctgaattcttacaacctctctacgccaaagaaatccagtcccgaccaggtaatgccctgtacttcaagtctgccagaaatgttacagtgaacattctcaatgaccagactaaagtgctaactcagcttataacaggtccaaaagccgtagaagcttatggtaaaaaatttgaggtaaaaactgtttctggaaaattgctcttctctgcagacaataatgaagtggtagtaggagctgaaagattacgagttttaggagcggagggcacagtgttccctaaatctatagaaacacctaatgtcagggcagaccccttcaaagaactaaggttggagtccccaacccggtctctagtgatggaggccccaaaaggagtggaaatcaatgcagaagctggcaatatggaagccacctgcaggacagagctgagactggaatccaaagatggagaggtgagggatgagaaggacagaagttcaaagagctacagcttcaacaggccaacccttcccataactggttgacctcggagttggatcctacagtgtatcaacaaaaggagccaagcaggttttatttctgaaacaattaattgagcagcatgattataagccaaacccacaatccatcaaagtgatgatttcttatttgtaaaatgcagagataatggcatgtattccaagtacagaattatatgaccatgaaaatgaatgctattttcaaattctctcttgtcaccttaaaataagattttgttagccaacataattaagctgtatatattatacacatctggctcaagatgaaaaa

SEQ ID NO: 249177 - DNA, 771 bp, Artificial Sequence
  derived and/or modified sequence
atgatgccccaggaacagtatacacaccaccgcagcacaatgccgggtagcgtgggtccgcaggtgtacaaagtagggatatatgggtggcgcaaacgctgcctctactttttcgttctgctgctgatgattctgatactggtgaatttggcaatgacaatttggattctcaaggtcatgaatttcactattgatggcatgggcaacctgcggatcaccgaaaaagggctcaagcttgagggggacagcgagtttctgcaacctctgtatgccaaagagattcagagcaggccggggaatgcgctctatttcaaaagcgctaggaatgtgacggtgaacatcttgaatgatcagaccaaggtgctaacccagctaataacagggcctaaggcagtagaggcctacggaaaaaaatttgaggtgaagacagtatccggaaaactcttattttcggctgacaataatgaagtagttgtgggagccgagcgcttgcgagtgctcggcgctgagggtaccgtgtttcccaagtctatcgagacaccgaatgttcgggccgatccctttaaggagctacgcctggaatcacccacccggagtcttgtgatggaagcccctaaaggtgtggagattaacgcagaagcaggaaacatggaagccacttgtcgaacagagctgcgtctggagtctaaggatggagaggttcgagacgagaaagatcgttctagcaaaagctattcctttaaccgccccacacttccaattaccggatag

SEQ ID NO: 249178 - DNA, 771 bp, Artificial Sequence
  derived and/or modified sequence
atgatgccgcaggagcagtacacacaccacagatctaccatgcctggaagcgtagggccacaggtatacaaagtcggaatttacggctggagaaagcgatgtctgtacttcttcgttctgcttctgatgatcttgatcttggtgaatcttgctatgacaatctggatcctaaaagtgatgaactttaccatcgatggcatggggaatttacggatcaccgagaaaggcctcaaattagagggcgactccgaattcttacagcccctttacgccaaagaaatacaatcccggccgggtaacgctctatatttcaagtcagccagaaatgtcacagtaaatatcctaaacgaccagaccaaggtgctgacacagctgataacagggcccaaagctgtggaggcctacggcaagaaatttgaagtgaaaactgtcagcggcaaactccttttctccgctgataataacgaggtcgttgtaggcgctgaacgcctgagagttctaggtgcggaagggaccgttttccctaaatccattgagacacccaacgttcgcgccgacccctttaaggagttgcgcctggaaagccctacaagatccttggtaatggaagctccaaagggtgtcgaaatcaatgctgaggctgggaatatggaggctacttgccggactgaattaagactcgagtctaaggatggagaagttagagacgagaaggatcgatcctcaaaatcatactctttcaatcggcccactctgcctatcactgggtag

SEQ ID NO: 249179 - DNA, 771 bp, Artificial Sequence
  derived and/or modified sequence
atgatgccccaggagcagtacacccaccacaggagcaccatgcctggctctgtgggcccccaggtgtacaaggtgggcatctacggctggaggaagcgctgcctgtacttctttgtgctgctgctgatgatcctgatcctggtgaacctggccatgaccatctggatcctgaaggtgatgaacttcaccattgatggcatgggcaacctgcgcatcacagagaagggcctgaagctggagggggacagcgagttcctgcagcccctgtatgccaaggagatccagagcaggcctggaaatgccctgtacttcaagagcgccagaaatgtgacagtgaacatcctgaatgaccagaccaaggtgctgacccagctgatcaccggccccaaggctgtggaggcctacggcaagaagtttgaggtgaagacagtgtctgggaagctgctcttctctgctgacaacaatgaggtggtggtgggcgctgagcggctgcgggtgctgggcgctgagggcaccgtcttccccaagagcattgagacccccaacgtgcgggctgaccccttcaaggagctgcggctggagagccccaccaggagcctggtgatggaggcccccaagggcgtggagatcaatgctgaggccggcaacatggaggccacctgcaggacagagctgcggctggagagcaaggatggagaggtgagagatgagaaggacaggagcagcaagagctacagcttcaaccggcccaccctgcccatcactggatag

SEQ ID NO: 249180 - DNA, 771 bp, Artificial Sequence
  derived and/or modified sequence
atgatgccccaggagcagtacacccaccaccggagcaccatgcccgggtcggtgggaccgcaggtctacaaggttggcatctatggctggagaaagcggtgtctgtacttttttgttctactgcttatgattctgatactggttaatttagcgatgaccatttggattctcaaagtcatgaacttcacaatcgatggtatggggaacttgcggatcacagaaaagggtttaaaactagagggagactccgaatttctgcagcccctatatgccaaggaaatacagtccaggcctgggaatgctttatattttaagagcgcgcggaatgtcacagtgaatatcctgaacgatcagaccaaggtccttacccaacttataacagggccaaaagcagtcgaggcctacggcaaaaagttcgaagtcaagaccgttagtggcaaactgctgtttagtgctgacaacaacgaagtcgtggtgggcgccgagcgtctgcgcgtgctgggagccgagggaaccgtgtttccaaagtcaattgagactccgaatgtccgggctgatcccttcaaagagctgcggcttgaatcacccacgcggtctctggtgatggaagctcctaagggcgtggaaatcaacgccgaggcaggcaacatggaggccacctgtaggacagagctgcgcttggagtcaaaggatggggaagtcagggacgagaaggaccggagtagcaagtcctactccttcaatcggcctacgctccccatcaccgggtag

SEQ ID NO: 249181 - DNA, 771 bp, Artificial Sequence
  derived and/or modified sequence
atgatgccccaggagcagtacacccaccaccggagcaccatgcccggttcggtcgggcctcaggtgtacaaagtagggatttatgggtggcgaaagagatgtctgtatttctttgtgctcctgttgatgatcctgatcctcgtgaacctagccatgacaatatggattttaaaggtcatgaacttcactatcgacgggatggggaatctgcgcattacggagaagggcctgaagctggagggtgatagcgagttcctccagccgttgtacgcgaaagaaatccagtctcggcccggaaatgccttgtatttcaagagcgctagaaatgtaactgtcaacattcttaatgatcaaactaaagtgctgacccaactgattacggggcctaaagctgtggaagcatatggaaagaaatttgaagttaaaacagtctcagggaagctcctgttctcagccgataataacgaagtcgttgtgggggcggaaagactgagggtcctaggggctgaaggaaccgtcttccccaaatctatagaaacgcctaatgtcagggctgaccctttcaaggagctccgccttgaaagtcccactagatccttggtgatggaggccccaaaaggagtcgagattaatgccgaggccggcaacatggaggctacttgccgtacggagctgcggcttgaatctaaggacggagaagtgagggacgagaaagaccgctcaagcaaatcttattcattcaaccggccaacattacctatcactggatag

SEQ ID NO: 249182 - DNA, 771 bp, Artificial Sequence
  derived and/or modified sequence
atgatgccccaagagcagtatacacaccacagaagcacgatgccaggcagcgtgggccctcaagtgtacaaggttggcatttatggatggcgcaagaggtgtctgtattttttcgtccttcttttgatgatcctaattctcgtgaatctcgctatgaccatctggatactgaaggtaatgaattttactattgacggaatggggaatctgcggatcactgagaaaggcttgaagctggaaggtgacagcgagtttctccaaccactttacgctaaggaaatccagagcaggccaggcaatgctttgtactttaagtcagcacgcaacgtcacagtgaatattctaaatgatcagacaaaggtactcacccagctgatcactggtcccaaagccgtagaggcatatggcaagaagttcgaagtgaaaaccgtgtctggtaagctcctgtttagcgcggacaataatgaagttgtggtcggtgccgagaggttgcgcgtactcggtgcggagggtactgtgttcccaaagagcattgagacccccaatgtgagggccgacccatttaaggagcttcgcttagagtcccccacacggtcgttggttatggaggcacctaaaggagtcgaaatcaatgccgaggccggtaacatggaagccacgtgtcgtactgagctgcgcttggagtccaaggatggggaagtgcgagatgagaaggacaggtcatccaaatcctattctttcaaccgccctaccctgccaattaccggatag

SEQ ID NO: 249183 - DNA, 771 bp, Artificial Sequence
  derived and/or modified sequence
atgatgccacaggaacagtacactcaccataggtctaccatgcccggaagcgtcggtcctcaggtctataaggttggaatatacggttggcgcaaaaggtgcttatacttcttcgttctgctgcttatgattctcatcctggtgaatctggcgatgacaatatggatcctcaaagtcatgaattttactattgacggtatgggaaacctaaggatcaccgagaaaggactgaaactcgagggcgactcggaatttctccagcctctgtacgccaaggagatccagagcagacctggtaatgccttgtacttcaagtccgccagaaatgtgactgtgaatatactgaacgatcagaccaaagttctcacacagctgataaccggccctaaggctgttgaggcttatggcaagaaattcgaagtcaagactgtgagcgggaagctgttattctccgcagataacaatgaggttgtggtaggcgctgaaaggctgagagttttgggtgctgaaggaacagtatttcccaaaagcatcgagacccccaatgtgcgggctgatcctttcaaggagctccggttagaatcacccacgcgcagtctggtgatggaagctcctaagggagtggaaattaacgctgaggcagggaatatggaggctacctgcaggacagaactgaggctcgagtcaaaagacggcgaggtgagggatgaaaaggataggagtagcaagagttactccttcaatcgccctaccttgcccatcactggatag

SEQ ID NO: 249184 - DNA, 1571 bp, Artificial Sequence
  derived and/or modified sequence
agagaggacttatctccagcatctagcactacagagcagaggctgtgtggagaatggctgaaaaatcagaattggttgtagaagcagttttctttctggttgtgagtatgagcccggcagacaccatgagcgctgttgcaggggagtcggcctgtgcttgacacatgtgtttcccattgatagctggagacagcccagtagctgtgagtcggtctgacaaagccatattgaagtacggagtacggtttcaaagcagtcagaaaaagaacgggaatgctgttcaggaaattcttcaggcatgggcagggacttggctgcagttctgcagttggaaaatctgactggggcagcttctgagcgcaggctgggcctgcacacactcagcgggccgagtggccacctccttcagagctgctcagcacgccctgggatcgcgggcggttttcatcggccggtttgtgaaacggacaagagagagacattactgccgggagtgttgagtgaagggaccaggtggagatgatgcctcaggagcagtacactcaccaccggagcaccatgcctggctctgtggggccacaggtatacaaggtggggatttatggctggcggaaacgatgcctgtatttctttgtcctgctcctcatgattttaatactggtgaacttggccatgaccatctggattctcaaagtcatgaacttcacaattgatggaatgggaaacctgaggatcacagaaaaaggtctaaagctagaaggagactctgaattcttacaacctctctacgccaaagaaatccagtcccgaccaggtaatgccctgtacttcaagtctgccagaaatgttacagtgaacattctcaatgaccagactaaagtgctaactcagcttataacaggtccaaaagccgtagaagcttatggtaaaaaatttgaggtaaaaactgtttctggaaaattgctcttctctgcagacaataatgaagtggtagtaggagctgaaagattacgagttttaggagcggagggcacagtgttccctaaatctatagaaacacctaatgtcagggcagaccccttcaaagaactaaggttggagtccccaacccggtctctagtgatggaggccccaaaaggagtggaaatcaatgcagaagctggcaatatggaagccacctgcaggacagagctgagactggaatccaaagatggagaggtgagggatgagaaggacagaagttcaaagagctacagcttcaacaggccaacccttcccataactggttgacctcggagttggatcctacagtgtatcaacaaaaggagccaagcaggttttatttctgaaacaattaattgagcagcatgattataagccaaacccacaatccatcaaagtgatgatttcttatttgtaaaatgcagagataatggcatgtattccaagtacagaattatatgaccatgaaaatgaatgctattttcaaattctctcttgtcaccttaaaataagattttgttagccaacataattaagctgtatatattatacacatctggctcaagatg

SEQ ID NO: 249185 - DNA, 1412 bp, Artificial Sequence
  derived and/or modified sequence
gtgatatctattgaagctgggagggtcacagtatcagtgagtggtcccccaatttcttcttgagcatcgatgaattagcagtggtgtaatattgtggatctgacttcatgtgtcactaagaacaggagatccaagactgctcttctggggatgagacttggaagaaacctccatcctcagggatttgaagaaggttatactggaacctgtgtgaaggctgagacaaccgtcccttttgtggtggcctgaggggattttcttaatcccaatgttgccctgaaatttatgtccaggattcaaaaagtttaggactgctaagagacattactgccgggagtgttgagtgaagggaccaggtggagatgatgcctcaggagcagtacactcaccaccggagcaccatgcctggctctgtggggccacaggtatacaaggtggggatttatggctggcggaaacgatgcctgtatttctttgtcctgctcctcatgattttaatactggtgaacttggccatgaccatctggattctcaaagtcatgaacttcacaattgatggaatgggaaacctgaggatcacagaaaaaggtctaaagctagaaggagactctgaattcttacaacctctctacgccaaagaaatccagtcccgaccaggtaatgccctgtacttcaagtctgccagaaatgttacagtgaacattctcaatgaccagactaaagtgctaactcagcttataacaggtccaaaagccgtagaagcttatggtaaaaaatttgaggtaaaaactgtttctggaaaattgctcttctctgcagacaataatgaagtggtagtaggagctgaaagattacgagttttaggagcggagggcacagtgttccctaaatctatagaaacacctaatgtcagggcagaccccttcaaagaactaaggttggagtccccaacccggtctctagtgatggaggccccaaaaggagtggaaatcaatgcagaagctggcaatatggaagccacctgcaggacagagctgagactggaatccaaagatggagaggtgagggatgagaaggacagaagttcaaagagctacagcttcaacaggccaacccttcccataactggttgacctcggagttggatcctacagtgtatcaacaaaaggagccaagcaggttttatttctgaaacaattaattgagcagcatgattataagccaaacccacaatccatcaaagtgatgatttcttatttgtaaaatgcagagataatggcatgtattccaagtacagaattatatgaccatgaaaatgaatgctattttcaaattctctcttgtcaccttaaaataagattttgttagccaacataattaagctgtatatattatacacatctggctcaaga

SEQ ID NO: 249186 - DNA, 768 bp, Artificial Sequence
  derived and/or modified sequence
atgatgccccaggagcagtacacccaccaccgcagcaccatgcccggcagcgtgggcccccaggtgtacaaggtgggcatctacggctggcgcaagcgctgcctgtacttcttcgtgctgctgctgatgatcctgatcctggtgaacctggccatgaccatctggatcctgaaggtgatgaacttcaccatcgacggcatgggcaacctgcgcatcaccgagaagggcctgaagctggagggcgacagcgagttcctgcagcccctgtacgccaaggagatccagagccgccccggcaacgccctgtacttcaagagcgcccgcaacgtgaccgtgaacatcctgaacgaccagaccaaggtgctgacccagctgatcaccggccccaaggccgtggaggcctacggcaagaagttcgaggtgaagaccgtgagcggcaagctgctgttcagcgccgacaacaacgaggtggtggtgggcgccgagcgcctgcgcgtgctgggcgccgagggcaccgtgttccccaagagcatcgagacccccaacgtgcgcgccgaccccttcaaggagctgcgcctggagagccccacccgcagcctggtgatggaggcccccaagggcgtggagatcaacgccgaggccggcaacatggaggccacctgccgcaccgagctgcgcctggagagcaaggacggcgaggtgcgcgacgagaaggaccgcagcagcaagagctacagcttcaaccgccccaccctgcccatcaccggc

SEQ ID NO: 249187 - DNA, 771 bp, Artificial Sequence
  derived and/or modified sequence
atgatgccccaggagcagtacacccaccacagaagcaccatgcccggcagcgtgggcccccaggtgtacaaggtgggcatctacggctggagaaagagatgcctgtacttcttcgtgctgctgctgatgatcctgatcctggtgaacctggccatgaccatctggatcctgaaggtgatgaacttcaccatcgacggcatgggcaacctgagaatcaccgagaagggcctgaagctggagggcgacagcgagttcctgcagcccctgtacgccaaggagatccagagcagacccggcaacgccctgtacttcaagagcgccagaaacgtgaccgtgaacatcctgaacgaccagaccaaggtgctgacccagctgatcaccggccccaaggccgtggaggcctacggcaagaagttcgaggtgaagaccgtgagcggcaagctgctgttcagcgccgacaacaacgaggtggtggtgggcgccgagagactgagagtgctgggcgccgagggcaccgtgttccccaagagcatcgagacccccaacgtgagagccgaccccttcaaggagctgagactggagagccccaccagaagcctggtgatggaggcccccaagggcgtggagatcaacgccgaggccggcaacatggaggccacctgcagaaccgagctgagactggagagcaaggacggcgaggtgagagacgagaaggacagaagcagcaagagctacagcttcaacagacccaccctgcccatcaccggctag

SEQ ID NO: 249188 - protein, 377 aa, Artificial Sequence
  derived and/or modified sequence
MLLLVTSLLLCELPHPAFLLIPEKSDLRTVAPASSLNVRFDSRTMNLSWDCQENTTFSKCFLTDKKNRVVEPRLSNNECSCTFREICLHEGVTFEVHVNTSQRGFQQKLLYPNSGREGTAAQNFSCFIYNADLMNCTWARGPTAPRDVQYFLYIRNSKRRREIRCPYYIQDSGTHVGCHLDNLSGLTSRNYFLVNGTSREIGIQFFDSLLDTKKIERFNPPSNVTVRCNTTHCLVRWKQPRTYQKLSYLDFQYQLDVHRKNTQPGTENLLINVSGDLENRYNFPSSEPRAKHSVKIRAADVRILNWSSWSEAIEFDHLGGIHPRGRERLPRRGLDREGNYLRPRGCRNGMDISASATRGNCFLDDAVNLYIIFYVFI

SEQ ID NO: 249189 - DNA, 1134 bp, Artificial Sequence
  derived and/or modified sequence
atgcttttactcgtgaccagcttgctcctgtgtgaactgccacatcctgctttcctcctgattccagaaaagtccgacctgaggaccgtagcacccgctagcagtcttaatgtgcggttcgactctaggactatgaatctctcatgggactgtcaggagaatacaacctttagcaagtgcttcctaaccgataaaaagaacagagtggtggaaccgcgactctcgaacaatgaatgtagctgcacattcagagaaatttgtctccacgagggtgtgacctttgaagtgcatgtaaacacatcgcagcgaggtttccagcagaagctgctctaccccaacagtggccgtgaaggaaccgctgcccaaaattttagttgcttcatctacaatgcagacctaatgaattgtacttgggcccgcgggccaaccgcacctcgtgatgtgcagtacttcctctacattcgcaactcaaagagaaggcgcgagatacgttgtccctactatatccaagacagtggcacccatgtaggatgccacctcgacaacctctcaggactcacttccaggaactacttcttggtgaacggtaccagccgcgagatcggtattcagtttttcgacagtcttttggatactaaaaagatcgagcgctttaaccctccctctaacgtaactgtcagatgtaataccacccattgcctcgtacgctggaaacagcccaggacataccaaaagctgtcatacttagatttccaatatcagctggacgtgcatcggaaaaatacccagcccggaaccgagaatcttctaataaatgtctcaggcgacctggagaatcggtacaactttccttcctccgagccaagggcgaagcattcagtaaagatacgagcagcggacgtaagaatcctgaactggtcctcctggagtgaagctatcgagttcgaccaccttggtggcatacatccacgcggcagggaaaggcttccgagacgtggcttggaccgggaaggcaactacctaaggccacgtgggtgccgcaacggaatggatatctctgcttccgccacccggggtaactgttttttggacgacgcggtgaatttgtacatcatcttttacgtgttcatctag

SEQ ID NO: 249190 - DNA, 1134 bp, Artificial Sequence
  derived and/or modified sequence
atgctgctgctggtgaccagcctgctgctgtgtgagctgccccacccagccttcctgctgatccctgagaagagtgacctgaggacagtggccccagccagcagcctgaatgtgcgctttgacagcaggaccatgaacctgtcctgggactgccaggagaacaccaccttcagcaagtgcttcctgacagacaagaagaacagagtggtggagccccggctgagcaacaatgaatgtagctgcaccttccgggagatctgcctgcatgaaggagtgacctttgaggtgcacgtgaacaccagccagaggggcttccagcagaagctgctgtaccccaacagcggccgggagggcacagctgcccagaacttcagctgcttcatctacaatgctgacctgatgaactgcacctgggcccggggccccacagcccccagagatgtgcagtacttcctgtacatccggaacagcaagagaagaagagagatccgctgcccctactacatccaggacagcggcacccacgtgggctgccacctggacaacctgagcggcctgaccagcaggaactacttcctggtgaatggcaccagccgggagatcggcatccagttctttgacagcctgctggacaccaagaagattgagcgcttcaacccccccagcaatgtgacagtgcgctgcaacaccacccactgcctggtgcgctggaagcagcccaggacctaccagaagctgagctacctggacttccagtaccagctggatgtgcacaggaagaacacccagcccggcacagagaacctgctgatcaacgtgtctggggacctggagaaccgctacaacttccccagcagcgagccccgggccaagcacagcgtgaagatccgggctgctgatgtgcgcatcctgaactggagctcctggagcgaggccattgaatttgaccacctgggcggcatccacccccggggccgggagcggctgccccggcggggcctggaccgggagggcaactacctgcggccccggggctgcagaaatggcatggacatcagcgccagcgccacccggggcaactgcttcctggatgatgctgtgaacctgtacatcatcttctacgtgttcatctag

SEQ ID NO: 249191 - DNA, 1134 bp, Artificial Sequence
  derived and/or modified sequence
atgctgctgctggtgaccagcctgctgctgtgcgagctgccccacccagcttttcttttgatccccgagaagagtgacttaagaaccgtagcaccagccagcagtctgaatgtgcggtttgactccaggacgatgaacctttcttgggactgccaggaaaacactacctttagcaagtgtttccttaccgataagaaaaatagagtggtggagcctagactctcaaacaacgagtgtagctgcaccttcagggaaatttgcctgcatgagggtgtgacatttgaggttcacgtgaatacttcccaacgaggatttcagcaaaagctgttgtaccccaacagcgggagggaagggacggccgctcaaaattttagttgttttatctataacgccgaccttatgaattgcacatgggccagaggtcctactgcacccagggatgtgcagtatttcctatatatccgcaacagtaagagaaggcgtgagatcagatgtccttattacattcaggactccggcacccatgtcggctgtcacctggataacctgtctgggctgactagccgcaattacttcctggtcaacggcaccagtagagagattggcatccagtttttcgactccctactcgataccaagaagatcgagagattcaatccaccaagcaatgtgacagtgagatgtaataccactcactgcctcgtgcgctggaaacagccaagaacctaccaaaaactgagttatctggatttccagtatcagctggatgtgcacagaaagaacacacagcctggcacggaaaacctgttgattaatgtaagcggagatctcgaaaacagatataactttccaagttcagagccacgggcaaagcattctgtgaagattcgagcagccgatgtgagaatcctcaactggagctcctggagcgaggccatcgagttcgatcatctgggcggtatccaccccaggggcagggagagactgccccgaagggggctcgatcgggagggcaactacctgcggcctcgcggatgccgaaatggtatggatatatctgcaagcgccactagggggaactgttttctggacgatgcagtcaatctttacataattttttacgtttttatttag

SEQ ID NO: 249192 - DNA, 1134 bp, Artificial Sequence
  derived and/or modified sequence
atgttacttctggttacttccctgttgttgtgcgaacttccgcatccggctttccttctgatccctgagaaatcagatctgcggacagtggccccagcaagctcgttgaacgttagatttgatagtagaaccatgaacctgtcttgggactgtcaggagaacaccactttttctaaatgtttcctgacggacaagaagaaccgagtcgtcgagccaagattatcaaacaacgagtgtagctgcaccttccgtgagatctgcctgcatgagggcgtcacttttgaggtccatgtgaacacaagtcagagaggtttccagcagaagttgctgtatcccaactcgggtagggaagggaccgcagcacagaactttagctgttttatctataacgccgatctgatgaactgcacctgggctaggggcccaacagcacctagggacgttcagtatttcttgtatatcagaaacagcaagaggcgacgtgagatccggtgcccctactacattcaggactcggggactcacgtgggctgtcacttagataatctgtctggcctgacgagccggaattacttcctggtgaacggaacctccagggagatcgggattcagttttttgatagcctgcttgacactaaaaagatcgaaagattcaatccgccttccaacgtgacagttaggtgcaacactacacattgtctggtgcggtggaaacagccacgaacctaccagaagctcagttacctggacttccagtatcaactggacgttcaccgcaaaaatacgcaacctgggactgaaaatctgttaatcaacgtgagcggagatctcgaaaaccgctacaacttcccttccagcgagcctagggccaagcactccgtgaaaatccgggctgccgacgtccggattctgaactggtcctcgtggtctgaggctatcgagttcgaccatttgggtgggattcaccccaggggcagagaaagactccccagacggggattggacagagagggcaactacctgcgacccaggggatgccgcaacggtatggatatttctgccagcgcaacccggggaaactgctttctagacgatgcagtgaacttgtacatcattttttatgtgtttatctag

SEQ ID NO: 249193 - DNA, 1628 bp, Artificial Sequence
  derived and/or modified sequence
agcaggtggaaggagaggaagcggatgccgtggggtttacagcaggaaaatccgtggagacagcagatccgagaagcggcgatgtttgcgtagaaccctgtacgtgcttccttcggcctgtcgctcttcccttctctctgaccagcaccatgcttctcctggtgacaagccttctgctctgtgagttaccacacccagcattcctcctgatcccagagaaatcggatctgcgaacagtggcaccagcctctagtctcaatgtgaggtttgactccaggacgatgaatttaagctgggactgccaagaaaacacaaccttcagcaagtgtttcttaactgacaagaagaacagagtcgtggaacccaggctcagtaacaacgaatgttcgtgcacatttcgtgaaatttgtctgcatgaaggagtcacatttgaggttcacgtgaatactagtcaaagaggatttcaacagaaactgctttatccaaattcaggaagggagggtaccgctgctcagaatttctcctgtttcatctacaatgcggatttaatgaactgtacctgggcgaggggtccgacggccccccgtgacgtccagtattttttgtacatacgaaactcaaagagaaggagggagatccggtgtccttattacatacaagactcaggaacccatgtgggatgtcacctggataacctgtcaggattaacgtctcgcaattactttctggttaacggaaccagccgagaaattggcatccaattctttgattcacttttggacacaaagaaaatagaacgattcaaccctcccagcaatgtcaccgtacgttgcaacacgacgcactgcctcgtacggtggaaacagcccaggacctatcagaagctgtcgtacctggactttcagtaccagctggacgtccacagaaagaatacccagcctggcacggaaaacctactgattaatgtttctggtgatttggaaaatagatacaactttccaagctctgagcccagagcaaaacacagtgtgaagatcagagctgcagacgtccgcatcttgaattggagctcctggagtgaagccattgaatttgatcatctgggaggaattcaccccagaggaagggaaaggctaccgcgaagaggtcttgaccgtgaaggaaattacctgagacccagagggtgtaggaatggcatggacatctccgcctccgcgacacgggggaactgttttcttgatgatgctgtgaacctttatatcattttctatgtttttatttaaaaacatgacatttggggccaggcgcggtggctcacgcctgtaatcccagcactttgggaggccaaggcaggcggatcacctgaggtcaggagttcaagaccagcctgcccaacatggtgaaaccccatctggactaaaaatgcagaaatttacccaggcacggcggcggacgcccatcatcccagctacttgggaggctgaggcaggagaattgcttgaacccgtgaggcggaggttgtagtgagccaagatcgcaccattgcacaccaacctgcgtgacagagcaagattgcatctcaaaacaaacaataataataaataataaaaacctgatatttggctggg

SEQ ID NO: 249194 - DNA, 1134 bp, Artificial Sequence
  derived and/or modified sequence
atgctgctgctggtgaccagcctgctgctgtgcgagctgccccaccccgccttcctgctgatccccgagaagagcgacctgagaaccgtggcccccgccagcagcctgaacgtgagattcgacagcagaaccatgaacctgagctgggactgccaggagaacaccaccttcagcaagtgcttcctgaccgacaagaagaacagagtggtggagcccagactgagcaacaacgagtgcagctgcaccttcagagagatctgcctgcacgagggcgtgaccttcgaggtgcacgtgaacaccagccagagaggcttccagcagaagctgctgtaccccaacagcggcagagagggcaccgccgcccagaacttcagctgcttcatctacaacgccgacctgatgaactgcacctgggccagaggccccaccgcccccagagacgtgcagtacttcctgtacatcagaaacagcaagagaagaagagagatcagatgcccctactacatccaggacagcggcacccacgtgggctgccacctggacaacctgagcggcctgaccagcagaaactacttcctggtgaacggcaccagcagagagatcggcatccagttcttcgacagcctgctggacaccaagaagatcgagagattcaacccccccagcaacgtgaccgtgagatgcaacaccacccactgcctggtgagatggaagcagcccagaacctaccagaagctgagctacctggacttccagtaccagctggacgtgcacagaaagaacacccagcccggcaccgagaacctgctgatcaacgtgagcggcgacctggagaacagatacaacttccccagcagcgagcccagagccaagcacagcgtgaagatcagagccgccgacgtgagaatcctgaactggagcagctggagcgaggccatcgagttcgaccacctgggcggcatccaccccagaggcagagagagactgcccagaagaggcctggacagagagggcaactacctgagacccagaggctgcagaaacggcatggacatcagcgccagcgccaccagaggcaactgcttcctggacgacgccgtgaacctgtacatcatcttctacgtgttcatctag

SEQ ID NO: 249195 - protein, 233 aa, Artificial Sequence
  derived and/or modified sequence
MLLLVTSLLLCELPHPAFLLIPEKSDLRTVAPASSLNVRFDSRTMNLSWDCQENTTFSKCFLTDKKNRVVEPRLSNNECSCTFREICLHEGVTFEVHVNTSQRGFQQKLLYPNSGREGTAAQNFSCFIYNADLMNCTWARGPTAPRDVQYFLYIRNSKRRREIRCPYYIQDSGTHVGCHLDNLSGLTSRNYFLVNGTSREIGIQFFDSLLDTKKIGSLGYSGCSRQFHRSKTN

SEQ ID NO: 249196 - DNA, 702 bp, Artificial Sequence
  derived and/or modified sequence
atgctccttctggtaactagtctcttgctgtgcgagctgccgcaccccgccttcttgctgatcccagaaaaatccgaccttcggactgtagccccagctagttctctgaacgtgagattcgattccagaacaatgaacctgtcctgggactgccaggagaacactaccttcagtaaatgttttctgacagataagaagaaccgggtggtcgagcctagactgtcgaacaatgagtgttcttgcacgttcagagagatttgtctacacgagggggtgactttcgaagtccacgtcaatacaagccagcgtggctttcagcagaaactcctgtacccaaactcgggaagagaagggacggctgcccaaaatttttcatgtttcatttataacgccgatttaatgaactgcacctgggcccggggccccacagcccctagggatgtccagtacttcctgtatattaggaactcaaaaagacggcgggaaatcaggtgcccttactacatacaagactccggcactcacgtcgggtgtcacctggacaacctctccggactgacatcccgcaactatttcctggtgaacggtacctcccgcgagattggcatccaatttttcgatagcctgctcgatacaaaaaaaattggctccttgggctactcgggatgttcccgccagtttcatcgctccaaaacgaactag

SEQ ID NO: 249197 - DNA, 567 bp, Artificial Sequence
  derived and/or modified sequence
atgttgctgctcgtcacgtctctgctcctttgcgaacttcctcatccagccttcttacttatcccagagaagagcgacctgagaacggtcgcccctgccagttccttgaatgtcagatttgatagcaggactatgaacctctcctgggactgccaagagaacaccactttctcaaagtgttttcttacagacaagaaaaaccgagtggtggaaccacgactatcaaataacgaatgttcctgtacattccgagagatctgcctgcacgaaggtgtaacctttgaagttcacgtgaatacatcacaaagggggtttcagcagaagctgctgtacccaaactcgggaagagaggggaccgccgcccagaatttctcctgcttcatatacaatgccgacctgatgaattgtacttgggctcgaggtccaacggcaccaagagatgtccaatacttcctatacatccgcaatagcaaacgaagacgggaaataaggtgtccgtattacatccaggattccgggactcacgttggttgtcaccttgataatttgtctgggctgacctcttag

SEQ ID NO: 249198 - DNA, 702 bp, Artificial Sequence
  derived and/or modified sequence
atgctgctgctggtgaccagcctgctgctgtgtgagctgccccacccagccttcctgctgatccctgagaagagtgacctgaggacagtggccccagccagcagcctgaatgtgcgctttgacagcaggaccatgaacctgtcctgggactgccaggagaacaccaccttcagcaagtgcttcctgacagacaagaagaacagagtggtggagccccggctgagcaacaatgaatgtagctgcaccttccgggagatctgcctgcatgaaggagtgacctttgaggtgcacgtgaacaccagccagaggggcttccagcagaagctgctgtaccccaacagcggccgggagggcacagctgcccagaacttcagctgcttcatctacaatgctgacctgatgaactgcacctgggcccggggccccacagcccccagagatgtgcagtacttcctgtacatccggaacagcaagagaagaagagagatccgctgcccctactacatccaggacagcggcacccacgtgggctgccacctggacaacctgagcggcctgaccagcaggaactacttcctggtgaatggcaccagccgggagatcggcatccagttctttgacagcctgctggacaccaagaagattggcagcctgggctacagcggctgcagccggcagttccacaggagcaagaccaactag

SEQ ID NO: 249199 - DNA, 567 bp, Artificial Sequence
  derived and/or modified sequence
atgctgctgctggtgaccagcctgctgctgtgtgagctgccccacccagccttcctgctgatccctgagaagagtgacctgaggacagtggccccagccagcagcctgaatgtgcgctttgacagcaggaccatgaacctgtcctgggactgccaggagaacaccaccttcagcaagtgcttcctgacagacaagaagaacagagtggtggagccccggctgagcaacaatgaatgtagctgcaccttccgggagatctgcctgcatgaaggagtgacctttgaggtgcacgtgaacaccagccagaggggcttccagcagaagctgctgtaccccaacagcggccgggagggcacagctgcccagaacttcagctgcttcatctacaatgctgacctgatgaactgcacctgggcccggggccccacagcccccagagatgtgcagtacttcctgtacatccggaacagcaagagaagaagagagatccgctgcccctactacatccaggacagcggcacccacgtgggctgccacctggacaacctgagcggcctgaccagctag

SEQ ID NO: 249200 - DNA, 702 bp, Artificial Sequence
  derived and/or modified sequence
atgctgctgctggtgaccagcctgctgctgtgcgagctgccccacccagcattcctgctgatccctgagaagagcgatctgcgtacggtggcacctgccagcagtttaaatgtccgctttgatagcagaactatgaacttgtcctgggactgtcaggagaacactaccttcagtaaatgcttcctgacggacaagaagaacagagttgtcgaaccgcgcttgagcaacaatgagtgctcatgtacattcagggagatctgtctgcacgagggcgtcacctttgaggttcatgtgaacacatctcagagggggtttcagcaaaagttgctctaccccaacagcgggcgggaggggactgccgctcagaactttagctgttttatttataacgcagatctgatgaattgtacctgggcccggggccccactgcccctcgggacgttcaatattttctctacattcgcaatagtaagcgccgaagggagatcagatgcccatactacatccaagattcagggactcatgtggggtgccacctcgacaacctgtccggactgacgtctcgcaactacttcctcgtgaatgggacgtctagggagattggcattcaatttttcgatagtctgctggataccaagaagattggtagtttggggtactccggttgtagccgacaattccacaggtcaaagaccaattag

SEQ ID NO: 249201 - DNA, 567 bp, Artificial Sequence
  derived and/or modified sequence
atgctgctgctggtgaccagcctgctgctgtgcgagctgccccacccggccttcttactgatcccggaaaaatctgacctgaggacggttgctccagcttcctctctcaacgttcgattcgattccaggactatgaacctgtcctgggattgccaagagaatacaacatttagtaaatgctttctgaccgataaaaaaaatagagtggttgagccacggttatcaaacaacgaatgctcatgtaccttccgcgaaatctgccttcatgaaggtgtgacattcgaagttcatgtcaatacgagccaaagagggttccagcaaaagttgctttacccaaacagcggcagagaggggaccgctgcacagaattttagctgttttatttataacgccgatcttatgaattgtacctgggcccgaggtccaacagctccccgcgacgtgcagtacttcctgtatataagaaactctaaaagacgccgcgagattcggtgcccctactatatccaggacagtggcacacatgtgggttgtcacctggacaacttgtctggcctgacatcatag

SEQ ID NO: 249202 - DNA, 702 bp, Artificial Sequence
  derived and/or modified sequence
atgcttcttctagtgactagtctgcttctctgtgagctgccccaccccgcttttcttttgatccccgagaagagcgaccttaggaccgtggcacctgcttctagtctgaacgttagattcgacagtcggaccatgaatttaagctgggattgccaggagaatactacgttctctaagtgctttttgaccgacaaaaaaaatagagtagtagagccacgactgtcaaacaacgaatgcagttgtacattccgggaaatttgcctacatgagggcgttacttttgaggtacatgtgaatacaagtcaaaggggtttccagcaaaagttgctgtatccaaattctggtagggaggggaccgcagcacagaattttagctgttttatctacaacgcggatttgatgaactgcacctgggccagagggccaactgctcctcgggatgttcagtattttctgtatatccggaactccaagaggcgaagggaaataagatgcccttattacattcaggattctggcacgcatgtcggttgtcatcttgacaacttatccggcctgacctcccgcaactattttctcgtgaatggaacctctcgcgaaatcggcattcagttcttcgacagcctcctagatacgaaaaaaatcgggtctctcggatactccggttgttccagacagttccacaggtctaagactaactag

SEQ ID NO: 249203 - DNA, 567 bp, Artificial Sequence
  derived and/or modified sequence
atgctacttctggtcactagcctgttgttgtgtgagcttccacaccccgcttttctgctgatccctgagaaaagcgatctgcgtacagtggcacctgcaagctccctgaatgtgcgcttcgactctcgcaccatgaacctctcctgggattgtcaggagaatacgacatttagcaagtgctttctgactgataagaagaatcgggtcgtggagccgagactctcgaataacgagtgcagttgcacctttagagaaatttgtcttcacgaaggggtgacattcgaggtccacgttaacacctcccagcggggattccagcaaaagcttctgtaccccaattccggtagagaaggcactgccgctcaaaacttcagctgctttatttacaacgcggacctgatgaattgtacttgggccaggggacccactgctccgcgagacgttcagtacttcctctatattagaaatagtaagagacgtcgagagatccgatgcccctactatatccaagacagcggaacgcacgtggggtgccatttggataatttgagcggcctgacctcctag

SEQ ID NO: 249204 - DNA, 1410 bp, Artificial Sequence
  derived and/or modified sequence
agcaggtggaaggagaggaagcggatgccgtggggtttacagcaggaaaatccgtggagacagcagatccgagaagcggcgatgtttgcgtagaaccctgtacgtgcttccttcggcctgtcgctcttcccttctctctgaccagcaccatgcttctcctggtgacaagccttctgctctgtgagttaccacacccagcattcctcctgatcccagagaaatcggatctgcgaacagtggcaccagcctctagtctcaatgtgaggtttgactccaggacgatgaatttaagctgggactgccaagaaaacacaaccttcagcaagtgtttcttaactgacaagaagaacagagtcgtggaacccaggctcagtaacaacgaatgttcgtgcacatttcgtgaaatttgtctgcatgaaggagtcacatttgaggttcacgtgaatactagtcaaagaggatttcaacagaaactgctttatccaaattcaggaagggagggtaccgctgctcagaatttctcctgtttcatctacaatgcggatttaatgaactgtacctgggcgaggggtccgacggccccccgtgacgtccagtattttttgtacatacgaaactcaaagagaaggagggagatccggtgtccttattacatacaagactcaggaacccatgtgggatgtcacctggataacctgtcaggattaacgtctcgcaattactttctggttaacggaaccagccgagaaattggcatccaattctttgattcacttttggacacaaagaaaataggttccttaggatacagcggctgttcccgccagttccacagatcaaagacaaactgaatgataaccatgaggtggaagacgagatcatctgggaggaattcaccccagaggaagggaaaggctaccgcgaagaggtcttgaccgtgaaggaaattacctgagacccagagggtgtaggaatggcatggacatctccgcctccgcgacacgggggaactgttttcttgatgatgctgtgaacctttatatcattttctatgtttttatttaaaaacatgacatttggggccaggcgcggtggctcacgcctgtaatcccagcactttgggaggccaaggcaggcggatcacctgaggtcaggagttcaagaccagcctgcccaacatggtgaaaccccatctggactaaaaatgcagaaatttacccaggcacggcggcggacgcccatcatcccagctacttgggaggctgaggcaggagaattgcttgaacccgtgaggcggaggttgtagtgagccaagatcgcaccattgcacaccaacctgcgtgacagagcaagattgcatctcaaaacaaacaataataataaataataaaaacctgatatttggctggg

SEQ ID NO: 249205 - DNA, 856 bp, Artificial Sequence
  derived and/or modified sequence
ctccgagagaagaaaagcaggtggaaggagaggaagcggatgccgtggggtttacagcaggaaaatccgtggagacagcagatccgagaagcggcgatgtttgcgtagaaccctgtcagctgagccatgacccatgaaccatggaagcttgactctagattgaccatcttgagatgccaaagatgtccacgtcctaatcccatgtgggagacagaataatggccctgcagaccttcccagctggccatgacccctcatttgaccagctcttcccttctctctgaccagcaccatgcttctcctggtgacaagccttctgctctgtgagttaccacacccagcattcctcctgatcccagagaaatcggatctgcgaacagtggcaccagcctctagtctcaatgtgaggtttgactccaggacgatgaatttaagctgggactgccaagaaaacacaaccttcagcaagtgtttcttaactgacaagaagaacagagtcgtggaacccaggctcagtaacaacgaatgttcgtgcacatttcgtgaaatttgtctgcatgaaggagtcacatttgaggttcacgtgaatactagtcaaagaggatttcaacagaaactgctttatccaaattcaggaagggagggtaccgctgctcagaatttctcctgtttcatctacaatgcggatttaatgaactgtacctgggcgaggggtccgacggccccccgtgacgtccagtattttttgtacatacgaaactcaaagagaaggagggagatccggtgtccttattacatacaagactcaggaacccatgtgggatgtcacctggataacctgtcaggattaacgtct

SEQ ID NO: 249206 - DNA, 702 bp, Artificial Sequence
  derived and/or modified sequence
atgctgctgctggtgaccagcctgctgctgtgcgagctgccccaccccgccttcctgctgatccccgagaagagcgacctgagaaccgtggcccccgccagcagcctgaacgtgagattcgacagcagaaccatgaacctgagctgggactgccaggagaacaccaccttcagcaagtgcttcctgaccgacaagaagaacagagtggtggagcccagactgagcaacaacgagtgcagctgcaccttcagagagatctgcctgcacgagggcgtgaccttcgaggtgcacgtgaacaccagccagagaggcttccagcagaagctgctgtaccccaacagcggcagagagggcaccgccgcccagaacttcagctgcttcatctacaacgccgacctgatgaactgcacctgggccagaggccccaccgcccccagagacgtgcagtacttcctgtacatcagaaacagcaagagaagaagagagatcagatgcccctactacatccaggacagcggcacccacgtgggctgccacctggacaacctgagcggcctgaccagcagaaactacttcctggtgaacggcaccagcagagagatcggcatccagttcttcgacagcctgctggacaccaagaagatcggcagcctgggctacagcggctgcagcagacagttccacagaagcaagaccaactag

SEQ ID NO: 249207 - DNA, 567 bp, Artificial Sequence
  derived and/or modified sequence
atgctgctgctggtgaccagcctgctgctgtgcgagctgccccaccccgccttcctgctgatccccgagaagagcgacctgagaaccgtggcccccgccagcagcctgaacgtgagattcgacagcagaaccatgaacctgagctgggactgccaggagaacaccaccttcagcaagtgcttcctgaccgacaagaagaacagagtggtggagcccagactgagcaacaacgagtgcagctgcaccttcagagagatctgcctgcacgagggcgtgaccttcgaggtgcacgtgaacaccagccagagaggcttccagcagaagctgctgtaccccaacagcggcagagagggcaccgccgcccagaacttcagctgcttcatctacaacgccgacctgatgaactgcacctgggccagaggccccaccgcccccagagacgtgcagtacttcctgtacatcagaaacagcaagagaagaagagagatcagatgcccctactacatccaggacagcggcacccacgtgggctgccacctggacaacctgagcggcctgaccagctag

SEQ ID NO: 249208 - protein, 418 aa, Artificial Sequence
  derived and/or modified sequence
MPMLLPHPHQHFLKGLLRAPFRCYHFIFHSSTHLGSGIPCAQPFNSLGLHCTKWMLLSDGLKRKLCVQTTLKDHTEGLSDKEQRFVDKLYTGLIQGQRACLAEAITLVESTHSRKKELAQVLLQKVLLYHREQEQSNKGKPLAFRVGLSGPPGAGKSTFIEYFGKMLTERGHKLSVLAVDPSSCTSGGSLLGDKTRMTELSRDMNAYIRPSPTRGTLGGVTRTTNEAILLCEGAGYDIILIETVGVGQSEFAVADMVDMFVLLLPPAGGDELQGIKRGIIEMADLVAVTKSDGDLIVPARRIQAEYVSALKLLRKRSQVWKPKVIRISARSGEGISEMWDKMKDFQDLMLASGELTAKRRKQQKVWMWNLIQESVLEHFRTHPTVREQIPLLEQKVLIGALSPGLAADFLLKAFKSRD

SEQ ID NO: 249209 - protein, 424 aa, Artificial Sequence
  derived and/or modified sequence
MPMLLPHPHQHFLKGLLRAPFRCYHFIFHSSTHLGSGIPCAQPFNSLGLHCTKWMLLSDGLKRKLCVQTTLKDHTEGLSDKEQRFVDKLYTGLIQGQRACLAEAITLVESTHSRKKELAQVLLQKVLLYHREQEQSNKGKPLAFRVGLSGPPGAGKSTFIEYFGKMLTERGHKLSVLAVDPSSCTSGGSLLGDKTRMTELSRDMNAYIRPSPTRGTLGGVTRTTNEAILLCEGAGYDIILIETVGVGQSEFAVADMVDMFVLLLPPAGGDELQGIKRGIIEMADLVAVTKSDGDLIVPARRIQAEYVSALKLLRKRSQVWKPKVIRISARSGEGISEMWDKMKDFQDLMLASGELTAKRRKQQKVWMWNLIQESVLEHFRTHPTVREQIPLLEQKVLIGALSPGLAADFLLKALKAETNKIHPV

SEQ ID NO: 249210 - protein, 137 aa, Artificial Sequence
  derived and/or modified sequence
MADLVAVTKSDGDLIVPARRIQAEYVSALKLLRKRSQVWKPKVIRISARSGEGISEMWDKMKDFQDLMLASGELTAKRRKQQKVWMWNLIQESVLEHFRTHPTVREQIPLLEQKVLIGALSPGLAADFLLKAFKSRD

SEQ ID NO: 249211 - DNA, 1257 bp, Artificial Sequence
  derived and/or modified sequence
atgcccatgcttcttcctcatcctcaccaacattttctcaaaggtttgctccgtgcaccatttagatgttaccatttcatatttcactcctcaacacatctcggttccggtataccctgcgcacagccctttaactccctagggctccattgcaccaaatggatgctgcttagtgatggactgaagaggaaactatgtgtccagactaccctgaaggatcacacagagggcctgtctgacaaggaacagagattcgttgacaaactgtataccggcctcattcagggccagcgcgcgtgtctagcagaagccatcactttagttgagtccactcattctcgtaagaaggagctggctcaggtgctgctgcagaaggtactactgtaccaccgggagcaagaacagagtaataaaggcaagccactggcatttagagtagggctctctggcccaccaggcgccggcaagtcaacttttatagagtacttcggcaagatgctcaccgaaaggggccacaagctcagcgtcctggcggtcgacccaagttcatgtactagcggcgggagtctcctcggggacaagaccagaatgaccgagttgagccgagatatgaacgcatacatcagaccctcccctacaagaggcaccttaggcggagtgacccggactacaaatgaggccattttactttgtgaaggcgcaggctatgacatcatactgatagagactgttggagtgggccagagcgaatttgctgtggcagacatggtggacatgtttgtgctgctgcttccgcctgccggcggcgatgaactgcaggggatcaagcggggaataatagaaatggccgacctggtcgcggttacgaagtccgacggcgatctcattgtgcccgcccgacggatacaggccgaatatgtaagtgcacttaaactcctgcgaaaaaggtcacaagtgtggaagcctaaggtcatcaggatctccgccaggtccggagagggaattagcgaaatgtgggataagatgaaggatttccaggacctgatgctcgctagtggggaactgaccgctaaacgccgcaagcagcaaaaggtctggatgtggaatttgatccaagaatcagttctcgaacacttccggacacacccaaccgtaagggaacagattcccctgctggaacaaaaggtgttgataggagctctgtcacccgggctggccgcagatttcctactcaaagccttcaaaagccgtgattag

SEQ ID NO: 249212 - DNA, 1275 bp, Artificial Sequence
  derived and/or modified sequence
atgcccatgctgttgcctcacccccaccagcactttcttaagggcctcctgcgggctccttttagatgctaccattttatcttccattctagcacgcatctgggatccggcatcccctgtgcacaacccttcaactctctcggacttcactgtactaaatggatgctactcagcgatggacttaagcggaagctgtgtgtgcagacgaccctgaaagatcacaccgaaggcctttctgataaagagcagcggtttgttgacaaactgtacactggccttatacagggtcagcgggcatgcctggctgaggcaatcacattggtggaaagcacacacagccggaagaaggaacttgcacaggtgctcttgcaaaaagtcctgttgtaccaccgcgagcaggaacagagtaataagggcaaacctttggcctttagggttggcctctccggcccccccggcgccggcaaatccaccttcatcgaatattttggcaaaatgctcacagaacggggtcacaagttgagcgttctggctgtggatccctcgagctgtaccagcggcggttccctgctaggcgataaaaccagaatgaccgagctgtccagggacatgaatgcttatattagaccatcccctactagagggacgctaggtggcgttacgagaacaacaaacgaggcaattcttctatgcgagggagcagggtacgacatcatcctgattgagacggtgggagtggggcagagcgaatttgcagtcgccgacatggttgacatgttcgtgttgctgttacctccagcagggggggacgagctgcaggggatcaagcgggggatcattgagatggctgatctcgttgcggtgacaaaatcggatggagacctaattgtcccagcacgccgcatccaagccgaatatgtttcggccctgaaactgctcagaaaaagaagtcaggtctggaaaccaaaagtcattaggatttccgcccgcagcggcgaggggatttccgaaatgtgggataagatgaaggacttccaagatctcatgttggccagcggagagctgactgcaaaacggcgtaagcagcagaaggtttggatgtggaacctcattcaggaaagtgttctcgagcattttcggacccaccccactgtacgcgagcagatcccacttctggaacagaaggtgctgatcggtgcactttcacctggattagctgccgattttttgctaaaggccctgaaggcagaaacaaataagatccacccagtgtag

SEQ ID NO: 249213 - DNA, 1257 bp, Artificial Sequence
  derived and/or modified sequence
atgcccatgctgctgccccacccccaccagcacttcctgaagggcctgctgcgggcccccttccgctgctaccacttcatcttccacagcagcacccacctgggcagcggcatcccctgtgcccagcccttcaacagcctgggcctgcactgcaccaagtggatgctgctgagtgatggcctgaagaggaagctgtgtgtgcagaccaccctgaaggaccacacagagggcctgagtgacaaggagcagagatttgtggacaagctgtacacaggcctcatccagggccagagggcctgcctggccgaggccatcaccctggtggagagcacccacagcaggaagaaggagctggcccaggtgctgctgcagaaggtgctgctgtaccaccgggagcaggagcagagcaacaagggcaagcccctggccttccgggtgggcctgagcggccccccaggggccggcaagagcaccttcatcgagtactttgggaagatgctgacagagcggggccacaagctgtctgtgctggccgtggaccccagcagctgcaccagcggcggcagcctgctgggggacaagaccaggatgacagagctgagccgggacatgaatgcctacatccggcccagccccacccggggcaccctgggcggcgtgaccaggaccaccaatgaggccatcctgctgtgtgagggcgccggctatgacatcatcctgattgaaacagtgggcgtgggccagagcgagtttgctgtggccgacatggtggacatgtttgtgctgctgctgcccccagctggaggagatgagctgcagggcatcaagaggggcatcatcgagatggctgacctggtggccgtgaccaagagtgatggagacctgattgtgcctgcccggcgcatccaggccgagtatgtgtctgccctgaagctgctgaggaagaggagccaggtgtggaagcccaaggtgatccgcatcagcgcccggtctggagagggcatcagcgagatgtgggacaagatgaaggacttccaggacctgatgctggccagcggggagctgacagccaagaggaggaagcagcagaaggtgtggatgtggaacctgatccaggagagcgtgctggagcacttccgcacccaccccaccgtgcgggagcagatccccctgctggagcagaaggtgctgattggagccctgagccctggcctggccgctgacttcctgctgaaggccttcaagagccgggactag

SEQ ID NO: 249214 - DNA, 1275 bp, Artificial Sequence
  derived and/or modified sequence
atgcccatgctgctgccccacccccaccagcacttcctgaagggcctgctgcgggcccccttccgctgctaccacttcatcttccacagcagcacccacctgggcagcggcatcccctgtgcccagcccttcaacagcctgggcctgcactgcaccaagtggatgctgctgagtgatggcctgaagaggaagctgtgtgtgcagaccaccctgaaggaccacacagagggcctgagtgacaaggagcagagatttgtggacaagctgtacacaggcctcatccagggccagagggcctgcctggccgaggccatcaccctggtggagagcacccacagcaggaagaaggagctggcccaggtgctgctgcagaaggtgctgctgtaccaccgggagcaggagcagagcaacaagggcaagcccctggccttccgggtgggcctgagcggccccccaggggccggcaagagcaccttcatcgagtactttgggaagatgctgacagagcggggccacaagctgtctgtgctggccgtggaccccagcagctgcaccagcggcggcagcctgctgggggacaagaccaggatgacagagctgagccgggacatgaatgcctacatccggcccagccccacccggggcaccctgggcggcgtgaccaggaccaccaatgaggccatcctgctgtgtgagggcgccggctatgacatcatcctgattgaaacagtgggcgtgggccagagcgagtttgctgtggccgacatggtggacatgtttgtgctgctgctgcccccagctggaggagatgagctgcagggcatcaagaggggcatcatcgagatggctgacctggtggccgtgaccaagagtgatggagacctgattgtgcctgcccggcgcatccaggccgagtatgtgtctgccctgaagctgctgaggaagaggagccaggtgtggaagcccaaggtgatccgcatcagcgcccggtctggagagggcatcagcgagatgtgggacaagatgaaggacttccaggacctgatgctggccagcggggagctgacagccaagaggaggaagcagcagaaggtgtggatgtggaacctgatccaggagagcgtgctggagcacttccgcacccaccccaccgtgcgggagcagatccccctgctggagcagaaggtgctgattggagccctgagccctggcctggccgctgacttcctgctgaaggccctgaaggccgagaccaacaagatccaccctgtgtag

SEQ ID NO: 249215 - DNA, 7068 bp, Artificial Sequence
  derived and/or modified sequence
accagtaattcattttttattattctgtattcagtaagaatcaacctgtatcaaatagctgaaaaggcctgaagcctcccaaatgcatatcattacacaaattctgtgtgaggactgacatcttggtttcatatactaattatactgcatgggccccatttataaccatatctactcgtcatttgatcctggctactgccgatggatgctatcttcatcacattatagcaaacatttgggtgattaagtttttctcaaaaattctagattagcatacaacggctttactacttatatgtcatctaagacgttttttaagaattagttactactacgcccaacgcagtgaggtagcaaatattatgcctgtttattttcatctccatttcaggcttgcgcgcctttcccccctcgggacttcccgaggacacccctgcagcagtgagcccgagtcctggctttggctgcatgttaagaaatattaatcaaaatgaatgcgtgccctttaagagaaaaaaactgtgggtccttcagcctttaaaaaccatgccgtggtttaaaaacttaaaactatatttcggcagaacgctgagcatttcttcaaatcactctgagaagcttgagtgtctttaatttcaccggtctgtcaaacgtaacgcgtctctccctcaccccacattttaagtttccaaggagcggaagaagggcctccgggggtcccggccgccgcaggctgctgggggtgaggacacgactcggcctccgtccgactcgagggtgtcgcgaaggccaggagggaacgaaagttaccctcgaacttcggaggcgaaagatttcatgtggatcttaaaaagggcaaaacctaccccaaaggccgtaaaccgccctcccctcccccgccagagaacttcccggcgcagagcttccgcagcctgctgcaggccgggagaccttcacgctcactcgctctccgccacacgccggaactgcgcggccacgtccacggggaccctggccatgccccgcaccgccacccagccccaggcgatccccgggccccacgcgcctgcagtcggcgctgcgcctgcgtgggaggatccggcggaaggggcggggtcaggtggcacttccgtggcttcgggcggggaggtcacaatcacattgagccaaaacgcatccagtgttttctccagttacaaataaaacgaatatgcccatgctgctaccacatcctcaccagcatttcctaaaaggccttttaagagcacctttccgatgttaccacttcatctttcactcaagtactcatctcggatcaggaatcccatgtgctcagccgtttaattctcttggactccattgtacaaagtggatgctgctgtcagatggcttaaagagaaaattatgtgtacaaacaaccttaaaggaccacacagaaggactttctgataaagagcaaagatttgtggataaactttatactggtttaatccaagggcaaagggcctgtttagcagaggccataactcttgtagaatcaactcacagcaggaaaaaggagttagcccaggtgcttcttcagaaagtattactttaccacagagaacaagaacaatcaaataaaggaaaaccactagcatttcgagtaggattgtctgggccccctggtgctggaaaatcaacatttatagaatattttggaaaaatgcttactgagagagggcacaaattatctgtgctagctgtggacccttcttcttgtactagtggtggatcactcttaggtgataaaacccgaatgactgagttatcaagagatatgaatgcatacatcaggccatctcctactagaggaactttaggaggcgtgacaaggaccacaaatgaagctattctgttgtgtgaaggagcgggatatgacataattcttattgaaaccgttggtgtgggtcagtcggagtttgctgttgctgacatggttgacatgtttgttttactactgccaccagcaggaggagatgagctgcagggtatcaaaaggggtataatcgagatggcagatctggtagctgtaactaaatctgatggagacttgattgtgccagctcgaaggatacaagcggaatatgtgagtgcactgaaattactccgcaaacgttcacaagtctggaaaccaaaggtaattcgtatttctgcccgaagtggagaggggatctctgaaatgtgggataaaatgaaagatttccaggacctaatgcttgccagtggggagctgactgccaaacgacggaagcaacagaaagtttggatgtggaatctcattcaggaaagtgtgttagagcatttcaggacccaccccacagtccgggaacagattccacttctggaacaaaaggttctcattggggccctgtccccaggactagcagcagacttcttgttaaaagcttttaaaagcagagactaataaaattcatcctgtataataattttacatatcatttcataaagtattttaatagaaaaatcacttgtatgcttatattttcagtaattattgtatggtgctcttgtcttctttgtttgtgacccatgcttgaaaacttgaaggaagttagatatgaatggcaaaagttaggcagtatttataaggtacctgttttatgttactgatatctgtttccttctcttcttataccctggcatggtggcctgtagggtagtttcttcttaatagtcaagaacagagaaagctgaggagagcagaaaatatcttgcactttaaaatgcttattttgattccatattatctgaatttccagagaggatgtaaacaagagtgaccatatttttggagtccttcttgaagccagaacaacacacagtgggttgctaagagccgacaatcataattgacatttagtgtaccagattattctaagaatttctgaaattaccatgtacatgagtaatgaaacaactggaataatgtgatgatgtgaacacaattttaaagtctgcttgtctggatttgcaggtacccttccgccaccccccaacatgataggtaagagagcaaaagggaactgggaaaaatcagctacaaataaaatgggtgactaatccccagttcttggacccattatatttgtagccaattggagtaaacccctaaaagacaaagtgaggtcagaatgattcaaggattattcagtttgaagactaccaaaggcttttgcttctcttcttccttggccatttcacttcattttagtattttaaaaatcttttttcttgatggtgaacaagttttgtcctatgctatggaggaggcatagcacagtgattaagagcttgggctctgtagttggactatgtgggtttaaactttaaacccagatcaattgtatattagctacatgagctaatctctttaagcttccatttcctccctggtaaaatgaaattggcaaataactttctaaggttagtgaagataggaaatactcgaaggctgcttactatccttattacattaaagttatgggtatcttgaaactacaaacctgatgtataatttcagttttctctcatggtcttgttactaccatcatactcttgatattttaggatactttaggattacctttgaagaaccctttctagttaattctttgaatatgttttatacttatttgatggtagttgtaactgtgtacatttgaataaaatttctaaccataaaatttcgccattgcacaaaaagcctttatagaagtttctaacatattctattctgaaccctgtagaatattttatgtagtatagcagcttgcattgttacttactgtactggaatcaaacctcttgagcattattttaacaaacatccctttacattttttggaaagatttttagtactccattggcatagctatttcatacaaggattaggagaaactttgaaaggttatccacttgacttttctgattttagaaaggactaccattaaaccaccctatcagacaaaaaaaactggtttttagaaacctgagagaaggaattttataatttccctgagtaagctgttacagggaataacaaatctcctgccacatgtggcacagtgtaagtaatgctggagcacacatactgcattgtaaagaaggtaggaaaggtggggggacttttgttagctttaattttaaggctaaaagcatttcttctcagtttgaactacttttaaatgttataaatgtcatcataaaaatcattagaaaactcatttctccttatgttgtcgttgtaccattgggtattgtatagagaccaatttctaagagattttttcacctctgtttctgttatttgctatactggaggtaatataataataatgaaatatagctttttttttcaactcagaaatcctattccctctccccatctgtgattatattgtactggacttctgacttggtcaaaagcataggttttgacttagatacatgtgggggcagatctcagctctatcactaactagctatatgatatttggcaagttttttctctatgtgcagtagtttctttatctgtaaaattaagataatagctactttacagggttggaagaattaatttagaaattgtacagtgcttagcctcaataattggtaggtggtggtgtaaatattttacatagatacttgtgacagttctttgttctacaaaacagactaatattaatttcagattggccaagctacttaatttctctgtgcctcagtttcctcactattaaatggggatgacaatagtgtccacctagagcaggactattttagtattacatataatccttggatataaatgctgatgaagtttggatatttgtccccacccaagtctcatgttgaaatgtaatccccaatcttggaggtggagcctggtgggaggtgtatggattagatcagatctctcatgaatgacttgggccatcctttgggtggtaagtgagctcttgctccgagttcacacgaggtctagatctggtcatttaaaagtgtgtggcatctccccatccctcactctatcacttgctcctactttcgtcatatgacatgcctgctcccctttcaccttctgccatgattgtaagcttcctgaggcctccctagaagctgagcagatgccagcaccatgcttcctgtagtctgtagaaccataagccaaataaacatcttttctttataaatttataaattacccagtcgcagatatttatagaaagaacagcctaatacaggtgctaaatacatatctgacaataaatggtagttatctcttagaactgttatgaggattaaacgagttacagtgtccatcttaaaaagataattctgaaaaaaatctcataggttcactttgccttgtcaagaatatgattaccattaacttctgtagataggaaaaaaatgtgctgagctccaaaactgacagacattttgctaaaacaatatcaaatctcattaaaatgatgacagttatttcaatagttgacagtagctatcccaatacaacctaacaaggcattttctcttcagaatcactcgatcatatggccatttccctaagcttttatagctattgcccagtgtacactgaagacaacagctaacgaacaacatacgtgtgataatttatgtagttgaacctctaaggcaaaaaaaaaaaaaaaaaggaaaaattagtgaaaatcattcaaacattatgctcaccaggtagactgccatcatagaagtcctaatgctactgctaaaaactagtaaactaccagtaaactgtgaagacagaagtaactcctgtgatctatatgtttgtgcagatggtggagcttttctgctcctaaagcctgagaaatgcaaatgtggcttcgttaatgcaaatgcttcctacgccagactttatgaaactcctcctaaagttgaattcttatccaagtggacatatgttagggtgccattgtaattcaggtagagtgtcagagtggtggctggcaccaacggtagatgttctcaacattagcgttattcaggtaagactacaacaatgatgaacatgtcaaaactttcctttaaaaggaacaatcagaaaaactctttaacaaatgtttttctttccgtagtattttaattaaaatttttaaaattttaaaatttactaaatttatgaacgtttttatcccacttgagatgaatacttatttatagtccctgtcccatgaagcttctgtggatttgctttgtttgtcatttgtggtatgtttgataacaaaaatattagtggcacaaaagcagttatattgaatgcttttgttttagagaaaatttcactctgtactagaaaatgtagatgatgtgagtcaaagttcattaatatttacctgaaaatttgtgtataaaggtaaccttggggcagtttattttgcttagacccctcagcttcttgatagagtgaggtgagggcatatgtaagtcagtaaactattctgttagtaaagtcaaaggcgtaatctaaattaattatgcttttaactaacacagaagaaatcatgtgacctcattctcaaagctcgtaacatccacctggccaatcttaagatgtggatagagttcttttttttcttttttcaatttttacaataatttttgacacattgaagctgtgcatgtttatgggggcacaatttgatgtttcaatacatgtatatgttgtgtaatgatcaaatcggagtacttagcatatctatcatctcgtgcatttatcatttctttgtggcgagaacatttaaaaatcctattttctagctattttgtaatatacactaccttactgttgcgaaccatagtcaccctactgtgcaatagaacacctgaacttattcctcctatctagttgtaactttgtacccattgaccccccttcccttccttccactctcccctccccagtctctggtaaccactgttctgttccctatgagataaaactttttttgtcttccata

SEQ ID NO: 249216 - DNA, 1437 bp, Artificial Sequence
  derived and/or modified sequence
gagccaaaacgcatccagtgttttctccagttacaaataaaacgaatatgcccatgctgctaccacatcctcaccagcatttcctaaaaggccttttaagagcacctttccgatgttaccacttcatctttcactcaagtactcatctcggatcaggaatcccatgtgctcagccgtttaattctcttggactccattgtacaaagtggatgctgctgtcagatggcttaaagagaaaattatgtgtacaaacaaccttaaaggaccacacagaaggactttctgataaagagcaaagatttgtggataaactttatactggtttaatccaagggcaaagggcctgtttagcagaggccataactcttgtagaatcaactcacagcaggaaaaaggagttagcccaggtgcttcttcagaaagtattactttaccacagagaacaagaacaatcaaataaaggaaaaccactagcatttcgagtaggattgtctgggccccctggtgctggaaaatcaacatttatagaatattttggaaaaatgcttactgagagagggcacaaattatctgtgctagctgtggacccttcttcttgtactagtggtggatcactcttaggtgataaaacccgaatgactgagttatcaagagatatgaatgcatacatcaggccatctcctactagaggaactttaggaggcgtgacaaggaccacaaatgaagctattctgttgtgtgaaggagcgggatatgacataattcttattgaaaccgttggtgtgggtcagtcggagtttgctgttgctgacatggttgacatgtttgttttactactgccaccagcaggaggagatgagctgcagggtatcaaaaggggtataatcgagatggcagatctggtagctgtaactaaatctgatggagacttgattgtgccagctcgaaggatacaagcggaatatgtgagtgcactgaaattactccgcaaacgttcacaagtctggaaaccaaaggtaattcgtatttctgcccgaagtggagaggggatctctgaaatgtgggataaaatgaaagatttccaggacctaatgcttgccagtggggagctgactgccaaacgacggaagcaacagaaagtttggatgtggaatctcattcaggaaagtgtgttagagcatttcaggacccaccccacagtccgggaacagattccacttctggaacaaaaggttctcattggggccctgtccccaggactagcagcagacttcttgttaaaagctttaaaagcagagactaataaaattcatcctgtataataattttacatatcatttcataaagtattttaatagaaaaatcacttgtatgcttatattttcagtaattattgtatggtgctcttgtcttctttgtttgtgacccatgcttgaa

SEQ ID NO: 249217 - DNA, 1352 bp, Artificial Sequence
  derived and/or modified sequence
gagccaaaacgcatccagtgttttctccagttacaaataaaacgaatatgcccatgctgctaccacatcctcaccagcatttcctaaaaggccttttaagagcacctttccgatgttaccacttcatctttcactcaagtactcatctcggatcaggaatcccatgtgctcagccgtttaattctcttggactccattgtacaaagtggatgctgctgtcagatggcttaaagagaaaattatgtgtacaaacaaccttaaaggaccacacagaaggactttctgataaagagcaaagatttgtggataaactttatactggtttaatccaagggcaaagggcctgtttagcagaggccataactcttgtagaatcaactcacagcaggaaaaaggagttagcccaggtgcttcttcagaaagtattactttaccacagagaacaagaacaatcaaataaaggaaaaccactagcatttcgagtaggattgtctgggccccctggtgctggaaaatcaacatttatagaatattttggaaaaatgcttactgagagagggcacaaattatctgtgctagctgtggacccttcttcttgtactagtggtggatcactcttaggtgataaaacccgaatgactgagttatcaagagatatgaatgcatacatcaggccatctcctactagaggaactttaggaggcgtgacaaggaccacaaatgaagctattctgttgtgtgaaggagcgggatatgacataattcttattgaaaccgttgggtatcaaaaggggtataatcgagatggcagatctggtagctgtaactaaatctgatggagacttgattgtgccagctcgaaggatacaagcggaatatgtgagtgcactgaaattactccgcaaacgttcacaagtctggaaaccaaaggtaattcgtatttctgcccgaagtggagaggggatctctgaaatgtgggataaaatgaaagatttccaggacctaatgcttgccagtggggagctgactgccaaacgacggaagcaacagaaagtttggatgtggaatctcattcaggaaagtgtgttagagcatttcaggacccaccccacagtccgggaacagattccacttctggaacaaaaggttctcattggggccctgtccccaggactagcagcagacttcttgttaaaagcttttaaaagcagagactaataaaattcatcctgtataataattttacatatcatttcataaagtattttaatagaaaaatcacttgtatgcttatattttcagtaattattgtatggtgctcttgtcttctttgtttgtgacccatgcttgaa

SEQ ID NO: 249218 - DNA, 1257 bp, Artificial Sequence
  derived and/or modified sequence
atgcccatgctgctgccccacccccaccagcacttcctgaagggcttgctgcgggcaccattcaggtgttaccattttatcttccactctagcacgcacctcgggtcagggatcccttgtgcccagccctttaatagcctgggcctccattgtactaagtggatgctgctctccgacgggctgaaaaggaaactgtgcgtgcagaccaccctgaaagatcacaccgaggggttgagcgacaaggagcaaagattcgtggacaagctgtatactggtctgatccagggacagagggcttgtctcgcagaggcgatcaccctcgtagagtctactcacagtaggaagaaggaactcgcgcaagtccttttacagaaggtgctactttatcacagggaacaagagcaatcaaataaaggcaaacccctggcttttagagtaggactgagcgggccgcctggtgcgggaaagtctacatttattgaatacttcgggaaaatgctcacagagaggggtcataagctgtccgtactggcagttgaccccagctcgtgcacgtctggtgggtctcttctcggcgataaaacccggatgactgagctaagccgggatatgaatgcctacatcagaccctcacctactcggggcacactcggcggggtgacccggacaacaaacgaagccatcctactgtgtgaaggagctggatacgatataatccttatcgagacagtaggagttggacaatcagagtttgcggtggcagacatggtggatatgttcgtgctgctgctacctccggccggcggcgacgagcttcaggggataaagcgtggtattatagagatggctgacttagtcgccgtcacaaagtcagatggggatctgattgtcccagcccggaggattcaagccgaatacgtgtcagccttgaagctcttaagaaaaaggtcccaggtgtggaagccaaaggtgatcagaatcagcgcacggtccggggaggggatctccgagatgtgggataaaatgaaagacttccaggacctgatgttggcatccggagaactgaccgcaaagcgacgaaagcagcagaaggtctggatgtggaacctgatccaagagtcagtgctggagcatttcagaacacatcccactgtcagggaacagattcccctcctggagcagaaggtgctaatcggcgctctgagcccgggactggctgccgatttccttctgaaggcatttaaaagccgcgactag

SEQ ID NO: 249219 - DNA, 1275 bp, Artificial Sequence
  derived and/or modified sequence
atgcccatgctgctgccccacccccaccagcacttcctgaagggcctcctccgggctccctttcggtgttaccatttcattttccatagttccactcatctgggctcagggatcccctgcgcacagccctttaattctttgggactgcattgcacgaagtggatgctgctaagcgacggactgaagcgcaaattatgcgttcagacaactttgaaggaccataccgagggcctgagcgacaaggagcagcgctttgtcgataagctgtacaccgggcttatccaaggacagcgggcttgcttggccgaggcaataactcttgttgagagcacccattcccggaaaaaggaactggcccaagtgctgctccaaaaggtcctcctttatcaccgggaacaggagcaaagcaacaaagggaagccactggccttccgtgtgggtctcagcggcccaccgggggcagggaagagcacatttattgagtactttggcaagatgctcaccgagcgcggccacaaattgtcagtgttggctgtcgatccgtcttcgtgcacttctggcggctcgctgttgggcgacaagacaagaatgacagaactaagccgtgacatgaatgcctatataagaccctcccctactagaggaaccctcggtggcgttactagaaccacaaacgaagcgatactgctgtgtgaaggtgccgggtatgacatcatcctgatcgagacagtgggtgtgggacagtcggagttcgcagttgccgacatggtagacatgttcgtgctcttgctgcccccggccggcggcgatgagctgcagggaattaagcgggggataatagaaatggccgatctggtggccgtgactaaaagtgatggagatctgatcgtcccagctcggagaatccaagctgaatacgtgtctgccctcaagctcctgagaaagaggtcacaggtgtggaaaccgaaggttatcaggatttcagctcgcagtggagaggggatctcagagatgtgggataaaatgaaggatttccaggacttgatgttggctagcggagagttaaccgcaaaacgaaggaaacagcagaaagtttggatgtggaatctgattcaggaatctgtgctcgaacatttccgcacgcaccctactgttcgggaacagatccccctgctcgaacaaaaagtactaataggcgcattatctcctggtttggccgccgactttttgctgaaagccctgaaagccgagaccaataagattcaccccgtatag

SEQ ID NO: 249220 - DNA, 1257 bp, Artificial Sequence
  derived and/or modified sequence
atgccaatgttgctgcctcatccccaccaacacttcctgaaggggctcctgcgggctccctttcgctgctatcacttcattttccatagcagcacccacctcggttccggcattccctgtgcccagcccttcaattccctcgggctgcactgtactaagtggatgctgctctccgacgggctgaaaaggaagctctgcgtgcagaccactctaaaggaccacacggaaggattaagtgacaaagaacagcgcttcgtggataaactttacaccggcctgatccaaggacagcgcgcatgtctggccgaagctatcacgttagtcgaatcaactcattcccgtaaaaaggaactggctcaggtcctgttgcaaaaggttctgttgtaccacagagaacaggaacaaagcaataaaggaaagcccctggccttcagagttgggctctctggcccaccgggagccggaaaaagcaccttcatcgagtatttcggtaagatgctcacggagcgaggtcataaactttcggtcctagcagtcgacccttcctcttgcacatcggggggatccctcctgggcgataagacacgcatgacagagctgtcaagagatatgaatgcgtatatcaggccgtcaccgactcggggaacactggggggagtaacccggacaactaacgaggctatactcctgtgtgaaggtgccggatatgatatcatcctgattgaaaccgtaggagttggccagagtgagtttgctgtcgctgatatggtggacatgtttgtgctcctgctgcctcctgctggaggagatgaactgcaggggataaaaagaggtattatcgagatggccgacctcgtggcggtgacaaagtccgatggcgatctgattgtccccgctcggagaatccaggctgaatacgtgtcagccctgaagttgctaaggaagcgatcacaggtctggaagccaaaagtgatcaggatttccgcgaggagcggggaaggcattagtgagatgtgggacaagatgaaggatttccaggaccttatgctcgcctctggggagctgacagccaaacgaaggaagcaacagaaagtttggatgtggaatctgatccaggagtctgtgctggagcactttaggacccaccctaccgtacgcgaacaaattcctctactggagcagaaagtgcttattggggctctttcccccggtttggccgcagacttcctgctcaaggcattcaaatcacgggactag

SEQ ID NO: 249221 - DNA, 1275 bp, Artificial Sequence
  derived and/or modified sequence
atgcctatgctgctgcctcacccacatcaacattttcttaaggggctgctgagagcaccgtttcgttgctaccacttcatcttccacagctccacccatctcgggagtggcatcccatgcgcccaaccattcaattccctggggttgcattgtactaaatggatgctgttatcagacggcctgaaaaggaaattgtgcgtgcaaaccaccctcaaggaccatacagaggggctgagtgacaaagagcagcggtttgtcgacaagctctataccggcttaatacaaggccagcgcgcatgccttgccgaagcaatcacactggtagaatccacccatagccgcaaaaaggagctcgcacaggtcctactgcagaaggtactgttatatcatcgggagcaagaacagtccaacaagggtaaacccttagcttttagagtcggactttcaggcccacccggagcgggtaaatcaaccttcatcgagtatttcggtaagatgctcaccgagcggggtcacaagttaagcgttttggccgttgatcctagttcttgtaccagtggcggatctctactgggtgacaagactcgcatgaccgagttgagtcgggacatgaatgcctacatcaggccctcccccactcggggtacactgggcggagttacacgaacaacaaacgaggccatccttttatgtgaaggagccggatatgatattattctgattgaaacagtgggcgtagggcagtctgagtttgcagttgccgatatggtcgatatgtttgtcttgcttctcccccctgcgggaggggacgaattacagggaattaaacggggtattattgaaatggctgacctagtggccgtgactaagagcgacggtgatcttatcgtcccggctcgcagaatacaggctgaatatgtgtctgcccttaagctcctgcgaaagcgttcacaggtttggaaacccaaagttatacggatctccgctcgctcaggtgaaggaatctccgagatgtgggacaaaatgaaggatttccaggatctaatgctggcttctggggagctgaccgccaagcgaaggaagcagcagaaagtatggatgtggaacctgatccaggagagcgttcttgaacactttaggacgcatcctaccgtgcgtgagcagatcccgctgctcgagcagaaagtgttgataggggctctgagtccaggcctggccgctgacttcctgttgaaggctttgaaggctgaaactaataagattcatcccgtgtag

SEQ ID NO: 249222 - DNA, 1257 bp, Artificial Sequence
  derived and/or modified sequence
atgcccatgctgctgccccacccccaccagcacttcctgaagggcctgctgagagcccccttcagatgctaccacttcatcttccacagcagcacccacctgggcagcggcatcccctgcgcccagcccttcaacagcctgggcctgcactgcaccaagtggatgctgctgagcgacggcctgaagagaaagctgtgcgtgcagaccaccctgaaggaccacaccgagggcctgagcgacaaggagcagagattcgtggacaagctgtacaccggcctgatccagggccagagagcctgcctggccgaggccatcaccctggtggagagcacccacagcagaaagaaggagctggcccaggtgctgctgcagaaggtgctgctgtaccacagagagcaggagcagagcaacaagggcaagcccctggccttcagagtgggcctgagcggcccccccggcgccggcaagagcaccttcatcgagtacttcggcaagatgctgaccgagagaggccacaagctgagcgtgctggccgtggaccccagcagctgcaccagcggcggcagcctgctgggcgacaagaccagaatgaccgagctgagcagagacatgaacgcctacatcagacccagccccaccagaggcaccctgggcggcgtgaccagaaccaccaacgaggccatcctgctgtgcgagggcgccggctacgacatcatcctgatcgagaccgtgggcgtgggccagagcgagttcgccgtggccgacatggtggacatgttcgtgctgctgctgccccccgccggcggcgacgagctgcagggcatcaagagaggcatcatcgagatggccgacctggtggccgtgaccaagagcgacggcgacctgatcgtgcccgccagaagaatccaggccgagtacgtgagcgccctgaagctgctgagaaagagaagccaggtgtggaagcccaaggtgatcagaatcagcgccagaagcggcgagggcatcagcgagatgtgggacaagatgaaggacttccaggacctgatgctggccagcggcgagctgaccgccaagagaagaaagcagcagaaggtgtggatgtggaacctgatccaggagagcgtgctggagcacttcagaacccaccccaccgtgagagagcagatccccctgctggagcagaaggtgctgatcggcgccctgagccccggcctggccgccgacttcctgctgaaggccttcaagagcagagactag

SEQ ID NO: 249223 - DNA, 1275 bp, Artificial Sequence
  derived and/or modified sequence
atgcccatgctgctgccccacccccaccagcacttcctgaagggcctgctgagagcccccttcagatgctaccacttcatcttccacagcagcacccacctgggcagcggcatcccctgcgcccagcccttcaacagcctgggcctgcactgcaccaagtggatgctgctgagcgacggcctgaagagaaagctgtgcgtgcagaccaccctgaaggaccacaccgagggcctgagcgacaaggagcagagattcgtggacaagctgtacaccggcctgatccagggccagagagcctgcctggccgaggccatcaccctggtggagagcacccacagcagaaagaaggagctggcccaggtgctgctgcagaaggtgctgctgtaccacagagagcaggagcagagcaacaagggcaagcccctggccttcagagtgggcctgagcggcccccccggcgccggcaagagcaccttcatcgagtacttcggcaagatgctgaccgagagaggccacaagctgagcgtgctggccgtggaccccagcagctgcaccagcggcggcagcctgctgggcgacaagaccagaatgaccgagctgagcagagacatgaacgcctacatcagacccagccccaccagaggcaccctgggcggcgtgaccagaaccaccaacgaggccatcctgctgtgcgagggcgccggctacgacatcatcctgatcgagaccgtgggcgtgggccagagcgagttcgccgtggccgacatggtggacatgttcgtgctgctgctgccccccgccggcggcgacgagctgcagggcatcaagagaggcatcatcgagatggccgacctggtggccgtgaccaagagcgacggcgacctgatcgtgcccgccagaagaatccaggccgagtacgtgagcgccctgaagctgctgagaaagagaagccaggtgtggaagcccaaggtgatcagaatcagcgccagaagcggcgagggcatcagcgagatgtgggacaagatgaaggacttccaggacctgatgctggccagcggcgagctgaccgccaagagaagaaagcagcagaaggtgtggatgtggaacctgatccaggagagcgtgctggagcacttcagaacccaccccaccgtgagagagcagatccccctgctggagcagaaggtgctgatcggcgccctgagccccggcctggccgccgacttcctgctgaaggccctgaaggccgagaccaacaagatccaccccgtgtag

SEQ ID NO: 249224 - protein, 1182 aa, Artificial Sequence
  derived and/or modified sequence
MCSTNPGKWVTFDDDPAVQSSQKSKNFPLENQGVCRPNGLKLNLPGLREFPSGSSSTSSTPLSSPIVDFYFSPGPPSNSPLSTPTKDFPGFPGIPKAGTHVLYPIPESSSDSPLAISGGESSLLPTRPTCLSHALLPSDHSCTHPTPKVGLPDEVNPQQAESLGFQSDDLPQFQYFREDCAFSSPFWKDEGSDSHFTLDPPGSKKMFSSRNKEMPIDQKSLNKCSLNYICEKLEHLQSAENQDSLRSLSMHCLCAEENASSFVPHTLFRSQPKSGWSFMLRIPEKKNMMSSRQWGPIFLKVLPGGILQMYYEQGLEKPFKEIQLDPYCRLSEPKVENFSVAGKIHTVKIEHVSYTEKRKYHSKTEVVHEPDIEQMLKLGSTSYHDFLDFLTTVEEELMKLPAVSKPKKNYEEQEISLEIVDNFWGKVTKEGKFVESAVITQIYCLCFVNGNLECFLTLNDLELPKRDESYYEKDSEKKGIDILDYHFHKCVNVQEFEQSRIIKFVPLDACRFELMRFKTLYNGDNLPFSLKSVVVVQGAYVELQAFVNMASLAQRSSYAGSLRSCDNIRIHFPVPSQWIKALWTMNLQRQKSLKAKMNRRACLGSLQELESEPVIQVTVGSAKYESAYQAVVWKIDRLPDKNSSLDHPHCLSYKLELGSDQEIPSDWYPFATVQFSVPDTCASRTEVRSLGVESDVQPQKHVQQRACYNIQPKLYRSVIEDVIEGVRNLFAEEGIEEQVLKDLKQLWETKVLQSKATEDFFRNSIQSPLFTLQLPHSLHQTLQSSTASLVIPAGRTLPSFTTAELGTSNSSANFTFPGYPIHVPAGVTLQTVSGHLYKVNVPIMVTETSGRAGILQHPIQQVFQQLGQPSVIQTSVPQLNPWSLQATTEKSQRIETVLQQPAILPSGPVDRKHLENATSDILVSPGNEHKIVPEALLCHQESSHYISLPGVVFSPQVSQTNSNVESVLSGSASMAQNLHDESLSTSPHGALHQHVTDIQLHILKNRMYGCDSVKQPRNIEEPSNIPVSEKDSNSQVDLSIRVTDDDIGEIIQVDGSGDTSSNEEIGSTRDADENEFLGNIDGGDLKVPEEEADSISNEDSATNSSDNEDPQVNIVEEDPLNSGDDVSEQDVPDLFDTDNVIVCQYDKIHRSKNKWKFYLKDGVMCFGGRDYVFAKAIGDAEW

SEQ ID NO: 249225 - DNA, 3549 bp, Artificial Sequence
  derived and/or modified sequence
atgtgcagcaccaaccccggcaagtgggtgaccttcgacgacgaccccgccgtgcagagcagccagaagagcaagaacttccccctggagaaccagggcgtgtgcagacccaacggcctgaagctgaacctgcccggcctgagagagttccccagcggcagcagcagcaccagcagcacccccctgagcagccccatcgtggacttctacttcagccccggcccccccagcaacagccccctgagcacccccaccaaggacttccccggcttccccggcatccccaaggccggcacccacgtgctgtaccccatccccgagagcagcagcgacagccccctggccatcagcggcggcgagagcagcctgctgcccaccagacccacctgcctgagccacgccctgctgcccagcgaccacagctgcacccaccccacccccaaggtgggcctgcccgacgaggtgaacccccagcaggccgagagcctgggcttccagagcgacgacctgccccagttccagtacttcagagaggactgcgccttcagcagccccttctggaaggacgagggcagcgacagccacttcaccctggacccccccggcagcaagaagatgttcagcagcagaaacaaggagatgcccatcgaccagaagagcctgaacaagtgcagcctgaactacatctgcgagaagctggagcacctgcagagcgccgagaaccaggacagcctgagaagcctgagcatgcactgcctgtgcgccgaggagaacgccagcagcttcgtgccccacaccctgttcagaagccagcccaagagcggctggagcttcatgctgagaatccccgagaagaagaacatgatgagcagcagacagtggggccccatcttcctgaaggtgctgcccggcggcatcctgcagatgtactacgagcagggcctggagaagcccttcaaggagatccagctggacccctactgcagactgagcgagcccaaggtggagaacttcagcgtggccggcaagatccacaccgtgaagatcgagcacgtgagctacaccgagaagagaaagtaccacagcaagaccgaggtggtgcacgagcccgacatcgagcagatgctgaagctgggcagcaccagctaccacgacttcctggacttcctgaccaccgtggaggaggagctgatgaagctgcccgccgtgagcaagcccaagaagaactacgaggagcaggagatcagcctggagatcgtggacaacttctggggcaaggtgaccaaggagggcaagttcgtggagagcgccgtgatcacccagatctactgcctgtgcttcgtgaacggcaacctggagtgcttcctgaccctgaacgacctggagctgcccaagagagacgagagctactacgagaaggacagcgagaagaagggcatcgacatcctggactaccacttccacaagtgcgtgaacgtgcaggagttcgagcagagcagaatcatcaagttcgtgcccctggacgcctgcagattcgagctgatgagattcaagaccctgtacaacggcgacaacctgcccttcagcctgaagagcgtggtggtggtgcagggcgcctacgtggagctgcaggccttcgtgaacatggccagcctggcccagagaagcagctacgccggcagcctgagaagctgcgacaacatcagaatccacttccccgtgcccagccagtggatcaaggccctgtggaccatgaacctgcagagacagaagagcctgaaggccaagatgaacagaagagcctgcctgggcagcctgcaggagctggagagcgagcccgtgatccaggtgaccgtgggcagcgccaagtacgagagcgcctaccaggccgtggtgtggaagatcgacagactgcccgacaagaacagcagcctggaccacccccactgcctgagctacaagctggagctgggcagcgaccaggagatccccagcgactggtaccccttcgccaccgtgcagttcagcgtgcccgacacctgcgccagcagaaccgaggtgagaagcctgggcgtggagagcgacgtgcagccccagaagcacgtgcagcagagagcctgctacaacatccagcccaagctgtacagaagcgtgatcgaggacgtgatcgagggcgtgagaaacctgttcgccgaggagggcatcgaggagcaggtgctgaaggacctgaagcagctgtgggagaccaaggtgctgcagagcaaggccaccgaggacttcttcagaaacagcatccagagccccctgttcaccctgcagctgccccacagcctgcaccagaccctgcagagcagcaccgccagcctggtgatccccgccggcagaaccctgcccagcttcaccaccgccgagctgggcaccagcaacagcagcgccaacttcaccttccccggctaccccatccacgtgcccgccggcgtgaccctgcagaccgtgagcggccacctgtacaaggtgaacgtgcccatcatggtgaccgagaccagcggcagagccggcatcctgcagcaccccatccagcaggtgttccagcagctgggccagcccagcgtgatccagaccagcgtgccccagctgaacccctggagcctgcaggccaccaccgagaagagccagagaatcgagaccgtgctgcagcagcccgccatcctgcccagcggccccgtggacagaaagcacctggagaacgccaccagcgacatcctggtgagccccggcaacgagcacaagatcgtgcccgaggccctgctgtgccaccaggagagcagccactacatcagcctgcccggcgtggtgttcagcccccaggtgagccagaccaacagcaacgtggagagcgtgctgagcggcagcgccagcatggcccagaacctgcacgacgagagcctgagcaccagcccccacggcgccctgcaccagcacgtgaccgacatccagctgcacatcctgaagaacagaatgtacggctgcgacagcgtgaagcagcccagaaacatcgaggagcccagcaacatccccgtgagcgagaaggacagcaacagccaggtggacctgagcatcagagtgaccgacgacgacatcggcgagatcatccaggtggacggcagcggcgacaccagcagcaacgaggagatcggcagcaccagagacgccgacgagaacgagttcctgggcaacatcgacggcggcgacctgaaggtgcccgaggaggaggccgacagcatcagcaacgaggacagcgccaccaacagcagcgacaacgaggacccccaggtgaacatcgtggaggaggaccccctgaacagcggcgacgacgtgagcgagcaggacgtgcccgacctgttcgacaccgacaacgtgatcgtgtgccagtacgacaagatccacagaagcaagaacaagtggaagttctacctgaaggacggcgtgatgtgcttcggcggcagagactacgtgttcgccaaggccatcggcgacgccgagtggtag

SEQ ID NO: 249226 - DNA, 3549 bp, Artificial Sequence
  derived and/or modified sequence
atgtgctccactaatcccgggaagtgggtcacctttgatgacgatcccgccgtccagtcgagccagaagtcaaagaattttcccctcgagaaccagggtgtgtgtcgccccaacgggcttaaactgaacctcccaggcctgcgagaattcccctcaggcagcagctctacctctagcacacccctttcatctcctatcgttgacttctacttcagtcccggcccaccgtccaactctcccctctctacgcctacaaaagactttcccggctttccaggaattcccaaagccgggacccatgtgctgtatccaattccagagtcttcatcggactcccctctggctatttccggcggagagagctcactgcttccaacacgccctacctgtctgtcccacgcactgctgccatccgaccactcatgcacacaccctacacctaaagtcggtctgcccgatgaagtgaacccgcaacaggccgagtcgctggggtttcagagcgacgatctcccccaattccagtatttccgcgaggactgtgcattttcatcacccttttggaaggacgagggctcagactcgcactttacgctagatccacccggcagtaaaaaaatgttttcctctaggaacaaagaaatgcccatcgatcagaaatctctcaacaaatgctcactgaattatatctgtgagaagctggaacacctgcagagcgctgagaatcaagactctctgagatcattgagtatgcactgcctgtgcgccgaagaaaatgcaagcagctttgtgcctcacactctgtttagatcgcaaccaaaatccggctggagcttcatgctgcgaattcccgagaagaagaatatgatgagtagccgccagtggggccccatttttctcaaggtcctaccaggaggcatcctccagatgtactatgagcagggcctggaaaagcccttcaaggagattcagctagacccctactgcaggttgagcgaaccaaaagtagagaacttttccgttgcgggtaagattcataccgtgaagatcgaacacgtgtcgtatacagaaaaacgcaagtatcactccaagaccgaagtcgtgcacgagcccgacattgagcagatgcttaaactgggttctaccagctatcacgactttctggactttcttacaacagtggaagaggaactgatgaagctacctgcagtatcgaagcccaagaagaactacgaagagcaggagatctcgctggagattgttgacaatttctggggcaaggtaacaaaagaaggaaaattcgtagagtctgcagtgatcacgcagatctattgtttgtgctttgttaacggaaatttggaatgcttcctgacgctgaacgaccttgaacttcctaagcgcgatgaatcgtactacgaaaaagactccgaaaaaaaagggattgacatcttggactatcattttcacaaatgcgtgaatgtccaggagttcgaacagtcccgaataatcaaattcgtgcctttggacgcatgcagatttgagctcatgcgttttaagactctgtacaacggcgataacctgccctttagcctcaaatcggtcgtcgttgtgcaaggcgcctacgtagagttgcaggccttcgtgaacatggccagcctcgctcagcgctctagctatgctgggagtctacggtcatgtgacaatattcggattcattttcctgtgccctctcagtggatcaaggccctctggactatgaatttgcagcgtcaaaaaagcctgaaagccaagatgaatcgtagggcctgtctgggcagtctccaggaacttgaaagcgagccagtaattcaggtgactgttggtagtgctaaatatgagtccgcctatcaggctgtagtgtggaagatcgatagactgcccgacaagaactcttccttggaccacccacactgtctgtcctacaagctggagctgggttcagaccaggagataccgtcagactggtacccctttgcaactgtgcagttctccgtaccagatacctgtgcctctagaaccgaggttcgatcactcggggtcgaatccgatgtgcaacctcagaagcacgttcagcagagagcgtgctataacatccaaccaaaactttatagatccgtgatagaagacgtaatcgaaggcgtgcgaaaccttttcgccgaagaaggcattgaggagcaggtgttgaaagacctgaagcagctgtgggagacaaaggttcttcaatcaaaggccactgaggacttctttagaaattctatccaatctcccctcttcaccctccagctgccacacagcctgcaccagaccctgcagtcatctactgctagccttgtcatcccggcagggagaactctgccttccttcaccacagcagagcttggaaccagcaattcctccgccaacttcacatttccggggtacccaattcacgttcctgcaggggtcactctccagaccgtgagcggccacttgtacaaagtgaacgtgcccattatggtgaccgagacatccgggagagccgggattttgcagcatccaatccagcaggtgttccagcagttaggtcagccctccgtcatccagacatcagtgccacagttgaacccttggagcttgcaagcaaccaccgagaagtctcagcggattgaaacagtgctgcaacaacccgccatcctacctagtgggcccgtggacaggaaacatctggagaacgccactagcgacattctggttagccctggtaacgagcataaaatcgtcccagaagctctcctctgccatcaggaatcctcccattacatctcactacctggcgtggtctttagtccacaggtctcacaaaccaacagtaatgttgagagcgtcctgtcaggctccgcctccatggcccagaacctccatgacgagtctctgtctacctctccccatggagccctgcaccaacatgtgaccgacatacagttacatattcttaaaaataggatgtatggatgtgactcagttaagcagccacgaaacattgaagagcccagcaacatccccgtgtccgagaaagacagcaactctcaggtggatctatccatacgggtgacagatgacgacatcggagagatcatccaagtagatggatccggggatacaagcagcaacgaggaaatcggtagcacacgcgatgccgacgagaacgaattcctgggaaacatcgacggcggagatctgaaagtccctgaggaggaagcagactctataagcaacgaagactctgcaaccaactcctccgacaacgaagatccacaagtgaacattgtggaagaagaccccctgaactcaggagacgatgtttccgagcaagatgtgcccgatctgttcgacacggacaatgtgattgtttgccagtatgataagatccacaggtcaaaaaacaagtggaagttctaccttaaggacggtgttatgtgcttcggtggaagggattatgtgttcgccaaagcaatcggtgatgctgaatggtag

SEQ ID NO: 249227 - DNA, 3549 bp, Artificial Sequence
  derived and/or modified sequence
atgtgttccaccaatcctggaaagtgggtgaccttcgacgacgacccggccgtgcagtcttcacagaagtccaaaaatttcccgctggagaaccagggcgtgtgtcgccccaacgggcttaagcttaatttacccggtcttcgggaattcccttcaggatcatcctctacaagtagtacccccctttcatcacccatagtggatttctacttcagccccggaccaccatctaattcacccttatcgactcccactaaagatttcccggggttccctggcatcccaaaggccgggactcatgtcctgtatccaatcccggagtcctcatccgactcacctctggctatctcaggcggtgaatccagcctgttgcctaccaggccaacgtgcctctcccatgcactgcttccatcagaccattcttgtacacaccctactcccaaagtcggactgccagatgaggtcaacccgcaacaggccgaatctttaggattccaatccgatgaccttccacagttccaatacttcagggaggattgcgccttcagctcacccttctggaaggacgagggaagcgattctcactttacgctcgatccaccaggctccaagaagatgttcagcagtcggaataaagagatgcccatcgaccagaagtctctcaataagtgttctcttaactatatctgtgaaaagctggaacacctgcagtccgcagaaaaccaggacagtctcaggagcttgagtatgcattgcctgtgcgccgaagagaatgcttctagctttgtgccacatacactctttaggagtcaaccaaagagtggctggagtttcatgctccgaatccctgagaagaagaatatgatgtccagtagacaatgggggccaattttccttaaagttctgccgggaggcatacttcagatgtattacgagcagggtctggagaagccttttaaggagatccagctggacccttactgccggcttagcgaaccaaaggtggaaaactttagtgttgccggaaaaatccataccgtgaagattgagcatgtgtcttatacagagaagagaaaataccactctaagacagaagtcgtgcacgaaccggatatcgagcaaatgctgaagctcggctctacgtcttaccacgactttctggactttctgacaaccgtcgaagaggagcttatgaaactgccggccgtgtctaaacccaaaaagaactacgaggagcaagagatcagtctcgaaatagttgataatttttggggtaaagtcacgaaggaggggaagttcgttgagtccgcggtgataacccaaatctattgcctctgcttcgttaatggaaatttggaatgctttctcactctgaacgatctggagctgcctaagagggatgaatcatattatgagaaagattccgagaagaagggtatcgacatcctggactatcactttcataagtgtgtgaatgttcaggagtttgaacagagcaggataatcaagtttgtgcctttagatgcctgcagatttgagctgatgcgattcaagaccttgtacaacggtgataatctaccattcagtttgaaatctgtcgtggtggtccaaggagcttacgtggagctgcaagcgttcgtcaatatggctagtttagcccagcgttccagctacgccggaagcctgaggagctgcgacaatattcgtatccacttcccagtgccgtcccagtggatcaaagcactctggactatgaacctccagcgccagaagtccttgaaggctaagatgaacagacgagcttgcttagggagcctgcaggagctggagtccgagccagtcattcaggtcaccgtcggatctgccaagtacgagtccgcataccaggccgtggtctggaagatcgaccggctaccagataaaaacagtagtctggatcaccctcactgcctttcttataaactcgagttgggatccgatcaggaaattccctcagactggtatcccttcgctaccgttcaatttagcgtcccagacacgtgcgcctcacgaactgaggtaagaagcctgggggtggaatccgatgtgcagcctcagaagcacgtacagcagagagcttgctataacattcagcctaagctgtataggagcgtcatcgaagatgtcattgaaggagttcgtaacctgttcgctgaagagggaatagaggaacaggtgctgaaggatctgaaacagttgtgggaaaccaaggtcctgcaaagtaaggccacagaagactttttccggaactctatccagtctcccttgttcaccctgcagctgcctcactccctgcatcagaccctacaaagcagcaccgcatccctggtgatcccagcagggcggacgcttccatcattcaccactgccgaactgggtacatccaatagctctgcaaactttacatttcccggctaccctattcacgtgccagccggcgtcacactgcagaccgtgagtggccatctctataaggtgaacgtgccgatcatggttaccgagacgtcaggtcgggctggtatcctccagcatccaattcagcaggtgtttcagcagcttggtcagccgtcggtcattcagactagcgtgccccaactcaacccatggagccttcaagctacaacagaaaaatcccagaggattgagaccgttctgcagcagcctgctatcctcccttccggccccgtggacaggaaacacctggagaacgcaacctcagacattctagtttcccctgggaatgaacacaaaatcgtgcccgaggcactgctctgccaccaggagtcttcccattatatctctttgcctggtgtagttttctctccacaggtgtctcagaccaattcaaacgtcgaaagtgtgctcagtggtagcgcgagcatggcacagaatttacacgatgagagtcttagcacctccccccacggagctctgcaccaacacgtaacggacattcagcttcatatactgaaaaacaggatgtacggttgtgattcagtcaaacaaccccgaaacattgaagaacccagtaatattcctgtgtcagagaaagatagcaacagccaggtggacctctctatccgggtgacagatgacgacattggcgaaattatccaggtagacggttcaggtgatacttcaagcaatgaggagattggcagcacccgcgatgcagacgaaaatgagttcctaggcaacatcgatggcggggatcttaaagtgcccgaggaggaggcggactcaattagcaacgaagactcagctaccaacagcagcgataacgaagatccacaggttaacatcgtagaggaggacccccttaacagcggcgatgacgtgtcagaacaggatgtaccagacttatttgacaccgataatgtcatagtgtgtcaatatgataagattcatcgctctaagaacaagtggaagttttatcttaaagatggggtgatgtgcttcggaggccgggactacgtattcgctaaggctataggcgatgccgaatggtag

SEQ ID NO: 249228 - DNA, 3549 bp, Artificial Sequence
  derived and/or modified sequence
atgtgtagcacgaatccggggaagtgggtaacatttgacgatgatcctgcagtgcagagcagtcagaagtctaagaactttccactggaaaaccagggtgtatgccgacctaatggattaaaactcaacctgcccggattgagagaatttccatcgggtagttctagcacgagttcgactcccctatcttctccaatagtggacttctattttagtcctgggcctcctagtaactccccactgtctacgcccaccaaagacttccctggttttcctggcatcccaaaagccggaacccacgtcctgtaccctatacctgagtcctccagtgactcccccctcgccatatccggaggagaatcatcccttttaccgacgcgcccaacctgtctcagccatgccttgctgccgtccgaccatagctgcacccatcccacccctaaagttggcttgccagacgaagtcaatccccagcaggcagaatcactggggttccagtctgatgatttgccccagttccaatacttccgcgaagattgtgcgttctcctcccccttttggaaagacgaaggatccgactctcattttactctggaccctccgggctccaaaaaaatgttctcaagcagaaataaggagatgcctatagaccaaaaatccctcaacaagtgcagcctgaattacatctgtgagaaacttgagcatctccagtctgctgagaatcaagattcattacggagcctgtcaatgcattgcctgtgcgcagaagagaacgcgtcctcatttgtgccccacacactttttcgctcccaacccaaaagtggttggtcttttatgctccggattcccgagaaaaagaatatgatgtcttcccggcagtggggaccaatatttcttaaggttcttcctggcgggattttacagatgtattatgaacaaggactggaaaagccattcaaagaaattcaacttgatccctattgtcggcttagcgagcccaaagtcgagaacttttccgtggcaggcaagattcataccgttaaaattgagcatgtgagctatacagaaaaacgcaaataccactccaagacagaagtggtccatgaaccggacattgaacagatgctgaagcttggcagcacctcctaccacgatttcctcgacttcttaaccacagtggaggaagagctgatgaagctccccgccgtgagcaagcccaaaaagaactacgaggagcaagaaatttctttagagatcgtcgacaacttctggggcaaggtgaccaaagagggaaagttcgtggaatcggcagttattacacagatatattgtctgtgttttgttaacggaaacctggagtgcttcctcacattgaacgaccttgagttgcccaagcgtgatgaaagttattatgagaaggatagtgagaagaaaggcatcgacatcctcgattaccatttccataaatgtgtgaacgtgcaggaatttgaacagtctagaatcatcaagtttgtcccacttgatgcatgccgttttgagctgatgaggttcaaaacactgtacaatggcgacaacctacccttcagtctgaagtccgtggtcgtagtccagggagcatacgttgaacttcaagcatttgtgaacatggcgtctttagcccagcgctcttcttacgctgggagcctgcgtagctgcgacaatatcagaattcactttcctgttccctctcagtggattaaagcgctgtggacgatgaatctccaacggcagaagagcctcaaggcaaaaatgaataggcgggcttgtttgggctctctccaggaacttgagtctgagcctgttatccaggtgaccgttggaagtgcaaaatacgagtcggcctatcaagccgtggtttggaagatcgatcgtctccccgataaaaactcgagccttgatcatcctcattgcctgagctataagctggaactcgggtcagaccaggaaatcccatccgattggtatccattcgcaaccgtccagttctccgtgcctgatacgtgcgccagccgaaccgaagtccggagtttaggcgttgagagcgatgttcaacctcagaaacacgttcagcagcgagcctgctataacattcagccaaagctatacaggagcgtgatcgaagacgtgatcgagggggttcgcaaccttttcgcagaggaaggtattgaggaacaggttctgaaagacctgaaacagctatgggagacaaaggtcctccaatccaaggcaaccgaggactttttcagaaattctattcaatctccactgttcactctgcagttgccgcactctctgcaccagaccctccagtcgagcaccgcgtccctcgtcatcccagccggaagaaccttgccctcttttacaaccgccgagcttggcacttccaactcatctgcaaactttacattccctggctaccctatacatgtaccagccggggtaacactgcagacagtgtctgggcatctttataaggtcaatgttccaatcatggtcaccgaaaccagcgggagagccggaatcttacagcaccctattcaacaggtattccagcagctggggcagccctcagtgattcagacttccgtgccacagctcaacccctggtcattacaggcgacaaccgagaaatcacagcggatcgaaactgttcttcaacaacccgcaattctaccctccgggcccgtggataggaagcacctggagaatgccacctccgatattctggtgagtcctggaaacgagcataaaatcgttccagaagctttgctgtgccaccaggagtcctcccactacatcagtctgccgggtgtggttttttcaccccaggtcagccagaccaattccaacgtggagagtgttcttagtgggtctgcgtcaatggctcagaacttacacgacgaaagtctgtcgacaagcccacatggcgctttgcatcagcatgtaaccgatatccagctgcacatcctgaaaaatcgaatgtatggttgcgattccgtcaagcagccgcgcaacatcgaggaaccctctaacattcccgtgtccgagaaggactcaaactcacaggtggacctgtcaataagggttactgacgatgatattggagaaatcattcaggtggacgggagcggtgacacttcttctaatgaagagataggaagcacacgggacgctgatgagaacgagttcctgggaaacatagacgggggggacttgaaggtcccagaggaagaggctgacagcattagtaatgaggactccgcaacaaatagcagcgataatgaggaccctcaggtcaatatcgtggaggaagatccgctgaacagtggagatgacgttagcgaacaagacgtacctgacctgttcgacacagataacgtcatcgtttgtcagtacgacaagatccaccggtctaagaacaaatggaagttctatctgaaagacggagtgatgtgctttggaggacgggattatgtatttgcaaaagccatcggagatgctgagtggtag

SEQ ID NO: 249229 - DNA, 3549 bp, Artificial Sequence
  derived and/or modified sequence
atgtgcagcaccaaccctgggaagtgggtgacctttgatgatgatcctgctgtgcagagcagccagaagagcaagaacttccccctggagaaccagggcgtgtgccggcccaacggcctgaagctgaacctgcccggcctgcgggagttccccagcggcagcagcagcaccagcagcacccccctgagcagccccatcgtggacttctacttcagccctggcccccccagcaacagccccctgagcacccccaccaaggacttccctggcttccctggcatccccaaggccggcacccacgtgctgtaccccatccctgagagcagcagtgacagccccctggccatctctggaggagagagcagcctgctgcccacccggcccacctgcctgagccacgccctgctgcccagcgaccacagctgcacccaccccacccccaaggtgggcctgcctgatgaggtgaacccccagcaggccgagagcctgggcttccagagtgatgacctgccccagttccagtacttccgggaggactgtgccttcagcagccccttctggaaggatgagggcagtgacagccacttcaccctggaccccccaggcagcaagaagatgttcagcagcaggaacaaggagatgcccatcgaccagaagagcctgaacaagtgcagcctgaactacatctgtgagaagctggagcacctgcagagcgctgagaaccaggacagcctgcggagcctgtccatgcactgcctgtgtgccgaggagaatgccagcagctttgtgccccacaccctcttccgcagccagcccaagagcggctggagcttcatgctgcgcatccctgagaagaagaacatgatgagcagccggcagtggggccccatcttcctgaaggtgctgcccggcggcatcctgcagatgtactatgagcagggcctggagaagcccttcaaggagatccagctggacccctactgccgcctgtctgagcccaaggtggagaacttctctgtggccggcaagatccacacagtgaagattgaacatgtgtcctacacagagaagaggaagtaccacagcaagacagaggtggtgcatgagccagacatcgagcagatgctgaagctgggcagcaccagctaccatgacttcctggacttcctgaccaccgtggaggaggagctgatgaagctgcctgctgtgtccaagcccaagaagaactatgaggagcaggagatcagcctggagatcgtggacaacttctggggcaaggtgaccaaggagggcaagtttgtggagagcgctgtgatcacccagatctactgcctgtgctttgtgaatggaaacctggagtgcttcctgaccctgaatgacctggagctgcccaagagagatgagagctactatgagaaggacagcgagaagaagggcatcgacatcctggactaccacttccacaagtgtgtgaatgtgcaggagtttgagcagagccgcatcatcaagtttgtgcccctggatgcctgccgctttgagctgatgaggttcaagaccctgtacaacggggacaacctgcccttcagcctgaagtctgtggtggtggtgcagggcgcctacgtggagctgcaggcctttgtgaacatggccagcctggcccagaggagcagctatgccggcagcctgcggagctgtgacaacatccgcatccacttccctgtgcccagccagtggatcaaggccctgtggaccatgaacctgcagaggcagaagagcctgaaggccaagatgaacagaagagcctgcctgggcagcctgcaggagctggagagcgagcctgtgatccaggtgacagtgggcagcgccaagtatgagagcgcctaccaggccgtggtgtggaagattgaccggctgcctgacaagaacagcagcctggaccacccccactgcctgagctacaagctggagctgggcagtgaccaggagatccccagcgactggtacccctttgccaccgtgcagttctctgtgcctgacacctgtgccagcaggacagaggtgcgcagcctgggcgtggagagtgatgtgcagccccagaagcacgtgcagcagagggcctgctacaacatccagcccaagctgtacagatctgtgattgaagatgtgattgaaggagtgaggaacctgtttgctgaggagggcatcgaggagcaggtgctgaaggacctgaagcagctgtgggagaccaaggtgctgcagagcaaggccacagaggacttcttcaggaacagcatccagagccccctcttcaccctgcagctgccccacagcctgcaccagaccctgcagagcagcacagccagcctggtgatcccagctggccgcaccctgcccagcttcaccacagctgagctgggcaccagcaacagcagcgccaacttcaccttccctggctaccccatccacgtgcctgctggggtgaccctgcagacagtgtctggccacctgtacaaggtgaatgtgcccatcatggtgacagagaccagcggccgggccggcatcctgcagcaccccatccagcaggtgttccagcagctgggccagcccagcgtcatccagacctctgtgccccagctgaacccctggagcctgcaggccaccacagagaagagccagagaattgagaccgtgctgcagcagcctgccatcctgcccagcggccctgtggacaggaagcacctggagaatgccaccagtgacatcctggtgtccccaggaaatgagcacaagatcgtgcctgaggccctgctgtgccaccaggagagcagccactacatcagcctgcccggggtggtgttcagcccccaggtgtcccagaccaacagcaatgtggagagcgtgctgagcggcagcgcctccatggcccagaacctgcatgatgagagcctgagcaccagcccccacggggccctgcaccagcacgtgacagacatccagctgcacatcctgaagaacaggatgtatggctgtgacagcgtgaagcagcccagaaatattgaggagcccagcaacatccctgtgtctgagaaggacagcaacagccaggtggacctgagcatccgggtgacagatgatgacattggagagatcatccaggtggatggcagcggggacaccagcagcaatgaggagatcggcagcaccagagatgctgatgaaaatgagttcctgggcaacattgatggaggagacctgaaggtgcctgaggaggaggccgacagcatcagcaatgaagacagcgccaccaacagcagtgacaatgaagacccccaggtgaacatcgtggaggaggaccccctgaacagcggagatgatgtgtctgagcaggatgtgcctgacctgtttgacacagacaacgtgattgtgtgccagtatgacaagatccacaggagcaagaacaagtggaagttctacctgaaggatggagtgatgtgcttcggcggccgggactatgtgtttgccaaggccatcggagatgctgagtggtag

SEQ ID NO: 249230 - DNA, 3549 bp, Artificial Sequence
  derived and/or modified sequence
atgtgcagcaccaaccccggcaagtgggtgaccttcgacgacgacccagccgttcagagctcacaaaaatccaaaaatttccccttagagaatcagggcgtttgtcggcccaacggtttgaaactgaatcttccaggcctgcgagaatttccaagtggctctagtagcacttcttcaacccctctaagttccccaatcgtggatttttacttttctcccggacctccatcaaacagtcccctttcaacgcctaccaaagacttccctggattcccaggcatacctaaagcgggaactcacgttctgtatcctatcccagaatcctccagcgactcccccctggccatcagcggcggagagtccagtctgctgccaaccaggcccacgtgcctcagccacgccctcctgcctagcgaccactcttgtactcaccccactccaaaggtgggactgccagacgaggtcaacccacagcaggcggaatccttgggattccagagtgatgacctgccacagttccagtacttcagagaggactgcgccttttcgtctcctttctggaaggatgagggttccgactcacactttacactcgatccaccaggcagcaagaaaatgtttagtagcagaaacaaggagatgccaatagatcagaagtctctcaataagtgttcactgaactatatctgcgagaaattggagcacttgcagtcggccgaaaatcaggacagcctgaggagtctgagcatgcactgtctctgcgccgaggagaatgcctcgtccttcgttcctcataccttgttcaggtcccagccaaaatcgggctggtcctttatgttaagaatccccgaaaagaaaaacatgatgtcctctagacaatggggacccatctttttaaaagtactgccaggtggaattctgcaaatgtattacgagcaagggttggagaaacctttcaaggaaattcagctggacccttattgtcgcctgtctgagccgaaggtggaaaatttcagcgtggccggaaaaatccacaccgtaaaaatcgagcatgtgtcatacacggaaaagcggaagtatcattctaagaccgaggtggtgcacgagccagatatcgaacagatgttaaaactgggatccacttcctaccacgacttcctggacttcttgacaactgttgaagaggagttgatgaagctcccagccgttagtaagcctaagaaaaattatgaagagcaagaaatatcactcgaaatagttgacaatttttggggaaaagtgaccaaggagggcaagttcgtggagtccgctgtgatcacgcagatttactgtctttgtttcgtgaatggtaatttggagtgttttctcactctgaacgacttggagttaccaaaaagggatgagtcgtattatgaaaaagattctgaaaagaagggaatcgacattctggactatcacttccataaatgcgttaacgtccaggaatttgagcagtctcgcataataaaattcgtgcccttggatgcatgtcgctttgaactcatgcgctttaaaaccctctacaatggcgacaacctccccttttccttaaagtcagttgttgtggtacagggcgcatacgttgagctgcaagcgttcgtgaacatggcctccctggcacagcggtctagttatgccgggagtctgcgttcatgtgacaacatcaggattcattttcccgtgcctagtcaatggattaaggctctatggacaatgaatctgcagagacaaaaaagtctcaaagccaagatgaatcgcagagcgtgcctggggagtctccaggagcttgaatcggagcccgtaattcaggtcaccgtagggtctgccaaatacgagtctgcctatcaggctgtggtctggaagatagataggttgcctgacaagaactcgtctctagatcacccacactgtctgtcctacaagcttgaactgggcagcgaccaggaaatccctagcgactggtacccttttgccaccgtccaattctccgttcccgacacatgcgcgtcccggaccgaagtgcgttctctgggcgtggaaagcgacgtacagccccagaagcatgtgcagcagagggcatgttacaatatccaacctaagctttacaggtcagtcattgaggatgtaatagaaggcgtgcggaatctcttcgccgaggaggggatagaggagcaggtgctaaaagacctcaaacagctgtgggaaaccaaagtgttgcaaagtaaagccaccgaggattttttcagaaactctattcagagcccccttttcactcttcagctccctcacagcctccatcagaccttacagtcctctaccgcctccctggtaatcccagccggccgcactctgcccagtttcactactgccgaattgggcactagcaacagctcagctaactttacttttccaggatacccgatccacgtacccgcaggggttactcttcagaccgtatcgggtcacctgtataaggtcaatgtaccaattatggtcacagagacaagcgggcgggcgggcattttgcagcaccctattcaacaagtgttccaacaacttggacagccaagcgtgatccagacttccgtgccccagttgaacccttggagtctgcaagcaacgactgaaaagtctcagcgtatagagacagtgctacagcagcctgcaatattgcctagtggtcccgtggacaggaagcacttggagaacgccactagcgatatcttagtgtcacctggaaatgaacataagatcgtgccggaggcgctgttatgtcaccaagagagctcccactatatttctctcccaggggtggtgttctccccccaggtgtctcagaccaattccaacgtagagtccgttttgtcgggctccgcgtctatggcacagaaccttcatgacgaatcactttctacttcaccacacggcgcgctccaccagcacgtcaccgatatccaactgcatatactgaaaaatcggatgtatggttgcgacagcgtgaaacagccgcgaaacattgaggagccctccaatattccagtgtccgaaaaggactcaaactcacaggtagacctgtcaatacgtgtcacagacgacgacatcggggagatcatccaggtcgacggttctggggacacgtctagcaacgaagaaatcgggagtacccgcgatgccgatgagaacgaattcctgggcaatatcgacggaggggaccttaaagttcctgaagaagaagctgattccatttccaacgaggactcagctacaaatagtagcgacaatgaagatccccaggtgaacattgtagaggaagatcccctcaatagtggcgatgatgtctccgaacaggacgttcccgacttgtttgacaccgataacgtaatcgtctgccagtatgacaagatccatagatctaaaaacaagtggaaattttatctaaaggacggcgttatgtgctttgggggcagggactacgtgtttgcaaaagccatcggtgacgccgaatggtag

SEQ ID NO: 249231 - DNA, 3549 bp, Artificial Sequence
  derived and/or modified sequence
atgtgcagcaccaaccccggcaagtgggtgaccttcgacgacgaccccgccgtgcagagctcacaaaaatcaaagaacttcccacttgaaaaccagggggtttgtaggccaaacggactaaaactgaacctcccggggctgagggaatttccctctgggagttcatctacttcctccacacctctgtcttcgcctatcgttgatttctatttctcccctggcccaccaagcaactcacctctgagtacaccaacaaaagattttccaggatttccaggaatccctaaggcaggaacccatgtcctgtaccccatcccagagtctagttccgactctcccctagctattagcgggggggagtccagcttgctgccaacccgacctacctgcctgtcccatgctctgctgccctcagatcatagctgtacgcatcccactcccaaggtcggcttgccagatgaagtgaatccacaacaggccgagtccctaggcttccaatccgatgacctgccccagttccaatattttcgcgaggactgcgctttctcaagcccattctggaaggacgagggcagcgactctcactttacgctggacccacccggaagcaagaagatgttcagtagtcgaaataaggaaatgcccatcgatcagaagagcttaaataagtgtagccttaattacatatgtgaaaagcttgagcacctgcagagcgccgaaaatcaggatagcctgagatctttatcgatgcactgcctgtgcgcagaggagaatgcctctagctttgtgcctcacactctatttaggtctcagcccaagagcggttggagctttatgctcagaattcccgaaaaaaaaaacatgatgagctcccgtcagtggggacccatcttcctcaaagtgctgcccggggggatcctgcagatgtactacgaacaaggactggagaaacccttcaaggagatccagttggatccctactgtagactaagtgaacccaaggtggagaacttctccgtcgccggtaaaatccacacggtgaagatcgaacacgtgtcctatacagaaaagaggaagtaccactctaagaccgaagtagttcacgaacccgacatagaacaaatgctcaaactgggctctacttcctaccacgattttttggacttcctgaccacggttgaggaagagctcatgaagctacccgctgtgagcaaaccaaaaaaaaattacgaggagcaggagatttccctggaaatagtcgataacttttggggcaaagtcacaaaggaggggaagttcgtggaatcagctgtcatcactcagatttactgcttgtgcttcgtgaatggaaatctagagtgcttcctcacccttaacgatctggaactcccaaaacgtgatgaatcatattatgagaaagattctgagaagaagggaattgacatactggattaccacttccacaaatgcgtcaacgtgcaggaatttgagcagagccgcattatcaagttcgtgcctctggatgcctgtaggtttgagctcatgaggtttaagacactctataacggcgacaacctccccttctccctgaaaagcgttgtggtcgtgcagggagcatacgttgagcttcaggcctttgttaacatggcctcattggcccagcgtagtagctatgcaggcagcttacggtcctgtgacaacatcaggatccactttccagtgcccagtcagtggattaaagctctgtggactatgaacctgcagcggcaaaaatccttgaaggcaaaaatgaatagaagagcttgcctaggatccctccaggaacttgagtccgaacccgtcatccaagtcactgtcgggagtgccaagtacgaaagcgcttaccaggctgtcgtgtggaaaatcgatagactccccgacaaaaacagctcacttgatcatcctcactgcctgagctataagctggagctgggaagtgaccaagagataccatcagactggtacccattcgccaccgtgcagttcagcgtgccagatacatgtgcctctcggaccgaggtccgttctctcggagtggagtcagacgtccagccccagaaacacgtgcagcagcgggcctgttacaacatccaaccaaaactgtacaggtccgtgattgaagatgtgattgagggcgtaaggaatctgttcgccgaagagggaatcgaagagcaggtcctgaaagacctcaaacaactgtgggaaacgaaggtcctccagtcaaaagctactgaggactttttcagaaatagcatccaatccccccttttcactctccagctgccacattccctgcatcagaccctgcaaagctctaccgcgtctcttgtcatacctgccgggcgaacactgccgtcgtttacaaccgctgagctcggcacatcaaatagctccgcaaattttacgttcccgggatatcccatccacgtaccagcaggtgtcaccctgcaaaccgtctctgggcatctatataaggttaacgttccaattatggtcacagagacctccggccgagccggcattctccaacacccaatccagcaagtgtttcagcagctggggcagcctagcgtgatacagacctctgttccccagctgaacccctggtcccttcaggcaactacagagaaaagtcagcgaatagaaacagtgctgcaacagcccgccatcctccctagcggacccgtcgaccgaaagcatctggagaacgcaacttccgacattctggtgtctcctggcaatgaacacaaaattgtgccggaggcacttctgtgtcatcaggagtcttctcactacattagcctgcctggcgttgtctttagccctcaggtgtctcagaccaattccaatgtggaatcagtgctcagcgggagcgcctccatggcgcagaacctccacgatgagtcactaagtacaagtccccacggcgccctgcaccagcacgtgaccgatatccagcttcacatcttaaagaatcggatgtacgggtgcgattccgttaagcaaccacgtaacatcgaggaaccctccaatattcctgtgtcggagaaggatagcaattcacaagtagatttgtccattcgggttacagatgatgacattggcgagatcattcaagtggatggatctggcgacacgtcatctaacgaagagataggatccacgcgggatgcagacgagaatgagttcttagggaacattgacggcggtgatttgaaggtgcccgaagaggaggccgactctatcagcaatgaagatagtgccaccaactcgagtgataacgaagatccccaggtcaacatcgtagaggaagacccattgaatagtggcgatgacgtatcagaacaagatgttcccgacctgttcgacactgacaacgtcatcgtgtgtcagtacgacaagatccatcggagtaagaacaaatggaagttctacctcaaagacggagtcatgtgctttggaggccgggactatgtgtttgccaaggccattggcgacgcagaatggtag

SEQ ID NO: 249232 - DNA, 3549 bp, Artificial Sequence
  derived and/or modified sequence
atgtgcagcaccaaccccggcaagtgggtgaccttcgacgacgaccccgccgtccaatcctcccagaaatccaagaacttccccctcgagaaccagggagtttgtagaccaaacggactgaagttgaacctgccgggactccgagagtttccctccggatccagctccacgagcagtactcccctgtcatccccaattgtggatttctacttttcccccggacccccatccaattcacccctctctaccccaactaaagattttcccggattcccaggtatccccaaggccggcacacatgttctgtatcccatacccgagtcctctagtgactcccccttagccatttccggcggagaaagctcgctgcttccaaccaggcccacctgccttagtcatgcactcctgccctctgaccactcttgtacccaccctactccaaaagtcggccttcctgatgaggttaatcctcagcaagcggaaagtctgggttttcagtctgacgatctcccgcagttccagtactttagggaagactgtgcattctctagccccttttggaaagatgagggctctgactcccatttcactctcgacccaccaggatccaagaaaatgtttagtagtcgcaataaggaaatgcctatagatcaaaaaagcctgaacaagtgctcccttaactatatttgtgagaagctagagcacctgcagagtgctgaaaatcaggatagtttacggtccctgtccatgcactgcctgtgtgcggaggagaatgcttcttctttcgtacctcacaccctgttccgctctcagcctaagtcaggttggtcttttatgcttaggattccagagaaaaagaatatgatgtcgtccagacaatggggaccaatattcctgaaggtcctccccggaggtatcctccagatgtactacgagcagggccttgagaagcccttcaaggagattcagttagatccttactgcagattgagcgaacctaaggtggagaatttctctgtggctggaaagatccacacggtgaaaattgaacacgtttcttacacagaaaagaggaagtatcattcaaaaacagaagttgtgcatgagcctgacattgagcagatgctgaagctgggtagcaccagttaccacgacttcctcgactttctcacaaccgtggaggaagagctgatgaagctccccgccgtctctaagcctaagaagaactatgaggaacaagagatcagcttggaaattgttgataatttctggggcaaggtgacaaaggagggcaaattcgtcgaaagcgccgttataacccagatatactgtctatgttttgtgaatggtaatctggagtgcttcttgacactaaacgacctggagttgcctaaaagagatgaatcttactacgagaaggactccgagaagaaggggatcgacatcctcgattaccactttcacaagtgtgtgaatgttcaggaattcgagcagtccaggatcatcaaatttgttcccttggatgcctgtcgcttcgaacttatgcgcttcaagacactctacaacggcgataatctccctttttcccttaagtcggtcgttgttgtgcagggtgcatacgttgagctgcaggccttcgtgaatatggcctcacttgcacagcgctcctcgtatgccggcagcttacgctcatgtgacaatatccggatccatttccctgtaccatcccagtggattaaggcattgtggacaatgaatcttcagcggcagaagagcctgaaagcaaagatgaacagacgggcatgtctcgggtcactgcaggaactcgaatccgaacccgtgattcaggtgactgtgggctccgcaaagtatgaatccgcgtaccaagccgtggtgtggaagatagatcgactgcccgacaaaaatagctctctagaccacccccactgtctgtcttacaagcttgaactggggtccgatcaggaaatcccatcagattggtaccctttcgccaccgtgcaatttagcgtgcccgacacctgcgcctcacgtaccgaggtgaggagcttgggggtggagagtgatgtgcaaccgcagaagcacgtccaacagagggcatgctataacattcagcccaaactgtaccggagcgttatcgaggacgtgatcgaaggcgtgcggaatcttttcgccgaagaaggcattgaagaacaggtcctgaaggacctgaagcagttgtgggagaccaaagtgctccagagtaaagccaccgaagacttttttagaaatagtattcagtctcccctctttacgttgcaactgccacatagcctgcaccagaccctgcaatcatctactgctagcctagtcattccagccggccgcaccctgccatcttttacgacagcagaactgggaacttcaaactcctcagctaacttcactttcccggggtaccccattcacgtcccagcgggtgtcacgctgcaaaccgtgagtggtcacctgtacaaggtaaatgttccaatcatggtgacagaaacttccggccgcgccggcattttacagcacccaatccagcaagtcttccagcaacttggacaaccatctgtaatccagactagcgtaccccagcttaacccgtggagcctacaggcaacaactgagaagagtcagagaatcgaaaccgtcctgcagcaacctgccatactgccttctggccctgtggaccggaaacatctggaaaacgcgacaagcgacattttggtgagtcccggcaacgaacacaagatcgtgcccgaagccttgctctgccaccaggagagctcccattatatttcattgcccggagttgtgtttagcccccaggtctctcaaactaacagcaacgtcgagtcagtgttgtccggcagtgcaagcatggcgcagaacttgcacgatgagtctctgtccacaagtccacacggggccctgcatcaacatgtcactgacattcaactgcacatcctcaagaaccgcatgtacggctgcgattcagtgaaacagcctagaaatattgaagaaccttcaaacataccagtcagtgagaaggattctaacagccaggtagacctgagcatccgggtcacggatgacgacatcggggagattatccaggtcgatggttcaggtgacacctcatccaacgaggagatcggctcaacccgggatgcagatgagaacgaatttctcggaaatattgacggtggggaccttaaagtgccagaggaagaagccgattctatctctaacgaagactctgccacaaacagttccgacaacgaggaccctcaggtgaacatcgtggaggaagaccccttgaactccggcgacgacgtgagcgagcaagatgttcctgacctgtttgataccgataacgtgatagtatgtcaatacgataaaatccatcggtctaaaaataagtggaagttttacttaaaggatggagtaatgtgctttggaggccgtgattacgttttcgctaaagccataggagacgccgagtggtag

SEQ ID NO: 249233 - DNA, 3549 bp, Artificial Sequence
  derived and/or modified sequence
atgtgcagtacaaaccctggaaagtgggttacatttgacgatgacccagcagtgcagagttcccaaaaatcaaaaaacttccccctagagaaccagggcgtctgtcgacctaacggcctaaaactgaatctgccaggtctgcgtgaatttcctagcggctcaagttcaaccagctccacgcctctgtcatcgccaattgtggatttctacttctccccgggacccccttccaactcacccttgagtacccccacaaaagactttcctgggttcccgggtattccgaaagctgggacccacgtcctttatccgatacccgaatctagctccgacagcccactcgccatatctgggggagagagctcccttcttcccactcggcctacctgtctcagccacgcactgctgccatccgatcactcctgtacgcacccgactcctaaggtgggactgccggacgaggtgaatccccagcaggcagaatccctggggtttcagagcgacgacttaccccagttccaatattttagggaggactgtgcattctcttcccctttctggaaggatgaggggagcgattcacatttcaccctggaccctcccggttcaaagaagatgtttagcagcaggaataaagaaatgccaatcgatcagaagtccctcaacaagtgcagtcttaattacatctgcgagaagctggaacacctccaaagcgcagagaaccaagactcacttagatccctgtcgatgcactgtttgtgcgctgaggaaaacgccagctcctttgtgcctcacaccctctttaggagtcagcccaaaagcggttggtctttcatgctgcggatccccgaaaagaaaaacatgatgtctagcagacagtgggggcctatattcttgaaagtgcttcccggaggtatcctgcaaatgtactacgaacaaggattggaaaaaccatttaaggagatccaactggacccatactgcagattgtcagaacctaaggtggagaattttagcgtggctgggaaaatccatacagtcaaaatcgagcatgtgtcttataccgaaaaaaggaaatatcattctaaaaccgaagtggtgcacgagcctgacatcgaacagatgctcaagctggggagcacaagctatcatgactttctggattttctgacgacagtggaggaggaactcatgaaactccctgctgtgtccaaacccaagaagaactacgaagagcaggaaatctcactggagattgttgataacttttggggaaaggtgacaaaggagggaaaatttgttgagtcagcagttatcactcaaatttactgtctgtgttttgtgaatgggaatcttgagtgttttctcacactgaacgatcttgagctccccaaacgggacgagtcttactacgagaaggactcggagaagaagggcatcgatatactcgattaccactttcacaagtgcgtcaatgtccaggaatttgagcagtctcgcattattaagttcgtaccgttggatgcatgccggtttgagctgatgcggtttaagaccctgtacaacggtgacaaccttccattctctcttaagtcagtggtggtggtgcagggggcatacgtggagctgcaggcctttgtaaatatggcttcactggcacaacggtcaagctacgcgggaagtctccgatcgtgtgacaacatccggatccacttccctgtgccctcccagtggattaaagctctgtggactatgaaccttcaaagacagaagagcctgaaagccaagatgaatcgcagagcgtgcctgggctcactacaggagcttgagtcagagcccgtaatccaggttaccgtcggtagtgccaagtacgaatccgcctatcaggccgtggtgtggaagatcgacagattgcccgacaagaactccagcctggaccacccccattgtctgtcatataaactggagcttgggagcgaccaagagattccatccgactggtacccttttgccaccgtccagttttctgtcccagacacctgcgcctcccgaactgaggttcgcagtctgggtgtagagagcgatgttcagccccagaaacacgtgcagcagagggcatgttacaatattcagccaaaactttatcgcagcgttatagaggacgtcatcgagggcgtaagaaatttatttgccgaagagggaattgaggagcaggttctgaaggatctcaagcagctgtgggagacaaaggttcttcagtcgaaagccaccgaggacttttttagaaattccatccagtcacctcttttcaccctgcagctgccccactctttacatcagacattacaatcgagtacagcctccctagtgattcccgctggacgaactctgcctagtttcacgaccgcggagctgggaacatctaattcctctgcaaactttaccttcccaggatatccgatacatgtccccgctggagtcactctgcagaccgtatcgggccatttgtataaggtgaacgtgcccataatggtaacagagacctccggcagagcgggaatcctgcagcatcccatccagcaggtgtttcagcagctcggtcagccctcagttatccagacaagcgtcccgcaactgaatccctggagtcttcaagccaccacagagaagtcccaacggattgagaccgtccttcagcaacctgccattttgccaagtggtcctgttgataggaagcacctggagaacgcaactagcgatattctcgtatcccctggcaatgagcacaaaatcgtccctgaggctctcttatgtcaccaagaaagctcccactatatttcactgcccggagttgttttctcaccacaagtatcccagaccaattcgaatgttgaaagcgttcttagcggaagcgcctcaatggcacagaacctccacgatgaatctctctctactagtccccacggcgctctccaccagcacgtaactgacatccagctgcatatcctgaaaaacagaatgtacggttgcgattcagtgaaacagcccaggaatattgaggagccctctaacatacccgtcagcgagaaagacagcaatagccaggtggatctaagcattcgggtcacagatgacgacataggggagatcatccaagtggacggcagcggggacacctcctcgaacgaggaaatcggctccaccagggatgcagacgagaatgagttcctgggcaacatagacggcggtgacttaaaagtgccagaggaagaagccgattccatctcgaatgaagactccgcaacaaatagcagcgataacgaagaccctcaggtaaatatagtggaagaagaccccctgaatagcggcgacgatgtgtccgagcaggacgttcccgacttatttgacacggataacgttatcgtgtgtcagtacgacaagatccacagatcaaaaaataaatggaagttctatctgaaagatggagtgatgtgctttggagggagggattacgtgttcgcaaaggccatcggcgacgctgagtggtag

SEQ ID NO: 249234 - DNA, 3549 bp, Artificial Sequence
  derived and/or modified sequence
atgtgcagcactaatccaggaaaatgggtgaccttcgacgatgaccccgcagttcagagttctcagaagagtaagaatttccccctcgagaatcagggagtatgccggcctaacgggctgaaattaaatttaccagggctgagagagtttccatccggttcgagcagcacgtctagtactccgttatccagccctatagtggatttttacttttctcctggtccgccatccaattcgcccttgtccacccccactaaggattttcctggcttccctggcattcctaaggccggaacacacgtgctgtacccaatcccggagtcaagctctgatagccctctagccatttccgggggtgagagctccctgctgcccactagaccgacatgcctgagtcacgccctgttgccctctgaccacagctgtacccaccccactcctaaagtgggattgccagatgaggtcaatccacaacaagctgagagcctgggcttccagtccgacgacctgcctcaatttcagtatttcagggaggattgcgctttcagctctccgttctggaaagacgaagggagcgacagccacttcaccctcgatccccctggctcaaaaaaaatgttttcctcaaggaacaaagaaatgccaatagatcagaagtcactaaataagtgcagtttaaattacatctgcgaaaagctagaacacctccagagcgccgaaaaccaagattcgttacgttccctctccatgcattgtctttgtgccgaagaaaatgcgtcaagctttgttccccatacactgtttaggagccaacctaaatccggctggtccttcatgcttcggattcctgagaaaaagaacatgatgtcgtcccgtcaatggggtcctatctttttgaaggtccttccgggagggatcctgcagatgtactatgaacaaggtctggagaagccttttaaagaaattcagcttgacccatactgccgcttatctgagccaaaagttgagaatttttctgttgccggaaagatacataccgtaaagattgaacatgtgagctatacggaaaaaagaaagtatcattctaagacagaagtagtgcatgaacccgacatcgagcagatgttgaagctcgggtccacttcttaccacgatttcttagacttcctgacaacagtggaagaagagctaatgaagttaccagccgtgagcaagccgaagaaaaactatgaggaacaggaaatcagcctggagatagtggacaatttttggggaaaggtcaccaaagaggggaagttcgtagagagtgctgtcatcacccagatttactgcctttgtttcgtgaatgggaacttagagtgttttttgactctgaacgacctagaactgccaaaaagggacgaatcatattatgaaaaggattccgaaaagaaggggattgatatcctagactaccatttccataagtgtgtgaacgtccaggaatttgagcagtcccgcattatcaagtttgtcccccttgacgcctgtcgctttgagctcatgcgattcaagaccctctacaatggggataatctgcctttttccttgaagtccgtggtggtcgtgcagggagcctatgttgagctgcaggcttttgttaatatggctagtctggcccagagatcaagctacgcgggttccctgcgctcctgtgacaatatccgaatccatttcccagtgccttcgcagtggattaaagccttatggactatgaaccttcagcggcaaaaaagcctgaaggccaagatgaaccgcagagcttgtctaggtagcctgcaagaactggagtccgagccagtcatccaggtgacagtcggatcagccaagtatgaatctgcgtaccaggccgtggtgtggaaaatcgatcgcctgccagacaagaactcctcactggaccacccacattgtctgtcctataagctagaacttggatcagatcaggaaatcccttccgactggtatcctttcgctaccgtacagttcagcgttcctgatacttgtgctagtagaaccgaggttcgatccttaggggtcgagtctgatgtccagccgcagaagcacgtacagcagagagcctgctataacatccaaccgaagctgtatcggtccgtgattgaagacgttattgaaggggtgcggaacctcttcgccgaggaagggatcgaagagcaggtactcaaggatttgaaacagttatgggagacgaaggtcctccagagcaaagcaactgaggactttttcagaaacagtatacagagtccactgtttacactgcaactgccacattcccttcatcaaactctgcagagctccaccgcttcattggtgataccagcagggcgaactctcccctcttttaccacagcagagctcggaaccagcaatagctcggctaatttcacatttcccggttacccaattcacgttcctgccggtgtcactctgcagacagtttccggccatctgtacaaggtgaatgtgcctattatggtcaccgagaccagtggcagggcagggatactccaacaccccatccagcaggtgtttcagcagctagggcagcccagcgtgatccagacctccgtccctcagcttaacccctggagtcttcaagccactaccgagaagtcgcagcgtatcgagactgttctgcagcagcctgccatcctcccatccggcccagtcgatcggaagcacttggagaacgctacaagtgacattctggttagccctggcaacgaacacaaaatcgtgcccgaagccctgctgtgccatcaggagagctcccactacatctcactccctggcgtggtgttctctcctcaagtgagtcagactaattcaaacgtagaaagcgtgctctctggcagcgcctctatggctcaaaatctacatgacgaatcattaagcacctctccacatggcgcactgcaccagcatgtgaccgacattcagctgcacatacttaagaaccgcatgtatggctgtgattcagtgaagcagcccagaaacatcgaagagccaagcaatatacctgtgagcgaaaaggactccaacagccaggtcgacctgagcatcagagtgactgacgatgatatcggagaaataattcaggttgacgggagcggggacacttcttcaaacgaggagatcgggtccactcgagacgcagacgaaaacgaatttctggggaacattgatgggggagacttgaaggtgccagaggaggaggcagactctattagtaacgaggactcagcaactaacagctcagataacgaagacccgcaggtcaacattgtggaggaagatcccttgaatagcggggacgacgtgagcgaacaagatgttcccgatctattcgacactgacaatgtcatcgtgtgccagtacgacaagattcatcggtcaaagaataagtggaagttctacctgaaggacggggtgatgtgcttcggtggtagagattatgtgtttgctaaggctattggagacgcagaatggtag
